United States Patent Application Publication US 2011/0191912 A1 - sequence listing, part 20

SEQ ID NO: 32397 - DNA, 3003 bp, Unknown
  misc_feature (1)..( 3003): 2750-1469P.txt file - cDNA_ID_3054609; gDNA_ID_2214471; Annot_ID_133087
gatatgaaacaacagaatcaggaaaatttgttaaaatgtcagaaaatggaaaaatctctaactgaacaaaagtaacaaaaaaaactcccttagaaacagaggaatcatgatgagagacaaaattatacagagacgtggagatgtctgtaacgttgtctcatccatcatcatgtcttcttcttctcttccttctcttttccggtcatccctccgtcctcggaacctccatccccgacgcggtgaacacggcggcgcgtttggtaaacagagcgagaagagcaaaactgtcgagagaatttctacaagcgcacaacgatgcacgtgtttcttcaggcgtgccaacgctcggatgggacagagacctggcccgattcgctgataaatgggctaaacaacgtaagtccgattgcagtatgatacattcaggtgggccttacggtgagaacattttctggcaccggcgtaagaagacgtggtcgccggagaaagtggtgacgagatggtttgaggaaaggtttaactacgacgtgaaaacaaacacgtgcgcaccgggaaagatgtgcggccattacacgcagatggtgtggagagagaccacagccgttggatgcgcacgtgtgaaatgccataacggtcgtggctatcttgtggtgtgtgaatatgatccacgcgggaattacgaaggtgaaagaccattttgatcaaaacagttaaaatgaaaaaattgttagagattcaaaatattttttcttcttctaatgtaatgaagatggtatattattcttggtccttacatatatacagccatgtattgaagaggtataaattcaaatggttcggaatcttttaattttatatattaaagatcaataataaaaaaaaacgtcgacagcagggttcgaacctgcgcgggcgaagcccaatagatttcaagtctatctccttaaccactcggacatatcgacttgttgtatttgtttcgtaagatttgaatacaaaaccgaattctctgttgcctaaatcggagcttttcatcccttgactctctaagacatctgaagcagctaaagtgttggatgtttcacataacgacatgggcggcaagcacccagtggacacaacaaggtacctttgttcttggccgccctctaattcgggtgaaattggaagagaggtgcttggtatatactaggatgcgtatttggtgcttagagatttgatgaaactgaagcagttagatattagagacaacgacctaatatttgcaggtgaagagttcagctcttttgtccgccaggtttttccaaagcttgtatggcttgatggccacaaactcgcaagttaaagataaatgttaggccacttgttttaattaaagtataaaactctttcgtttttttggattcattttcatgaaatcaaaagactacaagtctacacgtgcttcaagcttgaggctctaaatgaagtggtaggaaagaatgaaataataataaaaaaagtcagaaaaatggatggtctgagatcaaagtgaaacctactccacatacacatcccaacttcttccccgccatgtggacttttctttttcctactttctctctctgcattctctcttacacctgtctttatctgaaaaataaccgatgagctcgtcgccgtcaagaaatccaacgaacgccgaagcacctccgccaccaccaacatcgacggatgctgtggcagagggttcgtctaagaaagtgaggaaaccatataccatcaccaagtcaagagagagctggacagaggaagagcacgataagtttcttgaagcacttcaactgtaataatttatctctgtttctctgtttttagagacttcaaatttcttagtttgctgctgatttctgagtttagttagttatagactgaacaaacagaggaaagtttatgttacttagcttaggtctagtagtaacttagctataaaaaatctgcttagctaaaaagatctgcttcttggagcacttcaactgtaataaatttatagttgtgttgactttttgaaagtgttattgatgtaactaggacctgattctgctgatactactactcctctatgttccttaggtttgatcgtgactggaagaagattgaagattttgttggttcaaagactgtgattcaggttttaaaatagcttactctgcatttttggtcgcagttactttgtggcaatgttttcaacttatttgactttgtactgcagataaggagtcatgctcaaaaatactttctcaaggttcagaaaaacgggacattagctcatgtgccacctcctcgacctaagcgcaaagcagctcatccgtatcctcaaaaggcatcaaagaacggttcgaatattttataatacttcttagtttggttatagagttgagtttttaactcacattttcttgcagctcaaatgccacttcaagtttccacgtcttttactactacgcgaaatggcgacatgccgggatatgcttcatgggatgatgcctcaatgctgctaaacagagttatttcaccacaacatgaacttgctactcttcgtggagcagaaggcatgcacatttgtctatcctttttgttttcttcattttattggtagttgtagtaagaataggttccatcaaaggacgtttcatgtgcttattatggcatataacgccactgattcagctgatattggatcaaagggcttattaaatgttagtagcccttctacatctggcatgggaagctcaagccgaacagtatcaggttctgagattgtaagaaaggctaaacagcctccagtgcttcacggtaaccatctgtgaacaattccatgttttttcactaacttttatgcatgatggagactgtactgatactatctttgtaggtgttcctgattttgctgaagtttataatttcattgggagtgtctttgatcctgaaacgagaggccatgtggaaaagctcaaggaaatg

SEQ ID NO: 32398 - DNA, 3000 bp, Unknown
  misc_feature (1)..( 3000): 2750-1469P.txt file - cDNA_ID_3054714; gDNA_ID_2926147; Annot_ID_197825
ttcggttctttctaagggaattcaggttttgtttacccttgtcaaagagaaatttcagtgaattaacaagcaagaggtgcggttgcaaagtacaaagattgtgaggcctagtggccgaaccctactttgaagaaggcctcgaggacgaattagggtcggagtctcctgagtttttcaagaatggtcagagataagtgttacatctgtcttgagacctaagtctcggactcggggttaagcatttaatatctcaaaagttcgctgataaaacaagttattccactcattgcaaatttgcaatgcataagagaagatgaaaaaattgaaaggctatgttcgactaatttacaagaaaacttagtaattttagaaaaactttaaaccgtctccaatcaaataacgtcataaactgtccgacattaggcctttagtgtcgtgtcctaactttaccacaagacatgccaatgtactaaggaggaaacgaaaaagaggtgagcataaaaatcaattttcgttacaatccctctacaacactctaatctaatctacctaaaatcggtaagccattttttcacagcaaatccattgcctctctcaccttcaaaaatttgactgatatattctgcatatttctatggacgaaaatgacaaccaaaaaaggtggtggaaaacatgattacgaaacaaaaattcttaaagaatataatagtaaagttgcaaaattaaaagaataatcaaaaggataaacggttgaaagagaagtggaggatcaaaatttgttgtacaaaagccaaaaacatttatttaagaatcccattaaattaaggggaatcttggttctcaaccagacgttaatttagtcttaattcaactccattttccattcttttgacttgatgctcacattacgtggagtcataagaatttatagcaagaaaaaaaattatgatccaaaatttaagattgttattgcatcattttaaaagtacataaaaattacaaaagatttcacggagcaatactcttaaaatacaatttcaaagcatcatttttttgtttttcttttcaacaatcatcacgtttgaaaaatagtatatattcggtaccaagattttttcacttgaaattaaaatatatagaaacttaggaaaaagtatatattaggatattatcaaaaatataaagtatatatcgaaaacataaagccaacgattttaaaaatgctcaacgttatcttgttcaaagagtgtggtacattaaaacgtgtcgtattctcatttgtacagtaagcaagtggaatccaagttgagttatgcaatttaaccgcgagataaaataagtaacgaagcttatttgtctgaaatcagcagcaaaatatccgtttctgttgaccgacgcctaccttactcatttagtcattacctacttttgtctgactcactcaccgtccatactttttacatttatgtgtagacataccaaagtttgttatatccaatcaagaactatgtgtaaacttaaattaaaccaaaaagaaacaagcaaaactgattatggtagttagaaaatagtctaactattatggacgttttaacaatcttttgtgttttcgtgacgatttttgtgtaaacgcgttcccgtgacgatttttgtgtttccgaaacgtttcgaaaacaggaaacggacctcggaacgggtttccatgcaacctaagacgtaacccgacctagatttgaaatcacaatgccttttttaagtcgagaatatataaagttgagagattacctgtttctggaaactctttgctaagtcttcaaaatgctttcaagtactctttgaaaatgtcattgtctaatcatgctaatctgatatattataagattttatttcggcccaactggtacaataatgtaaacgccattaactatgttgattggtacttttttgcggacaaataatacaccttatacttgttgacgttgtgcttatcatcttcagttctagccatgtttctagtaatatttgcatgtccatgaccataattctactttcgtcatttgataggagtgttctgatcaaaagatttggtgtaatatcgttgcatcttactatgttggattcatatatttctaaaaattagatcaggatatattattattattattattattgttattttgtttcgttgtatcaccatccaaatcaaactcgaataatacgttgttttttataaaaaaaattacataatcttatctgaaaattgctttaaatcataacattttaatagattttgttgttgtcaaacctacatgttttacaaacatgttttggttgagaatcaaaattttatgaaccttgtttttcgtgttttaacacataaacgcaagaccgttttcacatatatgtaatgtatgctttgcattaccggtttaaatttctaatttattttatttaatataattttagtgaaacaaaattttctctaataataaaatagaaacattgtatctttcacctttaccaaatcaaacaaaattttatgtttcttactagtaaaccccccaaagtagttgatatcttgtttgatagatttttcatgcatataatgaacatttaaattttacaaaacaaaaccattttttctttatttgtttcttggtcctctcaaatccaacccaccaagacaaagaaatagatattccctttcttatgtaaagacaaaagtccataaatactctctttcaacacctctctcacactcaccatgcaatttttctttccttgtgaccaagacttctctccaactctaaaccaaaaaacacccagattttttctctctgatttcaagattccccaaaactttttctccaagaccctctacaactttcttggtaagcctcttctacttcttcccaagtttgatcactcagcgaaacaaagcaaactaagtaacaaagttaaaaaaacaaagaatttgattgtttttttttcttatagatg

SEQ ID NO: 32399 - DNA, 3000 bp, Unknown; identical to SEQ ID NO: 32398
  misc_feature (1)..( 3000): 2750-1469P.txt file - cDNA_ID_3054714; gDNA_ID_2926147; Annot_ID_139157

SEQ ID NO: 32400 - DNA, 3000 bp, Unknown; identical to SEQ ID NO: 32398
  misc_feature (1)..( 3000): 2750-1469P.txt file - cDNA_ID_3054714; gDNA_ID_1620633; Annot_ID_47299

SEQ ID NO: 32401 - DNA, 3000 bp, Unknown; identical to SEQ ID NO: 32398
  misc_feature (1)..( 3000): 2750-1469P.txt file - cDNA_ID_3054714; gDNA_ID_1620633; Annot_ID_162766

SEQ ID NO: 32402 - DNA, 154 bp, Unknown
  misc_feature (1)..( 154): 2750-1469P.txt file - cDNA_ID_3054729; gDNA_ID_1564506; Annot_ID_149570
gtgtataactggaaaattacgttgttgtctcccgagactttggtttgtctcattccccattcgcgttcttatataaagctcacagttcgagagagacaagagaccaacgaaacgaactagagacagtttgattcgaaaatcttgtcggaaaatg

SEQ ID NO: 32403 - DNA, 3 bp, Unknown
  misc_feature (1)..( 3): 2750-1469P.txt file - cDNA_ID_3054754; gDNA_ID_1564516; Annot_ID_149586
atg

SEQ ID NO: 32404 - DNA, 648 bp, Unknown
  misc_feature (1)..( 648): 2750-1469P.txt file - cDNA_ID_3054765; gDNA_ID_1564520; Annot_ID_149592
cgccttctgcagacgttatttggaccgcattggtgaaaccaaatacttaatggctctaaagaatctttgtgactctggcattgttcaggtaatttcttacacaatctagatgatgattcatttatctcggatctatcctgagatctaaatacacttaaatcttgctctctgtwttatttcagccgtatcctcctctgtgtgatgtgaaaggaagctatgtatcacasyttgaacacaccattttactgcgacctacttgcaaagaagttctctccaagggagmcgactactgattcagatcctctgttttgctctgtttacctttatcatctcatactgttgtcgagattgtacacttgcttgttttcttttgtccgtcgttaacacaagctttgaatccttttataaaaagcttcagtgcctctgttaaaaaaaaactatgtatttgccatgaacatgaatttgctcatcaatcttactagaagttgattgataaagctccttgctttggagaattggtaaagctactaatttgacaagatcatataaaaagatatataaatrcagatatggtaaagaagagagaacactgggatcacacagagatcttagccaatagacttttgagctactcgaggcatttccatg

SEQ ID NO: 32405 - DNA, 4 bp, Unknown
  misc_feature (1)..( 4): 2750-1469P.txt file - cDNA_ID_3054773; gDNA_ID_1564526; Annot_ID_149603
catg

SEQ ID NO: 32406 - DNA, 54 bp, Unknown; identical to SEQ ID NO: 378
  misc_feature (1)..( 54): 2750-1469P.txt file - cDNA_ID_3054783; gDNA_ID_1564528; Annot_ID_149606

SEQ ID NO: 32407 - DNA, 659 bp, Unknown; identical to SEQ ID NO: 271
  misc_feature (1)..( 659): 2750-1469P.txt file - cDNA_ID_3054802; gDNA_ID_1564532; Annot_ID_149614

SEQ ID NO: 32408 - DNA, 452 bp, Unknown
  misc_feature (1)..( 452): 2750-1469P.txt file - cDNA_ID_3054903; gDNA_ID_1564573; Annot_ID_149679
tttcctggraagatacaagccattatactctaaaagaatataaacaaaarcaaatatattattcaacattggaatatatatactgtatgtaaaggcttccttagagaagtagaagaagagaagtatctggagagagagaggcgtgcgatttccgcatcgaagaaacagtacggagttttatccgctccgattctggtgagttttttttcgatttcgttgtccgtgttcttcgctttctcggaatttgtgtgtttttggattcttcgtatattatatgttgctttgacactgatctctgatttgatttatgcggctactcgatttttgaaatctgatcgttgttttattcgaagattcgtcgtttgttttcaatctctgttttctcatagtgtaacttgaagctgacaattagatttgaatgattttgatctctttgacagtggaagataatg

SEQ ID NO: 32409 - DNA, 49 bp, Unknown; identical to SEQ ID NO: 383
  misc_feature (1)..( 49): 2750-1469P.txt file - cDNA_ID_3054977; gDNA_ID_1564597; Annot_ID_149724

SEQ ID NO: 32410 - DNA, 126 bp, Unknown; identical to SEQ ID NO: 387
  misc_feature (1)..( 126): 2750-1469P.txt file - cDNA_ID_3055110; gDNA_ID_1564641; Annot_ID_149799

SEQ ID NO: 32411 - DNA, 3003 bp, Unknown
  misc_feature (1)..( 3003): 2750-1469P.txt file - cDNA_ID_3055197; gDNA_ID_1971713; Annot_ID_175144
gccttgaatgcaggatgctacttgcgttactctaactataccttctataatgaacgtggattgcttgctatgagtatgtctctgtctctgtctcataacacttgtgttatttgtaaaaattgtgatccgtttgtattatgatcataacatttcttgtatgtttttcttgtaggcttcactaaagaaaaccttacgtatatatttgttatttccatggtgggtgtgttggctattgcagctggattttggtgtggaaaatgcttctatatgcgaactagtccaaagaagaagattaaaggtaagttccacaagactatattgtgctcataaaggaactaagactaaaaagtttcatttgtttggacatctaaggatagagaaagagtcagagtcaatatgtactgagtcacacttgatgagctttgagtattcaactcttaaaaaagcaaccaacaacttcaatgagagttgcaagcttggtgttggtggatatggtgaagtcttcaaggtttctctcttctctgtataactatctttctttacactttaccactatgttgattgattaaaaatccttattgtctttttgacagggaactctgtctgacggtagagaaattgcgattaaacgactacatgtatcaggaaagaagccacgggatgagatccataatgaaatagatgtgattagtagatgccaacacaagaacttggttaggctcttaggttgctgcttcactaacatgaatagtttcattgtttatgagttcctcgccaatacaagccttgatcatatcttgtttagtaagacactcttctctaatcacgcacatatcttcttacttgtttgaaaagtttctaaacattttttccttgacatggaaatgaagacccggagaagaagaaagagcttgactggaagaagaggcgaaccataatcttaggaacagctgaagggttagagtatcttcacgaaacgtgcaagatcattcacagagatatcaaagcaagcaacattctgttagacttaaagtacaaacctaaaatatcagattttggattagccaagttttatccagaaggtggcaaagacatccctgcttcttctctttctccttcttcaattgcgggcactctgtaagtcctttcaatacaaagaacttcgtagaggtccttactattggtctgatttagaatgtgaatgttacattgtttacagaggatatatggctcctgaatacattagcaagggaagactaagcaataaaatcgatgcttatagcttcggagttcttgttctcgaaataaccagcggttttcgaaacaataagttccggtctgataactcccttgaaaccttagttactcaagtgagtctccatcttcatcacatcaatctttaactctccgagtgaccttcatatataacccattttcgaaccttttaatttcttgaacaggtttggaaatgttttgcttcaaacaagatggaagagatgatagacaaagatatgggagaagatacagataagcaagaaatgaagagagtgatgcagatcggtttgttgtgcacacaagagtctccacaacttcgtccaacaatgtctaaggttatacaaatggttagttccacagatattgtattgcccactcctactaaaccacctttccttcatgattccatgtaaaaattcatgtagaatttatatagattcctcaattccttattgttaataacacattactagaaaacatacaaataatcattgtgtatttcgtacgaataactattaaaaattatgtttatttttcttctaagttatgtagatagattcaaaatatatatttttgagattcatcccaatattaacacctatatatatgtttatatatgattaatctcaaaatataatacaatgtgataaaataaatgaatgagataaagactggtctgacgaatgtgtatcattgtctgataagttagttagtgccttgtgttgttatttgtggaaggcttgtactgttccaaccgtccattactttttttgagaaaatttgttgagagggcaattttcaagtttgtaaatttgccacttcaataacttctttgatttgatttgtcaattaggtagttcttacttcttactacattgatgtcatgcactttcatttagctgtcattttagagaagaaattacaaaaacgttattattttaactaactacttatgtggaatactatctcatttcgggggtacattgttttaacggtggcgataaaaagtgttttgtaacagtgaatagagaataatatactgttgacacatgatagtgtaaaagtgaacattatataacgaacaagtgtgtggtaaatactatcaccagggtaaagtaaagacattgttgtattaatgtgacccatgctgacgaaaatatgtatgtctgtgactcataatgacaaaaattattaatcatacatcatgtcatcactttgccttaatttgttggttaatatagagcatatgttggctaataaaaagaagaagaagaaactatcaaaataaaaattacgagaacgttacaaaagtaaaaaaattagatgcatacatgtgttaaatgttttataaagtttaatttgtgtggagtatatcatttttgaacaaataaccataaatagaaaaacaagaaaatactcaattcttaagtcaaaaatagtattaccaaagtcaaaaatagatgtacgcatgtgttcttcgagtatctcaattctttcgaaggtattatatattttatatttatgctaaaattttacagcttctatgatagagagtgacttattatactatataaacgctagaccattgagtgatgcaaatcacaaagcttctttaataacacacatacagattctttcaacagctgccactacctttcgaaatgtaagcatctcctctaatctccatcatttttcagaatgtgttacaaatgaaatataataaaaatg

SEQ ID NO: 32412 - DNA, 755 bp, Unknown
  misc_feature (1)..( 755): 2750-1469P.txt file - cDNA_ID_3055219; gDNA_ID_1590963; Annot_ID_150338
  misc_feature (30)..(30): n is a, c, g, or t
  misc_feature (45)..(46): n is a, c, g, or t
  misc_feature (52)..(52): n is a, c, g, or t
ttgatgggtcataaagttcataggaatcgnctgttttggagaagnnaataanccaaggagatgtatgtatcactcgaagagaaacacaagcttcgtgccatgttttgcagacagcagaagcacggatgttatctttcaacgggagacgagaaattaccagttgtaagagatcacaaggaaggtttatgaaagtttgatacttttctttttccttgctactctgtttcttccttttcgtcttcttcttcttcttcgacctgtaaaagtaaaacccaaagtctcaaaatctcaaagctacaaatcatatttttaagccgaatttgaaatttttgaaaactcaagatccaagctttgaccttcttctggtaaccatggtgaagaatgggagattaaggattaggttttggggtccgacgaagtcgtaacgggaaagaagcacaagatatcggagaagagtctcctggccgttagattaggacgacgacgactgatccaacggtgatctctgatcgttctcttggtctcttcgccgttgaattttcagattagtcataagcaaatcatccaaagaggaccggttcggttttatacggtcttaaagttattaaattatactattaattacgatgatctaaacggcgtcgtatcaaattcatctcatatgcttacgataacgtcccattgccaagctggttctttcactcttcaggagaaagagagagagagagagagagttatcagagatagcaaaaatg

SEQ ID NO: 32413 - DNA, 2681 bp, Unknown; identical to SEQ ID NO: 432
  misc_feature (1)..( 2681): 2750-1469P.txt file - cDNA_ID_3055223; gDNA_ID_1590964; Annot_ID_150342
  misc_feature (2)..(2): n is a, c, g, or t
  misc_feature (24)..(24): n is a, c, g, or t
  misc_feature (85)..(85): n is a, c, g, or t
  misc_feature (103)..(103): n is a, c, g, or t
  misc_feature (162)..(162): n is a, c, g, or t
  misc_feature (225)..(225): n is a, c, g, or t

SEQ ID NO: 32414 - DNA, 2669 bp, Unknown; identical to SEQ ID NO: 428
  misc_feature (1)..( 2669): 2750-1469P.txt file - cDNA_ID_3055241; gDNA_ID_1590947; Annot_ID_150303
  misc_feature (2394)..(2394): n is a, c, g, or t
  misc_feature (2410)..(2411): n is a, c, g, or t

SEQ ID NO: 32415 - DNA, 2057 bp, Unknown
  misc_feature (1)..( 2057): 2750-1469P.txt file - cDNA_ID_3055249; gDNA_ID_1590949; Annot_ID_150307
ttatggcctgttttcggtatggattaggatcctagatatttttataatcaaccctgcatgtgacatgtgaaatgtcaatgtgcttattaaatctgtagtcaatcaatacatgtcatgtcaatgtgcttattaaattattatatgccatatatcaacgtacgttcccacttgagatgattaggttttggtcaatgccttggtggtggctctatacgcgtaaatcgtatcttctacatcggttgacaaaaaaaactggtatcttctacacttttatcttttgagcttctctgttttgtcgccacctaatgtgtaatgtcttttattcaatgcaaaacccgtatcttctacatttcgttgacaaaacaaattggtatcttctacactgtgtagtgaccacaatgtatcatcaactggtattgcatcagctcagaagcgagtcatttgggcattgtatattctacggaccaatttttttcatttttagcaaacaaattttacaaactacatatcggttgtccataaagaaaacaagtacgtagaaaaataagaaaacaagtacgtatacttaacgctaataaatagcaaccgacttttgaattatttgatttaactctttaaattatttcttagaaagagttatggaagaattaaaagttttaaaaacatttgatgctaatctagtttttctttggtgactttttttcaaccaatttgagatgttttaaatggggatctgacaagtaactattgtaccaggaatacgcaccatttcctttttttgtgcttataaatacatatttatttattttatttatataataatttgaaaacttagaaattacactaatttattaattctttacttacaaacaattggttttagtttttaaaattatccaaggctgatttcacctaattaaaataactatgactagattttaatccgcggtataccgcggggacaacttattttttaaattagtatatataaaagtttgcaaattaaatctatttatttttattttatagtttacaattgttattaagtaacgtcctaccaaacccgtctcgccaaatccgtcccgtaaaaaaaaaccgcggtacaccgctaatttaaatatataattaaaataaatattttacgggattgcaattgtattttggtttgtcaaacaaatatttgtttaaaatagttgccaaaatctagttcaaattttggagaaaaaagatttattggatagataaagaatgtatttaggtgggttttgatcattttaagggattgcaattatatttttgtttgtcaaacattttttgttttaaatagttgctgaatatatttagaatatttttagtttgttaatcaatttatcgctggaaaaaaatcaataattaatagttaatggtaaccattgtaaataagtcctaactctaggatttatttcacaaaatggctgtaaaaatgtatatatagatgattcattatttcattttatgcggtaggagtaaaaacaacattaactagcaaaaactataatacacacacaacagtaactactcatcgagtatggcattcatggatacgaatcaaatctcaaatcgtaaaagcctggccattattttattttacaatatttgataatgtgctacctaaatatcaaaattttagaatattctgaaataaaatgtcgaatttttgtgatagccttaaattactacatgctcacgtatgtaaattttctattctttcatagttaattttctattaaaatgtacaatttccagtttgatggtatgaagatcaacaaagtaccataaaaatgtataatttctatttcttcctaattaatattctttaaagtgtaattttccacttcatccttgttaattttcttaaataataaaatgtaaaacttacaaatttcacggactttattaacagaaatgtaaataattgtaaataaatgtaaacatactgtgtcacaagaagacatgacaaaaaataaaaacagtagaaataaactttttttctgggtgcgtgtggtaaaacaaacatg

SEQ ID NO: 32416 - DNA, 3003 bp, Unknown; identical to SEQ ID NO: 20283
  misc_feature (1)..( 3003): 2750-1469P.txt file - cDNA_ID_3055249; gDNA_ID_1620723; Annot_ID_165860

SEQ ID NO: 32417 - DNA, 3003 bp, Unknown; identical to SEQ ID NO: 20283
  misc_feature (1)..( 3003): 2750-1469P.txt file - cDNA_ID_3055249; gDNA_ID_2926187; Annot_ID_200710

SEQ ID NO: 32418 - DNA, 3000 bp, Unknown
  misc_feature (1)..( 3000): 2750-1469P.txt file - cDNA_ID_3055265; gDNA_ID_2936586; Annot_ID_195100
ataatcttcttacttcaaacgtcgtactgtagttattttttttttttgttaaagcaaacgtcgtagttattaaaggatgttatataacttttagggcaaatagttacatgattaattacgtatcctaccacttttatttccacaatcgaaaaatggaaagaaggaggttttccttggttggtagaacaaatacaaggaacagaattattttcccaacatctctctgatcatgtacccttcaacaatctgcaataggataattaattagtcaattcaattttgtatgtacataattaaatagttagaacatttgtgtaagaacttcataaacatgggatctatataattataagtttctaatattttcgtttataattagcatgtttcgtttatattagcatgtctctacattataatgttttcaaattaaaaaaaaatagagtaaaacgatatcaaatctaatagtaataacttaccatctccttttttccgcaagctttttaggaacataaaaaagatagcaacaaagaccaatgccgctactcctcctacaacaatcgccaacgacttccccgtgtttacttttgaaccttcttctgtcaaaagaaacaattcgcaacttaagtacataatcaactgatatttgttttggttcagttttctttaataactgtacgtaccgtggtatgaatcattgggaagttcatgtgggtgatatgtataaccgacgtggcacccttctaagtatatttgtccggctatggaccaccgacactcttctgctgctgctgccgcggctgaacttatgcactcgccgcaatcgcaagcttcaacgtggccgtcgcattgagccacaacgtggaggagcttgtagctatcctcatagaatccgtgaccgtcaacaactcctgtttcggctgcagtgagtgcctccgtcctcatctcttcgaatccggggaaagtctccgcggtagctccatcgcatatcttgtggatgagaccgtgttccggggtctcaaataacttgtacttgtgatgattattaacttcttccaaaaataacaagaatcatatttattttacgtaatgaatcgtttactttaatgtgaattcaacttaatttgtttatcactatccttcaatttttctcgcgagtggaaaatttatatacctaagaaataatatattttttgataaaagtataagaaattttactataagaccaaataagtaagaaattttccaaccatttttttctgtacacgattttatgattttttgtcaacaacaaagatgaatacttacgagcgccaggggtatcaatacgttcgaatttgtatatcaaatgacatcctcgaagatgaatacgagctgacgtggcatttccacacgatctagacgaaatttcacgaagatcaccaacacatttatggcagatctcactcggataatcttctctgcattggaaccatccagagacagcgtgtttttcgttaccaactagagtcttcaagaatttagatcgagaggattctgattcgagtttgcgtaagaaagaagaaagggcttgtgcacgaagaaagagattctgattcgagtaatttggagattttgttgttgctttttggaggatgtttgcgtccaatggatcgcattgtttgaaaacaagagtgtcgtaatcaagttgagaagtgttgatgatagagggaagagacagaatgattagggctagggtttgtgtgaggagagagatcaagtggacaaccatgtttgagtcaaaactacagggaagagagatatatttttaattcattgaatatatacattggtgaatggagagggaagttgtggtagattagattttgtctacgtatgtctaccacttgtctacatatgttaaagatttagttgtgacttaggaggtcgtcaagcgcacgtgctaagcacaccaacgatttcttgatcttttcttcttgttggtatgaatatgatcctagaggttagtttaacaattttctaatgattttatgtatagtgaaacagtaatattattcacaatttgtggaactggctgatccaaaatatgttaaaaatgacattcggctactagcggaggtctgattcttagcctaacccttattcaattcttttaatactactagtgttggtttgaagtaagagaataataatgtacgtaaatgtatgtaatttgaaagtaagaaaagctttcgatgaagtcttagacagtaacaaactaacaaacatatccgctcaactaaatttacctaacaaatttccatagttttcaaccaagatttaaattaaaaatacactggaaattctaaacaaccctaaattatgttttttttttgttgtgtgagagcgaaatagtcggaattagagtaagaccaatcaaattttaaatatttatcgtaacttttatttcaagttgctttatatgatgtcttgaatctcaattgccttgccaagaaaaacaagcgctgacatatataaaaagcctaaaattacagaagaaaaatacaaagagctagaagaaaaagaaattcccctgttcttccgtaaatatcgttaattcgttatgacagagtttcattctctttgactagatctttatttttttctttacaccgatacaagtcaaaactcttaacaaacaaatatttagatcaacatagaccaaagagtcaaagaaataatgtctgtctccataaagtctccaacttttataacaaattttccgttgaatatgacagtaaataaaccaacggtctagttcttatcatgtctaaaaaccacaagctccttcctcatcttacgctcccctctttacctctccttttattctccttctcattctcctctcaacaactgatcgtataatcattctcacggagacgagtgaccaaaacaaggtctcccgcttcttgcgaagattaaacgaatccatttagattttaaaaaccacacaaaaaaaatatg

SEQ ID NO: 32419 - DNA, 791 bp, Unknown
  misc_feature (1)..( 791): 2750-1469P.txt file - cDNA_ID_3055265; gDNA_ID_1590940; Annot_ID_150291
  misc_feature (11)..(11): n is a, c, g, or t
  misc_feature (30)..(30): n is a, c, g, or t
  misc_feature (123)..(123): n is a, c, g, or t
  misc_feature (133)..(133): n is a, c, g, or t
ttgaaagtaanaaaagctttcgatgaagtnttagacagtaacaaactaacaaacatatccgctcaactaaatttacctaacaaatttccatagttttcaaccaagatttaaattaaaaatacnctggaaattntaaacaaccctaaattatgttttttttttgttgtgtgagagcgaaatagtcggaattagagtaagaccaatcaaattttaaatatttatcgtaacttttatttaaagttgctttatatgatgtcttgaatctcaattgccttgccaagaaaaacaagcgctgacatatataaaaagcctaaaattacagaagaaaaatacaaagagctagaagaaaaagaaattcccctgttcttccgtaaatatcgttaattcgttatgacagagtttcattctctttgactagatctttatttttttctttacaccgatacaagtcaaaactcttaacaaacaaatatttagatcaacatagaccaaagagtcaaagaaataatgtctgtctccataaagtctccaacttttataacaaattttccgttgaatatgacagtaaataaaccaacggtctagttcttatcatgtctaaaaaccacaagctccttcctcatcttacgctcccctctttacctctccttttattctccttctcattctcctctcaacaactgatcgtataatcattctcacggagacgagtgaccaaaacaaggtctcccgcttcttgcgaagattaaacgaatccatttagattttaaaaaccacacaaaaaaaatatg

SEQ ID NO: 32420 - DNA, 1559 bp, Unknown; identical to SEQ ID NO: 424
  misc_feature (1)..( 1559): 2750-1469P.txt file - cDNA_ID_3055286; gDNA_ID_1590931; Annot_ID_150275

SEQ ID NO: 32421 - DNA, 23 bp, Unknown
  misc_feature (1)..( 23): 2750-1469P.txt file - cDNA_ID_3055310; gDNA_ID_1590918; Annot_ID_150250
gtactgtcacatataactcaatg

SEQ ID NO: 32422 - DNA, 3000 bp, Unknown; identical to SEQ ID NO: 8757
  misc_feature (1)..( 3000): 2750-1469P.txt file - cDNA_ID_3055352; gDNA_ID_1971875; Annot_ID_176699

SEQ ID NO: 32423 - DNA, 3 bp, Unknown
  misc_feature (1)..( 3): 2750-1469P.txt file - cDNA_ID_3055407; gDNA_ID_1590866; Annot_ID_150180
cca

SEQ ID NO: 32424 - DNA, 1354 bp, Unknown; identical to SEQ ID NO: 410
  misc_feature (1)..( 1354): 2750-1469P.txt file - cDNA_ID_3055440; gDNA_ID_1590819; Annot_ID_150110

SEQ ID NO: 32425 - DNA, 3003 bp, Unknown
  misc_feature (1)..( 3003): 2750-1469P.txt file - cDNA_ID_3055475; gDNA_ID_1590789; Annot_ID_150074
tatttgttcattcgttttctgagattctatatcaaataatagtcagtcatcactagaaaatgctcaaacaactaatatgattcatacacatttcatatcatatgcttggcaatattggaccgaacttcatgatttttctgtccatgaatgcaaatgtgttgtgatctctgagttacatctcaaaatgtgaacttgacatcatattctcgttcaaaaaaggaagataagacaaaacatttaagaaacatttcacaatcatagggggcaaaagatcaaaatttaaaatttcggacgagagtggaaactatcgatctttaaggggatgatttggcaaaagtgttgtttttatttttccttttactgttttcgttttatcatctttcaacgtctttctctcccgacggccaaaaaccccaattttgccaaatccaattttacacccagaaaccctaattttccttactttgatttgattttgtgatggacgattatacaagagagatgatggatctcaagactttggtcactcgaaccctagagaagaaaggtgtcctcgctaagatccgggtaaattccctctacttctctaccatacattattcgcagagatttttgagtggaaatgagaacagagaagtgattcgtttgaaatacatacattactctttttctagggttcctgctattcagatcgaaatgctcgatattgttaattgcctatgcatctggaatcttgctgatagtttatttgtgtttgtaggctgagctccgtgcaagtgtgtttgaagcaattgaagaagaggatagagtgatagagaacaatgaaggaccgcctccagctctgttgggaagctgtaatgatcgtgcaaggaagcttcatgcttctccttcaggttttttcttcacaagtttttgcttttatccttttaaatctttcctctatgaatggtttggttctaaatggcatctcttggtttgaaaattttgttgaaatgcaggaaggttactatctgcgttgatttgtgaatacttggactgggcacaacttaatcacacgctcatagtttatcaacctgaaagcaatttggtaatcaatataatcccgttttcttttgctatgtttcattaagaagattgttgatgaatttttctcactaatctggtgaactcctgcaaaacctattcaaagccaaaagattcgtggaagtctgagttacgcgactttaatagcaacaatggttttgagctcaatagaaatggagatagtggaccactccttctcgatgttcttgaagggttcttgaagtttgaggtatttctttctttttttcccctgaagatgtttgcaggcaagtgtgaaactgaactttactatctataacttcttctcttagtttacaatctttacaaccatactctaaacaaattacaatagtccacctgtagtatgtgtgatttatgagttgtagtgttaacagttcctattatgtaagtgaagatgatcaatactttacacccaagctttacaaacaccaacttacataaaatcttggtactctgtcctcgcaaccaagagaagaagttatagatagtaaaattcagttttccaagaaaaataaagtctcttagtagagattagagttcttcagagatttgaaaaacacgtttagcaaatttcctagcctcaagttctcttcacatctaagaatcatgtttccatcctatcatagttaaaaccattatcatctgtttttgccgtatgctcctcagatgtagtgatcaacttttttttgtaatgaattttttcttcagagcatgacgcagggcatgggtagtagttcaaggagagattcagaaacagagtcgtcatcaagccttgagtccagaaatcctcctcgcagatcatctgcttctgatagcttacctcctcaacgaaggtacacatatcttcaacttcttattattatgccaaatcaaagatccttactcttcgacatgattgctttatttaccttcaaataaatgggcaggccggtttctgcatctcaagcatcgggtgagtcatcatttccctagtttcttgaagtattggttgaaatacgtatgcttcattattttttgataccaaataaatatgacaagatgttacagatagaagagtcgggttgtctacatctgggtacagaaaagatgaattcaactggagacaaggtaaccaagatacacatgaagaggtaacaagagcttcagcggcgctggaaaatctacagcttgataggaaaactcggaacttaacatcgtcttggaggtaagctttcaaggaagtctcattgaatcccacattgaaatgaaaacaaagcaagttgtggtaaatctgatccatcgggcttgcttgtgttgtaggaatgtgagggatggaacaaatgaagaagaagggagagattgatttaggctttggataaacatttcagcttctggattagtagagtaatggtttgtgtacgtgatatatgtatgtttctcctttatttgcaactgcgttttcaattagccttttttttaacgcacgaacctctgtctccttgagaacaaaaaacatgaaacagtaaaatgttttcttctgagatttgttatgggaagagaagagttcagaaagaagaatcaaagaaagcacaatgtggttgaatattttcattcacttgcttcttattttagtgtctccaaaattattatgtctctagtaataaacaaggtttttgaatgatgtgttcactgtttgttttactcgtactttttttttgttttccctttagtcttctctctctctctcgcttcttcgtttaaaactttaaacgaaagtatcgaagaagccaactctggatgacgcaaaagcttctctcagaacggcattgtagaattctccggtgaccaaataatccgattgcattagtaggggaatctgttattttgatctgatccgtcaaattggcggtaagaacaatg

SEQ ID NO: 32426 - DNA, 3000 bp, Unknown
  misc_feature (1)..( 3000): 2750-1469P.txt file - cDNA_ID_3055494; gDNA_ID_1590766; Annot_ID_150019
tagaacaaaaacatatcttacacattctctaacttgatctcctcctcttagattactcacccgtcatcataagccaataaaaagcaaaatgcataagaattaccaaaagatttgaatttgagaacaacctcggattgtggagaggacccactttgttgacgaacaaagggacatgatcgccggcattataatggttcgacgagcctgatccgattccgatccagaaggtcaatgcaagtaggacttgtagtacagtaagcagaaattgcgccatgaattggcactcttcttctgctgggttccaaaagaaacgaatcaatatgtgcaacaagaagagctccagaagcagtcatcttctaaaatcttaatctaacaacagctcaagaagaaaaaaattccatagctagagagaacacaaagtcacaagacgacgtcgtagaggcacaaagtcaaacctgaatggcttaagccgaactgaactgagtggttttgactagaccatcatcagaaaagtctccaagacggtagtcggatgttagatcgctcaagtaatttttggttttgttggtctcacgttttcagctgcccatttgatttcagtttgggcttttctttatctctaaaggcccaatttcatttaggtttagtttatttgatcattatccttactataaagccttcgcctttcgaggaatttagggtttcttctgtctgtctcgtcactcaggtttgtgcctcaacgactgcttcacttctagcttgattcttcttcttcgtttatatgtatactgtacattagattattcttgtttctcgagcttctgctatagattttgattcttttttttgttgtctttgtttcgtttccaggatcagatcttagctaaattgagacaagctcaaaatgaggtacttgacgcatctcttacattcactgtttaattagagaacaatacgtctctgaatcgtgattcagagacgtattgttcttctgtcatatgcaataagtttaattagagaacaatacgtctctgaatcgtgattgttttttggatgtgcgttattgatagctttatgatgttaatagtctaggattgacacgaagttgttctgcagttttgcataaatgctctttactaaggcctctaaatttggatgacaaatctaaatcttgcctcataaaaatttaggtgtattaagataagattattttgtatggtagtgtctataatgtgggttgttcatgttgaggttgtcaatgttgtgtatttttgtttgtttagttaatttgcttaactctgttcttgtgggttaatacagtaagcttcagagtgaggccgttcgtgaagccatcactactatcacagggaaatccgaggcaaagaaacgtaactttgtcgagactattgagctccagatcggtctgaagaactatgaccctcaaaaggacaagcgtttcagtggatctgtcaagttaccacatatcccccgtcctaaaatgaagatctgcatgctcggagatgcccagcatgttgaagaggtgatatatcttttcatggaaattgatcattttgtgctctgtttcttgtataatggttttgtgctcatttcatttggtggctctattagtttcatttgatgttgtatatgtcttctgaatgtagatgcatgatgttttcggaatttggtcattgtttatttaggcttcatttcttgtatcttttcgtaggctgagaagatggggttggaaaacatggatgttgagtctctaaaaaagcttaacaagaacaagaaactcgtcaagaagcttgcaaagaaataccatgctttcttggcctctgagtctgtcattaagcagattcctcgtcttcttggtcctggtcttaacaaggcaggcaagttctggctacagctaatactccattgttcttctttacatccgttttgattttggataggttttagtagtctatttcttttgtcaatgtctttttgatacaatgccaatcctttatcctgtgagattatgcttctttgatgattcttaagtaacattcctttgctttactttacacaggaaaattcccaactcttgtgagccaccaggaatccttggagtcaaaggtgaatgaaacaaaggcaacagtgaagttccagctgaagaaggttctgtgcatgggagttgcagttggtaacctttcaatggaagagaagcagatctttcagaatgtgcagatgagcgtcaacttcctcgtctcgctattgaagaagaactggcaaaatgtcaggtgtttgtacctcaagagcacaatgggaccaccacaaagaatcttctgagctttcacctacttaaaattggtggctataagacacttcttcttaccctttcgtttttgtttcagacatatctgttaaacagtgtaagagttgtgctgctactctcctctttagcttttggtttggataatttgaaataactgcagtgattttggttaatggattttgtagcttatattatctttgaattagatgtgcttatttcaaagacgaatcaatccacagatgtgaataaaaacagaaattttcgttttcaatttgaaaattgtcctcgtggactgttccataaccaaattctattgactatgcagtaattgatctttgaattaaaaggatcaacccactgattatactctaattgaataaatattcttctttaatgttgtttataatctcttaagcaagctctaatgatgtatttttgaagcaaactctaatgcttttatggtcagtatatttattctcttaagttttataactaaattaccatttttttttgccaaagcagacaacaaaatagcgaagtgcgttccaaaagttagcgttttcgtctccgtccccaaatctctcagctaccttaaatcagaattctagggttcttccgattagggtaaaatcgaatccagatttcccaaaattctgatctttgatttataaaagatg

SEQ ID NO: 32427 - DNA, 3003 bp, Unknown
  misc_feature (1)..( 3003): 2750-1469P.txt file - cDNA_ID_3055551; gDNA_ID_2926084; Annot_ID_196421
taataaggaattttcattattagaaaaagaacacaaaaaggatgtaacatgctcttccatatcgtctgaaataagcaatgaagatagaaaaaaatggtagttatttactctcattgtttcttcgaattcaaacacaacggaagacatttgattataatataagtatctctccaaaaatgtatagaaaaaaaacttaaaaacaaaatgaaatattacatttcaagcgacggacacaaagcttacattacacataactagatagatattcttcttcatcttataaagtataaacggaaacaaaataagaaaatgtaatattaccatgaaccgtgttcctcctccataaatcgaaccgtgatcggttaatactaccctgaaccagactataccaaccggttcaggtcaagcaccaggggccgcatctttagccctgccatggaagtaaccaccgtattctctagcgtaatctttgacgtgagatgccgtgtcatagatcctactacgtgcataatccatctgattcgatccaaccgggtgcattccccggaaatagcggtacgtccacgacactaaagccaccgttccgacaagaaatccggagaccgttaagaacccgccaacgacgacaaaaacgggaatccatatcggactcgagatgatgatcaatggaagaaagacaatgaagccgagcacggcagcggtgacgcttacaccaaggaggaagaggaggatgccagtggagataaagagagcgaggaaaccaaagagctgcgaggatgttggtgaatgggatcggagctgatggaaaaacgacgagatggggctgttgctaacggtggtggtggcggtgctaccataattgggccaatattgggcctcgccgctagagaacctttccgccattgtagagagcgattgttgttttgtgtgtgtgtgtgacagagaacagaatgaggaagggtaaaacaaatggaggacagattcagctttgaggtggcattcatgcaatgtttgtaaacacgtggagattggtcttggttttcactttgtctaaaatcgagattttggtttagattcggtttagtctaaatcgtattgattgggtttggtttgggtttatttgccgaaaaccatggaaaagggccaatgccaattgaagaacactaaaccaaaccttcaagttacaagaagagacaacagaagcgaaactagaaatactacaatagcaaattgtgtacctttatgacaacaattttttgtatgttaaaaatcagtagtagccaacgcctctaagctcagcagaactcggttgctgcatatcaccggcttttcccaaaaacacaactcggcctgtaaggagagaaaacagagatcaatatttaattgtttcccaatgaaatatgtaagaaatggagttttaggggttgagccattagtaccgtttctacgaattgctacttctcttatacgtcgaaccaaaccagtgacaggatcagtgaatatcttcgtctccagattaccctctaagtagataacagtactgttgaatgaacacgaaacaagttgttatgacacatacacaaaagcaagctaccattttgaatctagcaagcaagattcacctaaagtttcatcctttttcaccgattcttgatcgatatcagacatgatacatacatttgttccttattctatcatcacataaccttacaagctaaatatgatctcagaagagaactaacccgggttcaacattcttcaacacaagatctgccaagcgttcagggtaaacagagacacggtgccactgcaccgcagaccggctcgcatactctctcggatcttcgttaataagcggtctccggttgttcctgatcccaccagttcctacagagaagagagtgacagttctaccactcttaagcttcttctgcagaggaagctgacccacttgccccaccaatattgcctgtattaaaccagaaattagtctagaacacactaattattaacctatccagaacgagaatctaatgatgttcacaaaatgactcaacaaagatcatacaaaaggcaaaattgcaacgatcgatttaagaaaaacaacaaaaacagagtatgtatcaattggaattagaatctaagtttgataccttgaaaatgccagagtcaaggccattttcgagtggacgctcttccataacgcgttcttctccggaaaatcgagaaactggatctgaggcctttggttcaatgggcgattctaactcgtcaaagtcggagtcttctggggaagtgatgttgttggtacagaaagacatggaagcttgagaaattctagggttcgatagaagagatcgatagagtcttctagaaagtgtagccattgaattcgccattttcgatcttcactgagattttcgaatcgaatcgtcaaatgttggattctgggtttaacgtcataaaccctaaagggctaaagagcggagaaagtgattagaatattttggaataaagtgcctcaattatttcaaatctaatactttttaccaaaactctcttaaatgacaatttcaacccacatgctgaaatggtcaataagaagaagaaatttgcttttgtcgtcaccaaaaatacaactcatagtcctatgtatccgttaataagcatttaacaattcttttggaatacacatcgtctacataaattttgtaattcaaaataacaagcaaaaatatcccacaattctgatattcctttacaacttcaagtcatgttgttttcgacaaaatatctttttgattcaagaaattaaaataccaagtcaaagagatatccattaatatccctcaagaagtggtcaactctaacaaatctccaagtctcactctttttaaactcaaaacctcacaagtcacaagtcattacgaacactaaaaaaaaaacaatctctgtaactttggttagagcttccttcatatcaatccaaaaaaacaacaaatg

SEQ ID NO: 32428 - DNA, 2750 bp, Unknown; identical to SEQ ID NO: 400
  misc_feature (1)..( 2750): 2750-1469P.txt file - cDNA_ID_3055551; gDNA_ID_1590760; Annot_ID_150005
  misc_feature (1)..(1): n is a, c, g, or t
  misc_feature (2088)..(2088): n is a, c, g, or t
  misc_feature (2522)..(2522): n is a, c, g, or t
  misc_feature (2534)..(2534): n is a, c, g, or t
  misc_feature (2702)..(2702): n is a, c, g, or t

SEQ ID NO: 32429 - DNA, 3003 bp, Unknown; identical to SEQ ID NO: 28981
  misc_feature (1)..( 3003): 2750-1469P.txt file - cDNA_ID_3055700; gDNA_ID_1971712; Annot_ID_175116

SEQ ID NO: 32430 - DNA, 3003 bp, Unknown; identical to SEQ ID NO: 28981
  misc_feature (1)..( 3003): 2750-1469P.txt file - cDNA_ID_3055700; gDNA_ID_2926199; Annot_ID_201707

SEQ ID NO: 32431 - DNA, 3 bp, Unknown
  misc_feature (1)..( 3): 2750-1469P.txt file - cDNA_ID_3055727; gDNA_ID_1590989; Annot_ID_150367
tct

SEQ ID NO: 32432 - DNA, 1224 bp, Unknown; identical to SEQ ID NO: 437
  misc_feature (1)..( 1224): 2750-1469P.txt file - cDNA_ID_3055730; gDNA_ID_1590990; Annot_ID_150370
  misc_feature (177)..(177): n is a, c, g, or t
  misc_feature (1050)..(1050): n is a, c, g, or t

SEQ ID NO: 32433 - DNA, 1636 bp, Unknown; identical to SEQ ID NO: 436
  misc_feature (1)..( 1636): 2750-1469P.txt file - cDNA_ID_3055734; gDNA_ID_1590990; Annot_ID_150369
  misc_feature (1076)..(1076): n is a, c, g, or t

SEQ ID NO: 32434 - DNA, 2504 bp, Unknown; identical to SEQ ID NO: 438
  misc_feature (1)..( 2504): 2750-1469P.txt file - cDNA_ID_3055738; gDNA_ID_1590991; Annot_ID_150372
  misc_feature (18)..(18): n is a, c, g, or t
  misc_feature (61)..(61): n is a, c, g, or t
  misc_feature (65)..(65): n is a, c, g, or t
  misc_feature (109)..(109): n is a, c, g, or t
  misc_feature (121)..(121): n is a, c, g, or t

SEQ ID NO: 32435 - DNA, 2559 bp, Unknown; identical to SEQ ID NO: 440
  misc_feature (1)..( 2559): 2750-1469P.txt file - cDNA_ID_3055757; gDNA_ID_1590998; Annot_ID_150384
  misc_feature (62)..(62): n is a, c, g, or t
  misc_feature (66)..(66): n is a, c, g, or t
  misc_feature (205)..(205): n is a, c, g, or t
  misc_feature (371)..(371): n is a, c, g, or t

SEQ ID NO: 32436 - DNA, 449 bp, Unknown; identical to SEQ ID NO: 446
  misc_feature (1)..( 449): 2750-1469P.txt file - cDNA_ID_3055825; gDNA_ID_1591051; Annot_ID_150449

SEQ ID NO: 32437 - DNA, 3003 bp, Unknown
  misc_feature (1)..( 3003): 2750-1469P.txt file - cDNA_ID_3055835; gDNA_ID_2214613; Annot_ID_187440
aattcccattcaatgatacactttaatttagaggatttaaatgttgtttttataatgggatttgaatggatgctaattgatattggaacacatgtttactatgcaatcagatttcaaatgttagatgattaataaaaatgaaacaggataaaatatattttttaattgtttatgtgaaattttcttctagtgatgtatcatcatttgtttatgtgaaatttgatattccatatgttttagtatatccataagaaactcatatctaaaactgatgtatcattatccattaatattaatttgttgtacaagtgaatgatagttaatatcgcttatatacgtgatttcttgccgcatgtacgtgagatcacacttcatgtgcatccaaaaatttgcattttatttctagaaattaagcgacaaggaagacagagctagagagtactgtctttactctttagacgtgcatatgtctcctcgtactaattactcttttaaaatccttgcatttcattattttctgcgacaacatatttggtcggaacttgccaaatgatgtagctattgtccacgtgatgttttagtttgctataatatgttttaagtggatccttactcaacattaacaccaccctataataataaaaaaaatttaaccattcattattcaagtttgataaccaatatatatccgttgctcaaaaaaaaaaaaaaaaagataaccaatatatatcttattgctgtatttatctttatatagttttattttaatagtttttgaaaactgaaaccataacaagaaagcgtgaatccaaacgcattcctatgaattgtaaattgacaagtagcattttagaatagatggaatctaatctctaaatcgtaaccgaataaatggattggatccgttgcacagatggtttacaaagataatcatattataactaatccgaatttcaatcttgttttgatctatcttttaatagcaaagtccatgagtttagtgtttttgagattcctggaccaaagggtcatttttcgcatattaaaatgaatgagataattacgacaaaaaaatgaatgagataatttgggaaaattaaatatatacaaaaccattattatatgaatgtactaaattatttttaaatttttatatttcacctatacctaatacagaatacagtgtcattgctttgactccctccaccaacaagtgaaaaacctaataaaattttactaatagaaaacgaatagtggaagaaaccatgtaatgtccaatcaaccagtaaatcggtttaaaatatataaaaagtcagtattcttaagtagaaagataataaatttgtgcaatagtaatcaagatagtagatacgccgttggaatcaaatcttcttttcttgaatgtgttgttaacttaagccaaccatttgattctctttactgcagctatattaattattaaacaccaatgcaataaccatacatttcttcgttttatttagtctgtatattcgatcatgacatcattctcccacacttccaaaaaaaaaaaaacaattcgatgacgatatctatattagttgagacatgcatatctacaatacgaatattcgttattctcatttactgatgtggcgattatgatttatgactaaacgagtgattaactatatacaaaaagtaacaattaaaacaaaagtaatagaaaaatattgtgaaatgaaaattccagtgtatcactaatgaagcaattaagaatagaaaactaatactataatgtttatattcccatccgtgcgtttccattcactttaagaaatgatcatattcgcaaccaacaatttgaagcaaacggtcctctactttttattgttcgttttctctttaccgaattttaaaatcacgttaattatctgtataactacctttttgcgttgaagtatttacaacttgagtaaaatgtagattcgtatcaggatacaaacacacaataatactattcagagttcttagtaaattagtttccttttgcagcgatttatttccgtcaagtgtataatatagttaaccaacataacttaagttaaaatttcccaagtatagatataacagaagatcaaatatcgactcgaaactgagttataattaaattaacacgtgaaaataaatagaaaaacaagaaaatatctcgcacgctttccaaagccctagaacaataacgttcgatggattggaaaaatctctgctggtacattcacgagccaacacgtttgcctgccacgttccagacacaagctagaaagtaacggcatcgtcaaatctaacgagactcatcaaggaacaatttataaacatcaatttctttttggtttcacacgccttattatggtaagaaactatttttgcctattgaatgaaaaaaattgataagacatatgaaggatgagacctaactatagtcttaagtacataacatttactactactcaaaaccgttgtctttaattttaacggtccacattcgttctcacaataattgaccatacgtttgtttaaatacttcaaaggaaaggaaaaacagcaagacgtttgtgaggtaatggacaaacgacacgtagtttgaaagatgagaaggaagacaaaaaggcatagagaggaggaagagaaggagcggtttcgtaactgaaactgaaaaagctttaagagaaaacccggaaaaaaaaaaagagaaatattttaatcaattcttctttatcacaaagagtgcctttgtattaatgaattttgatgttgtgtaatgaatacagacataaccgtcgtgtctcgtcgttaaagaaacgagagtttttcagctctttacttaccttttcttcttacccttctttcatgactcttcttctttgatgggttaataatgctttgagcttgatgatttcgattttagtttcctgttagtgtttgttttcttctgtaaagcttggattttttttggtttcttcgatg

SEQ ID NO: 32438 - DNA, 974 bp, Unknown; identical to SEQ ID NO: 449
  misc_feature (1)..( 974): 2750-1469P.txt file - cDNA_ID_3055849; gDNA_ID_1591056; Annot_ID_150460
  misc_feature (13)..(13): n is a, c, g, or t
  misc_feature (25)..(25): n is a, c, g, or t

SEQ ID NO: 32439 - DNA, 3000 bp, Unknown; identical to SEQ ID NO: 10930
  misc_feature (1)..( 3000): 2750-1469P.txt file - cDNA_ID_3055875; gDNA_ID_2214466; Annot_ID_133020

SEQ ID NO: 32440 - DNA, 3000 bp, Unknown; identical to SEQ ID NO: 10930
  misc_feature (1)..( 3000): 2750-1469P.txt file - cDNA_ID_3055875; gDNA_ID_2214466; Annot_ID_182836

SEQ ID NO: 32441 - DNA, 947 bp, Unknown; identical to SEQ ID NO: 455
  misc_feature (1)..( 947): 2750-1469P.txt file - cDNA_ID_3055919; gDNA_ID_1591099; Annot_ID_150517

SEQ ID NO: 32442 - DNA, 1863 bp, Unknown
  misc_feature (1)..( 1863): 2750-1469P.txt file - cDNA_ID_3055955; gDNA_ID_1591112; Annot_ID_150539
tacaaagccaggaacagttttggttttgatcatacacaacgagaaacaagacttgtaagaattttccattgtacttaagaggctattactgtgtatcaagagctagatcacgccaagtttcagcatctgcttgctgagtttcctgatctgaaacaatcacaatgtgagggattatattagtcaagctgcttatatgaagattcataggtatcttggaagtgaaagttgttaaatctcagaaaccctctgaaacaaagctcaaatttgagctttactatgtttgaaacatacacaaaaagtgacgtatgtgtctccattactttccttatgacatttcaaggtctcaatatgggtgtttaacatcttggatcagaaatgcatcaccagtgtggattcacagctagcagttttaagaaaagactatattccaaagaatttagaccttaagaatcataaagctatgtaaactgtaaagcaaagcaaagaaaaaaacaaagagccatactggtttcttcagtatcatcagttttaacagcaagcactggaggcaatggaagatctgcaacaataatctcttatgaaatagaaaataggagaaacacaatgatcttgaggtataatgtaggaggaaaaagggttaccatcatcaggcaaagtgtccctcatccactcttcgtccacaatgtctataagcataccaagacttacttccgccatattcgaaaaactggagcttggaaatcccacaaattactgatgaaatcatccaataagtaaacatatatacaaatatcagacaaatggtgaagaaatttggattgttgaagtaaaaagtcaatttctttacaataggaaaacattgaacagaattgggacttctgatatccaaaattttgaattttgagaaagtgacagtatataacagacagaataaagctcaataacctatatatgaatatctaaaacaatctacaggtagtttcgccggagattatgaaaaagagagtagggattcattgagaaattacgtcgagcagttggtgaactatctagtaaagagaccaaatacgaaatcgtaccacaactcaaagccgactctttataaacagatatgattctctaaggaaaaaaacctaatttgaatcgaattagcaagagattcacctggtagaaacaatgcagccgtactccacacagagaactaaaaacctctagcttataaaaaaagctgattttttttctctttggttataaatatacagtaaccttctggtttacctagagtattcaaaaggctgatgaaatttaagttagggtatctctttatacggttcagagcttaagccggccactacagcgaccgacttctctcgccgtcgattaccggatcgtctccgttattgcgtgcttcatttaggtgctttcttcttcttcttctccagtttcagattttcctgttcttgcatttcacctttgagaaattgtgatataaaagttgtttactttacttcaatccagtaaagtaatttggtgattatcgtttcctctaccgcgatcactgtgtaattgatgatgagggttttatacgttcagtacaaatttgagagcttttatgttgacttcaatttgtaaccagtgtatcaattctgggattttaattttcatcattgcattatatattaggtgtatcaagtaagcaatgagttcttcaccgtcgttggagattttaggtacatatctctgaaactcaatttcattcttcgagttatgtttaaatgtctctctcttatctaaagtcgcttttctgtgtagttagagaagctgaaggcttcactgtgtggaatggtcctccatttactaatg

SEQ ID NO: 32443 - DNA, 46 bp, Unknown
  misc_feature (1)..( 46): 2750-1469P.txt file - cDNA_ID_3055963; gDNA_ID_1591114; Annot_ID_150544
agtccttctctgttcttgattctctagttaacattttcaacgaatg

SEQ ID NO: 32444 - DNA, 3 bp, Unknown
  misc_feature (1)..( 3): 2750-1469P.txt file - cDNA_ID_3055983; gDNA_ID_1591125; Annot_ID_150559
ctt

SEQ ID NO: 32445 - DNA, 257 bp, Unknown
  misc_feature (1)..( 257): 2750-1469P.txt file - cDNA_ID_3056008; gDNA_ID_1591159; Annot_ID_150604
gtttttgattgatgggttttcttgatttagcaatttttaagatttacttgaaagattccgtaattttgttctgattcggattctttgatctgtgctcactagctctaccaaagcagcttcctttctgaatccctagtgttcaattatgtgaacagattgtttactttagcttctcttccttttcattctagttttgcagagattttaggaggaacatgattgtttgaattgggagagacattggttcttgtaaaatg

SEQ ID NO: 32446 - DNA, 3003 bp, Unknown
  misc_feature (1)..( 3003): 2750-1469P.txt file - cDNA_ID_3056047; gDNA_ID_1971833; Annot_ID_176343
tcatttaaagattcgaactttataagggttcttgcagaagcaaacctggtgtttaaacccatcaaattggttgtttttgagagaatgtgctggagagtcatgaccagaggaagtgacccatttctcagcatcaatccatttagaagggaagtttcttcttctaccagagacattgctactgaaactgaagactcctctacctggagtacaaggagactccattaacatcaatcttctttgtccattgcttcttccttctccaatgctcttttgtgatgagaaacttggtcttctctcgtttaccatctcattgctgctactactgctttggtttgatgaaattggaagtgacttgatgaaatctgtagtttcctttagattgattctgcttgtaagtgagtcttctgcaaatgggttggcgctaacatttgagtttttctcctgtaaacaaacaaacaaagagagactcaattagaacaatgaaaagaagatactttctgagttatgtaatcaaaagacattgtgttcttttaccatattagggggaaacagaagctgagtttggggatggagcttggtgttgctgtttcttgtgaagtccatggagttttcttttgttttgtttctaccactgttggattattttggtttagttgttgtctgcatctaatgttgttgttatattggttttagaagagtgatgaaagagaagttgtaggaaaatggcatttgctttttagatgtctatagaaggaaaaaggcttgaccagtttttcagagtagaccattataaagggtactagttttatgaaatagcagtacacatttagattttcattattctttatttttttgttctatcattttcaacttgttgttttatactactctttagattctgatatgcatcactataaaatgacaaaattgtggataataaacaatgtttaaaaagaagaagatggtagaatggctaaacaaacaaacaaaaataacaaattctaaaacaacataaatttttctgatagtttactttaaacttaaacacatgtttgactctaagaaaaataaatgtatattgtaatcactttaatcgtgttctcatttcatatatacagaattatggacttatattgataaatgataatactagtagcaatataagtcctatttttttttataaaaatagatgtcgtgttttaaaaacaagaacttaaacttgttgagttaaaccatggttggcttaataaattgaaggatatatatcaaactgaactaaatagatttggatagtaatttagtaagcagaaagaattggaataggtaagccttttaacaaaaaagagaagaaagaattggaataggtgaagaagataacagtagagtaattagagtagtagtatatagagtggtcatggacgcttcactcttgggagaagtacgaatgcatcaaaagatgtggcccctgtctctatattcgtaaaatgattatcatcacaatatcatataaaggcccatgggttaataaagactataaagggcccgtagagtgatctcagaaacagcttttcttattatttgagaagtttttttttgttgtctgctaaacttgtaaataacattgaaaatgaagtggaagtattacaaaagcattacttaaactagagtaaccttggccaaaaagaaaataaaaaacaaggttacaatacttagaattgatgatagaaatttatctgatccaaagtaacattagagatctctaacgcttccgaaagcgccttcccgtaatggtgttgcgaatctcgatcaattatttgagaatatccacaccaaaatccatatatttatttcataaataaaaatgtagattgttttggtattcaagaccagatctgatttctccaaaaactttaaaacttcgggttcaactggttgagctattccatctcaggtaacaccgtaaaaaaacaagatatttttttgcacatgtttcaatcatattaaaaaaaaatgcaagatcttttttagttaaaattttgtatgtgaacaaatgaatattaattgctaagtttagttgacaaaaaagcgttgacgaaagaaaaatgctaagtttctgtgaatgaaaatgaaaaaataaaaatatctaaatttatttgcaaagatagattttagagagaaaaatctacaccacaattttcaaaatatgattaaacaacaacttataacatctaatattatgaattataacgtatggacctgatcctgaaatgatatggacgtaacttgaatctgtttctagctttagctagtttgtctgctactcgattattacacccatcaagtttgacatatttctgtcttttcttcaacataaatcacaagctgttgctagccaccttcaatgatgatcaaacggattccctgacatcaaagacattggtaatgcgtgaaggaaactgaaatctttagcttcaataggatttacgctctttgatatgtccaatagatgaacttcttgcaaacatgaagacatctaagtcgtctcgagctatccaacccaaacccattggagcattatttgcttctttaaaactgcaatcgtggttgcattttctccatccgttagatgggtggtgccaagttcaagttgtatttgcctgattcgttgtaagggaatgttatagatcgttttggtacttatctcctgggatattcacattcgtccactcttttacaccgtctcgtacctttctcacatccgctaggagatttttatatatcctgaaaaattcaagtaattttcttaatttccaaagtatctccaaataggccaaaatgtgaaagcaacgactcaacattgtcttctaggttgcaacaagtatagtttaattaattgatgatatagcgggacgttggaaatccttcaagcagccaaaatatgtgaccaattgaagaggacgtgatgaattgtctccctaacttggcaccatcgttagcaacatg

SEQ ID NO: 32447 - DNA, 22 bp, Unknown
  misc_feature (1)..( 22): 2750-1469P.txt file - cDNA_ID_3056128; gDNA_ID_1591256; Annot_ID_150728
agccaagttgttttcaagaatg

SEQ ID NO: 32448 - DNA, 2648 bp, Unknown
  misc_feature (1)..( 2648): 2750-1469P.txt file - cDNA_ID_3056131; gDNA_ID_1591256; Annot_ID_150727
agccaagttgttttcaagaatggttgatccggaaaggcataggaaagtggttaacatagatgatccaaacgcagcattctttgtccagcaagggaatcmwaatgttcctgttgtgacatttgccatggaaaacaccaaagssgatgttcacccgttaaagtttgagctttccttgtttgagacacaggttttggttaatacccctcaaggtatactggagatctcttcgggtttgttaggacggcataacatttataatattcttgctgctgtggctgttgggattgctgttggagctcctcttgaggatattgttagaggtgttgaggaagtcgatgcagtcccaggaaggtgtgagttgattgatgaggaacaagcttttggtgttattgtggatcatgcaaacacacctgatggcttgtcaaggctgctagattcaattcgagagcttaaaccgagaagaatcattaccggtatagatattttcttccatctaatagatactctttgcctgttcggccgttcctatggtctttatatgtgtggtcatctgattattttagttgttttatttatttattgaagttattggttgtgagggtgagaatgaaagagggaaaagacctcttatgacgaaaattgctactgaaaagagcgatgtgacgatgttgacatctgataatccgaggaatgaagatccatgtaagtaactctaagaattagattgagtctatctcccttgagtgtttctggaggtatattaacagttaattttccaatgtggttttagtggacatcttggatgacatgttgtctgggattggatggacgatgcaagagtatttgaaacatggcgaacacgattactatccgcctttggcaaatggtcatagactcttccttcacgatattagacgtgtagctgtacgttgtgctgttgctatgggtgaagaaggtgatatggttgtaagtattcaaataaacccacactctatacagtactttactgagtgtgttatcaaagttgctggatttacctttatgagcaatcaaagtaatatagttctcgggtaaatagctttgcttgacactgatttttgcaggttgtagctgggaaagggcatgaagcgtatcagcttgaaggtgaaaagaaagagttttatgatgacagagaggaatgtcgggaagcattacaatacgttgatgagcttcaccaagctggaatagacacaagcgagttcccatggcggtaagtagaaccgtaacagctaaaacaaccaacgataaccaaagtttctaatctgtgaagagttgctgaaacttgtcaagatgcttcacgatcactaatctgttcttccttgtattactgtgcttctgcaggttaccagagagtcattaatatctctgtggtgaaatcattagaagagaagttagcttagtccatgaaaccagattttcttccaccatggtccaattctcttgcgaagatcgatttgcacagaggtaatgaattctacacaagtgacataaaaatcatgctcaaggaaaagagattacaccactgggaggtacttaacgttccaatcaccattaccttaaagtttttccattgctcacttcacctgtttttttggacaagaggaaacccaagctatcgaaatgtaatattagactaaacttaattcagattttctgtcattgttaccgcaggaggaagattttaaaggtggaagaagatgcgtacaaattttgtaagggttaaaaacccaaaaatgtaagtggttctgttttgggtatgttttgatagcatgtgtttaatttagatgaaccaattcaaaccgaaccaacaaaaatagattccggtttaaattatttattttcttacatgtatccaaacttgaaaaaagtgaattcaaagaaaaaagaaaacgatgaaaatacggtttcaatttcttaatatgaaaaattgagaaagtaggaagacatgattgaacaataataagattaggccttgtgatatattgtgacaagaacataaattacgaatgtttggcaatggtgctagggaatatagtcttttgaaactattaagcatactttgaattttatattctggttataaattaaaagatttcccaatatccattcgtatttttgggaccactccaccaaaaccaatctaatcaaaatataaaaccaaataaataataatttgcttagagatagaaaacatgttatgtccgaggaaattgtcctaaatgtcgcaacaaacgtcaattcattaatcgttttgtttaatacaaatttcgacaagattgtgatagatccagaaccagtttagctaaaccggttgaatcagaagaaacgccaaaaaccggtccaatagctcaacctaacgccgtcgttttcaaagttccttcactctacttccttctcgcttacgtcactttccacagatccaacaatgatatcagataaaattaaaatattcccaatatattttctaagaatatctccctatttgtttttatttatttaaactattttaatctcttccgtgtttcactcttctctctctctctctcgcttctcttcattgtttctgtgtgattacagcgaagaagagagaatccttggagcattccatg

SEQ ID NO: 32449 - DNA, 2741 bp, Unknown
  misc_feature (1)..( 2741): 2750-1469P.txt file - cDNA_ID_3056141; gDNA_ID_1591259; Annot_ID_150737
aaaaaagtttggcgaaaaaaggtgataggtatcaataactagttgagatgggatagagataaattttaaaaaatggaccgacctattacaaacaatttaataaaagtaacacaagagtacagagactaaaacagtagctatggttttcttttggcgtctctgtaataaattggtttctggggatcttcgtcctatctcccatgccattcactatcaatacatttattgatgccttcattatcatctttcttttgtttttttgccgattcactttattttttttaactcgtaccatattctatagcattgatcctcttgtagtcgtaggtcgacttttgtttttatttgatagtaacacttatgtccttggtgatatgtatttttcagaaatgctttttcgatttatttaaatgtgtacccttttgtcgaccaaaaaaacaaatgtgtaccctatctttagtgtttactttgtagtttgtacaaaaatacgtttttctgttcgagcaagtttacttttgacaaagaaatgttattattataataataataatatattgaaatatcaaaattttgtgtgtaaatttattaaattatttgaaaatttcaaaaattttcaaaacaatacgagtatctttgcttaaatatatctaaaaatacacaaaataactaaaatatccaaaaaaatcctaatattttctatatataagtataaatataactaatatatacttatatttgagatatgttcgaattttttgggttttaaagtttagaaccgttcgggtattttaaaagtttgggttcgagtttggatcggatttttcggatcgggtttttcggatcgggttcgggtattatgcactggcctagataaaagaaagaaaccattcatcacctataacatttttactgcatccaccgttattatcagtatacgaacattacctcagtttcagcattatagcttagcaataaatagctgaagaaatgtagttggtattattgttatagcttagctagtggtggcaacatgtttattttctattcaccaggtgatgatggcttatcggatcaagtcttgattcgaacattaaatgatttacatggatcgatatataaacaagttaaaattggctcacatccatagatcgatcccataatctatgcgtttatacattcactgcactgtattaatttaacccaatcatatttgctcatctactacattaaattctgtcaaagtttcaatagtgtgttacacaataacggtcaaacaacaaatgattctccaataacaactatttagacagtcaaaaattttagcgtgagactagacggatcgatagggcataatagcatatatgtatagcccatagattaataaatagacattactacaaaaaatttggtgctaaacaagttttttcttaatggacccttttattagattaccttaaataaaccgatgttaaaaatcttgttttacaaaagtaataaaatgcggttggatatcaacatttcgtgctaaataatccgkttttaacattttaacttcaaaaaattaaaaataaataaaaaaatcaaacacatccttatcttcatgaatcgcctctaaatacgtagcaaagattggtcactttgttgaaaaagacaccacttttatcaagtctgaggagtctgtaaaagaacgttatttcttgtttgtcttcatacatcttattgttcatacgagtgaacgaatgcttccacttatgtaaatagacatgtgagacttcttcgtaggttggcatcacctatagttggatattttcttgttggtaagtttttagatagccaaaatactattaaacattcataagcaagtgaaaatatttatttgaacgatttaactaaaatgttgttatgtatttatacaaacatatatatttttttatacatatacatgttgttattttactaaataacgtttttgtccaaagttttttttactgaataacgtgtaatcaaataaaataataaaagaacaagggatctcttcttaataaaatattttgatttcatataaaagtaggtgatatctataaaataaatttacaaaatgttttagtttgtgaatgaacttcagagtaaaattgtaaagttaaaagttaattttacaaatttaaataattagtttagttatttagcagatacatatagtcagtctgctatcatagcatttaggttgaagcctttaagtttatcttgttcaattttttatataatatatatatttttttaatctaggtggtaaacaagctttatcacttaaaaggttaaaatgagtgggacaataatagatgtagctcataagttctatgttgaaaaagattaataccaaaaatcaatcatttacttataatcaaccatggagtagaaaagcaattacacaaatagagtaacttctaaaatatttacagctttttaggtagtgcaattactattagtactatttcttaattctctcaataaaataaaataataaaaaatcatatagataatcccaatatccccaatcttccactataattgaacaaaaaagactcctttttaaattcaacctctcccaccttctctctgcaactctctcattttcttaaaatctctttctcacagaaccaaaaaccaaaatctcagtctctaacaaacaacaacaacacacgagtcacgaggttgaagaagaagaagaagaagcaaatatg

SEQ ID NO: 32450 - DNA, 446 bp, Unknown; identical to SEQ ID NO: 469
  misc_feature (1)..( 446): 2750-1469P.txt file - cDNA_ID_3056202; gDNA_ID_1591291; Annot_ID_150790

SEQ ID NO: 32451 - DNA, 144 bp, Unknown; identical to SEQ ID NO: 478
  misc_feature (1)..( 144): 2750-1469P.txt file - cDNA_ID_3056264; gDNA_ID_1591352; Annot_ID_150864

SEQ ID NO: 32452 - DNA, 77 bp, Unknown; identical to SEQ ID NO: 485
  misc_feature (1)..( 77): 2750-1469P.txt file - cDNA_ID_3056319; gDNA_ID_1591391; Annot_ID_150918

SEQ ID NO: 32453 - DNA, 131 bp, Unknown; identical to SEQ ID NO: 486
  misc_feature (1)..( 131): 2750-1469P.txt file - cDNA_ID_3056323; gDNA_ID_1591392; Annot_ID_150919

SEQ ID NO: 32454 - DNA, 241 bp, Unknown; identical to SEQ ID NO: 487
  misc_feature (1)..( 241): 2750-1469P.txt file - cDNA_ID_3056342; gDNA_ID_1591402; Annot_ID_150935

SEQ ID NO: 32455 - DNA, 2813 bp, Unknown
  misc_feature (1)..( 2813): 2750-1469P.txt file - cDNA_ID_3056354; gDNA_ID_1591406; Annot_ID_150944
  misc_feature (9)..(9): n is a, c, g, or t
  misc_feature (31)..(31): n is a, c, g, or t
  misc_feature (71)..(71): n is a, c, g, or t
  misc_feature (100)..(100): n is a, c, g, or t
ctataactnttagaataccacaacgaatacnatcttcaaatactcactgatcatcaaaagggccaaaaagnagtttattgatagtttacacatttgttanaaccacgagaaaaggttacaactcaatcaccgcatggggaaaaattacgtagttggaacatggcatcgaaaaaaagaaaacctatgaagcatggcttgagtctgaaaaagttttatttgcttccaagagggatatggggagtgctgatcttattagattgagtttgtgattctctcaaacccaaatctttatcttcttcttctcctcgtcggctaactaaattctttctttcttcttctcttctgcgatcatccgacctattagtctctggtggcacaacttgtcggaaaaacctaagcatcatctcataggttgtaaatgtaataactgctgatggagttgtcctcagtagattagtggcacatccacggtacaacccaggaatcccttcgcttctgaacacctttgtgatgcaatcaatgactcctgaatacttagtctcagcatttctaatctgcccttgttcttgaagcttcgccctaattacctgtggatgtaacataaaacagtttatagttagttatgagcttaagagtgaggtaaagagagcacaaaagagaagaagaagagagacctcgtgtgggtaagtcaaaatagaggcgatcactttcgcgatggaggaggcaatagcaacattcccaggactcagattctccacggatgtattatctgagaacttttatagctctgatcagaaactagttgggaacagcacatgattatgtaacaatattttactggaggaatcatgttttacccatctttgccatgtattgcttaattttttcataagctggaaactggatcgcgacatggcttactcccgccaaagaaggcaatatgccactgttccaatacaggaaatataagcaatataactaaaacgtttaacataagcacgaaatatcacaagaaaaaggtgttcaaatttacggaactttcagtttcatatgagacactaacctgtacaaccctcgcactccttcttcatgacaaatcctactaaatgcagacattacacttttgtaaggtaccacaccaggcctaattccttgcgtctgaaaaaacggtaagaggttaggtcaagtatcttatgataaaacaaattcaacatgtctagtaaagctgaaaccaaagaaagaagacaaaagttaccattaatcttgtcttgacaacccaaagcggattagttgcaatagatgtggcagctccagcaccagctgcagctatcatgtttgacccaatactaagcttgccatctatcagtcaaacatgaacagttgataaaaaagacttggtatacgttatttgagcatatatatatgatactcttccggttaagcataagctacaacgcacaaaagatttgtaacaaaggaaaaccaaccacttgactgcagcacatcctttagcttcccataaactgagaagtagacctgagcgtgataccagaataacgattaaggaaggaactaaagttattcaaaaacagattaaaatcgattagaagacataaaatatctcctatagaagatccataggagaatgttgggcaagtaatatcttttatgacaagacaaattcacttgaagaaacaaagctctgtagagaacagtggtgcttacagcccaatttggaaggagagctatgatggttggtaaaagccctcgatacattcccctataaccttcttccttaattatattcttcagacttgtaatgattacaccacctgatatcacaaacagatgtagctagttaacacctatatccaataactcaaacaagagagagtcttgatcaaacatgcaacaacttaaacagaaacaaactacttgcattcacacaatctctcatacccatcacattagatctacaactacatacactagtcatactcttaagaaaattaagctcagtttgaagcaagtagtacctctttgaccagaggctggagcttcagggagaccaagaacctgtaaccttgttttgatcacatctaatggacaaacaaaagtcgccgcgatagcccctgaaaaaaaatccccaaatcaaccaaacaaaacaaaaattcagctacccgaatcaaaagacgaacttgaaaacagataattgaaactaacctgcggtggctccggcgccggcgtttgcagcgacttctctaatactccggtaatcaaaggtagagttcccatgttcaatcatcttaaaaccctagaatctctcaattggggggaatctgactcaaaattgaaaacgagatccagcagtaaatgataaacccggccacgtgaatcgacgattatatacaattctcgtcgttcttgacattgacccgacccggagaaaaaattcgaacgtgtagacgggtaaaggaagagactttgtttgcgtatgatttaggcggtccctagtcgaaaggatcgattttttttcttacagattccgaagaagcacagttggtttgagatgacgtcacacatttaacaacaacaacacacaacccaagaagaaagaaagttgaacactttttgcctctatctgattatcaaattataatctgactgaatccggtataattcgatcaaaccaagctaaaccgtaacccaacggtttaaccgatttggtttgggtccgcttaaactttgaaaaacaaggaaaactttcatcggcgagcttcttcacacttgtgaattccgattctgcagaaatg

SEQ ID NO: 32456 - DNA, 2191 bp, Unknown; identical to SEQ ID NO: 493
  misc_feature (1)..( 2191): 2750-1469P.txt file - cDNA_ID_3056425; gDNA_ID_1591443; Annot_ID_151000
  misc_feature (147)..(147): n is a, c, g, or t
  misc_feature (202)..(202): n is a, c, g, or t

SEQ ID NO: 32457 - DNA, 317 bp, Unknown
  misc_feature (1)..( 317): 2750-1469P.txt file - cDNA_ID_3056442; gDNA_ID_1591457; Annot_ID_151011
  misc_feature (1)..(1): n is a, c, g, or t
  misc_feature (170)..(170): n is a, c, g, or t
ntctacaggatttagactatggttagagtttacatttgatttagaattgtgtgactttgatataaaaataatgacatctacgaaattacgaaatacaaatatgggcttattcattattgggccatacaagcccatcgagtttagtattgatccgctaatcaaaaaacgtnaacaaataaaataaaataaattacctttacaggtttcgtaagataacagaaaaacaaaaacaaaaaatttctgctttgaagaagaagagtcgatccataatcaccactttcagatttccagattctggggaaatatcttcaacgatg

SEQ ID NO: 32458 - DNA, 1108 bp, Unknown; identical to SEQ ID NO: 508
  misc_feature (1)..( 1108): 2750-1469P.txt file - cDNA_ID_3056536; gDNA_ID_1591531; Annot_ID_151121

SEQ ID NO: 32459 - DNA, 556 bp, Unknown
  misc_feature (1)..( 556): 2750-1469P.txt file - cDNA_ID_3056600; gDNA_ID_1591571; Annot_ID_151187
gttttggtgtcttaatttttagtttggtttttcatatagagagggacatatctaccaattctaacttgttgatagccgtaaccaagattcaagaatagttacctgccaccacatcttcgcggcgtgtatctcaagcgtcatgatcgttgacgccgtctccaccagatgtttgtcgccgtaagctaaccctaataaagcggcggagtaataagcgtttacggcctcgcttgtgctctcttgattccggccgtcccagaactccgttaaccctccagcccatgagtgtagcttgaaaagatcaaaatttctcaaacgcggataactagaatttgaattattatcatcttttctcccaaacgtcatgaaatccgccaatagactgtacgcttgagctctgtatctctctccccacaaaggatcaaacttagcgagcacggcaatagcgtagagaaagtaaccaatatggtaatgatgattattatatataccgaacccgaaatcagcttgtttccacttcaggatcgaagtgaggaactaagcagcaatgtagaaaatg

SEQ ID NO: 32460 - DNA, 1041 bp, Unknown; identical to SEQ ID NO: 514
  misc_feature (1)..( 1041): 2750-1469P.txt file - cDNA_ID_3056611; gDNA_ID_1591574; Annot_ID_151193

SEQ ID NO: 32461 - DNA, 538 bp, Unknown; identical to SEQ ID NO: 515
  misc_feature (1)..( 538): 2750-1469P.txt file - cDNA_ID_3056625; gDNA_ID_1591576; Annot_ID_151198
  misc_feature (393)..(393): n is a, c, g, or t

SEQ ID NO: 32462 - DNA, 526 bp, Unknown
  misc_feature (1)..( 526): 2750-1469P.txt file - cDNA_ID_3056646; gDNA_ID_1591587; Annot_ID_151222
tttttttttttttgcttctgatattgcatctaaattgttgttgaactcttttccgccaatagaaacaatatttcaaatttgtagcatcgctaaataaaatacataataagttgaaacaatatagttgttgagtaaattatataatcatctttgctattgttaattctaaatttatttaacacaaaaagctaaccattaagcaaagaagaaagtgacctgatgatcgaaaggaacattagaaacgtcctcattgtccgccgggaaatattttggagaaggacatcgattaatctatagattagaggacacctcttagtttaaataattatatcgttatacacctaatgaaattaaataaatgctcaattcatcaataaataatttaatgttgtgtttcctaatactcggaacattataaccaccaatcaccacctccaaacttccctatataagacacgacacccattttaagcatccctagctctctccctctccatctctctgctcgcttgtgacagtaaacatg

SEQ ID NO: 32463 - DNA, 360 bp, Unknown; identical to SEQ ID NO: 520
  misc_feature (1)..( 360): 2750-1469P.txt file - cDNA_ID_3056654; gDNA_ID_1591590; Annot_ID_151230

SEQ ID NO: 32464 - DNA, 881 bp, Unknown; identical to SEQ ID NO: 523
  misc_feature (1)..( 881): 2750-1469P.txt file - cDNA_ID_3056693; gDNA_ID_1591624; Annot_ID_151282

SEQ ID NO: 32465 - DNA, 521 bp, Unknown; identical to SEQ ID NO: 527
  misc_feature (1)..( 521): 2750-1469P.txt file - cDNA_ID_3056750; gDNA_ID_1591660; Annot_ID_151347

SEQ ID NO: 32466 - DNA, 467 bp, Unknown; identical to SEQ ID NO: 528
  misc_feature (1)..( 467): 2750-1469P.txt file - cDNA_ID_3056765; gDNA_ID_1591662; Annot_ID_151354

SEQ ID NO: 32467 - DNA, 3003 bp, Unknown
  misc_feature (1)..( 3003): 2750-1469P.txt file - cDNA_ID_3056773; gDNA_ID_1591665; Annot_ID_151362
tggtcgaataaatcttcaggtaaaatcaatgcacagttccaatagaaagttgtattcttgcaaaactttcatggaagagagtagaatttttcatgttgtgtgacaacagtctcttaccattgagggacaaaaggagccatccatatgacatcaccagcctgaactggatacctaatttaaagacaagaagatcacataaaagttataatcatttcttctattctgtggaatatagctgtgtttgcagttttcttttggaacatgcttctgttcactttacatgaccgatgtagaaaactattgttcttggttgtgcatgtggtgtgttgctggaaagttatcaattatattcacaatttcgtttattaataatacagtgttgcgtaccagttatcacccaagcgataaatgccttgcccctccagaagcaacaaaccatgctggttataatgaacttcctgctcacattgcaaaatcattgagaagacgaaatggaaaaggaacagttaaaaaatctgcttatggtgtcaagtcaaactgttatgtaccttaacattcagaaactctccaggctgaaaatccataatctgcagatgacagacacatcagtaattaagctttagaggtctcaaaaagcgaawggattaattcaatcaagtgaagtgcttacatggatgttgaagtcataagcaacggacatcggaagaagtttccgcagttcaaaaacctgtaataataacaaaatatatcttcagagatgactaattttaggaactagaacttgcattacaaatgtaaactgaaatactttcagatgtattctgagaaaagtggagaacttttgcacacttacctcaccaggagtctcgagtagtggttgcttgtctgtggagccaacaataagctctgtggtgtgacttcctagatattcatacctagagatgtagcagtattgggtgactttttaagttaaaacagtagagagaactcaaaattttcttgtcatattaagggaaaggagaaaaacctccgctcgaagacaacaagtgttgcagactcaacacagtccaaggaatggtgaaagtttggaggtaggtacgcatatgaatcaacctacaggaaaaatggattatcagcagaaaatgataaaactaatggagaaatcttgcaaccatttcaccatcaaatctgggcagaacgtgatgtaaccagaagaatactgtggtaaattttcctttgtacaaatcataccgtcaatttttttgaagaactggatgtgttagtgagtgtcacagcaccctcgaccacgaatataagacttgaaaaagattcagaatattgaaaggagttaaaaagcagattatagatcataagtgcaagcatatgttaaagatagagctcatataagtaataataccgctctatgtcttgtggaggcaaacctgaacttgacatttctgcaagagacagtagaatcagctagatgatctccaaattctacgagtagatcatataaaacagcaaatctttaaacccttaatcactcgacttgttctgcgcaaagcaagaacaagtgaatgttctaataatgatgagattggtgtagcagcacactttaggacataaaggtagttcctaaaagattgactctattatcgaaagatagaagaaaataatcccaagaacttgacgttcattacttgtgagaagagattggtttcatacctttcattttcgccaagtacatgacaaaatgggaacccgttgccggtgtgatcaaatacgcccctaatgtgtttgtcctgtaaatttgagcaacagataagtgcaagagcttgccaagtttagacttcttttagctataaaatcaagaaaagtagggaaattataagagagtcatgtaccagtcaggtaaagggctgtatacatgactttccggtgttattaacgcatgatctcgtttgtatacacttcgtgtgaaaccaggcaagtctacaaaacaacagactcataaatatttctgcttaaacacttgatgaagatgcaaatacaaaacccccaattccaaatttgattagaaaactaatctaattatacacagagagagcgaactctcagaaagagactgtatatacagaactgaagttgaatgcttccatggttatgtctaaatctaattgatcaaaagttaagaaatttttgcaagacatgagccagaaaccctctcagattaaacactaattaaagtaatcttaacttttcaataacttaatctcaaaatcaatcatatacaacaagacctcgaacaattgataaaaacagcaatcaaacttaaccagcaaaagtatcaaacttttaataacacgaagctgtaagaaacacttgccttggaggtgtgaaggagagagtgttggattcgtggctttccaataaatgggtttcgtcttctcatccgattcaacaatcgaaggcgctgaacaaaacccatcatcgcttttcgaagctttaacaagacctttgataacaaataagaaagttctgattagtttcacagtatactcaaaagaacttgagaagaatctaaaagattcgtacttactaataacgatgaagacgattaagtaaagtgatcgcatttttgctgagagttagtggaacaattcaggtttcattcatgtttataaaaatctgagaagtgagaagtgagaacaaacagaacacgacagatgattctctgcagtggccagtagattatttatttggtagcctcatattaaattatacgttttcgaaaaatgagaaattcccggttttacttcggtttgatttggttactattatagtcgaaaccggaatattttcagagaaaaaaaactacaactattgggcctatttgttgagcccataaataatgttatgaagcccgatttgagacagatcgttatcgtttcggggtcacagggactttcactctttctctctctctgcaacaaagaagaaatg

SEQ ID NO: 32468 - DNA, 1969 bp, Unknown; identical to SEQ ID NO: 529
  misc_feature (1)..( 1969): 2750-1469P.txt file - cDNA_ID_3056776; gDNA_ID_1591665; Annot_ID_151361

SEQ ID NO: 32469 - DNA, 1666 bp, Unknown; identical to SEQ ID NO: 532
  misc_feature (1)..( 1666): 2750-1469P.txt file - cDNA_ID_3056812; gDNA_ID_1591696; Annot_ID_151407

SEQ ID NO: 32470 - DNA, 3000 bp, Unknown
  misc_feature (1)..( 3000): 2750-1469P.txt file - cDNA_ID_3056828; gDNA_ID_1620354; Annot_ID_154409
gaatattaatctaatttataacacataagatcatcggtgaaactgctacatgaatgaatcacaattcgaatcatgaggatctcttacataatattaacataaattgacaagttatttttgcatgattgaattccattactgttccccagtgattctaatttttttgactaaggaaaccatatcaataatcaaggattccgtaatctgtttattatgacatttctattacaggatccattatgattcatcccacacgaagattttcaaacttgtgattgtgagcgtaacataatcgaatcgattacaaagatataaactaactaaaatatgttaatttatattttgtttttttatatatatatatatttatgattttaataaaacaatcatattattttaatgcgttgttgtttttgttttcacaattctattattatttcgagcatctcttatttttgtatctccaccaattcttttatcattttttatcatttcttataaaaaagtgtaattcaatcattttacaatatagtatgtatgcattccaaaaaacattattgtatgaaacgaaacgaaacgaaacgaaacgaaggagtagacggtggatatcagccttaattaattagagtcaaagcattgtgattagtttgacttttacatccgtcactatgtcaacgttaatgtatttatccccaacttgctaatgatagaacaatatttattttgatttatcttgaatttcaacaggttaattagctaattatagttataacatttaaaaaaaactcagatgcgtgaacaagatcgcaaactaattccatgcataatgcatctcttgactttgaaatgcatttcttgacttcgaatcccaaatgaaccattttgttatatacttaatatataatatattatatatatatataacttaaagcgtgacattgttctcccaattatatagttaatcactataaactacaacttggtttgatagtcaaattcaaaaccaagactcaatatcactaagtcttctccattaacgctataaatagattgaaatcctaagctaattacaatcacaaacacaaacacaaacaaaacgcctctcaatactaaatcaagaacattgaataaaacaatgtcttcacgacaatcggtgaggcacccgagtcacaaccatccattgcgcggtcacaaatgcgaagccaaagacgaaatcatctgctccggttgtgatctcgatctggttggtgcagctttcaaatgcacaaagtcatcagattgtgattacttcttgcacaagtcatgttttgaacttccacgtgaaaccaaccacaaatctcaccaaccccacactttgactttaatctattccccaaagtcaacgtacacgtgtaatgcttgcggcgaatacggatcaagtttcacgtacaactgttcaatctgtcagtacgatgtacatgtcggatgtgtttcaatgcctgaaacagtgaagcgtgaagatcacccacatccacttactcttctttacggttctccttataaccaacccggtttagtttccaaatgcgatgtttgtgaagacattgtaccggataatctctggtcgtattattgcaaggaatgtgattacgctacgcatttacactcatgtaagaaagaggaagaggcaaagaaagaagatcaaaaaggagaaggaagtaaaaactcgatgaattcggagttagctgcaatgttagaggctcaaagagaagtggagaggatgcagattgagatgcatttggcgatgcaaagtgctttgatttcgaaaaaggcgaataaggcagctctcaattgcatctaattcgaagaagttgggattcttcaaattctctttacttgtgtctgtttttcttctttttgttgctttttcttgatttatgttgttgttgctcctgcaaacttttcatgttgttgttgttgttgtttttttctttgaaattgttatctgaaataaaagaattatcagtttttttttttgaacgattattgctgctttcgtttttgtaaccatgttacctttgcatactatgtttcaagttccataatccattttatattactataggaaaaatatataagtattggatcacccctacttatagattaaaaatattgggaataaagtattgaaattgtgagatttggggttatttaaagtagtttgtgttagtgttatcgatgtgttaataacggatggtaaaataaaatctaaagtttaagatttaattatatctatattatcaatatagtattaattacattttattttatatttctgtcaatgttatttgttcgtaaaatcaaattgatctcaaaactgaataaaaaacaaacaaatccagaccttgcaaatgcaaacacacaattagaagtgatgatgtcaagaaaaacacacacacaattagaagtcacataatcattagggagttaacaaatgggctcattttgacagaagttaagcccattaaagtaaagataggcccatttataatagagcctcaaaaatagtttaattgaggaagaagaaaactctctgctaaagttgcttgctttcttcttcttctccgattcgagcttccttcctctcagcaaaaccttcaagtaaaggtaacatcactcttctataagcttagatttttcacttttattcttcatactgtcgtctccctggattctatcttctcgattttggtgattcgaacacgattttacctatccttgagcgatctcgatcccaactttttgagttgattttatttcaggagttttcaaaaaatctgttgttagtatgtgattattagtttctacactctgttcttctggtttcgtatcatcagctagctagctttggttctcgaattttgcttctcaagattcaaatttcacttcgttactcgtttttttttgtttgggtgatgatttgatttttcctcattttgtagagtggtgaatcggaaaatg

SEQ ID NO: 32471 - DNA, 206 bp, Unknown; identical to SEQ ID NO: 535
  misc_feature (1)..( 206): 2750-1469P.txt file - cDNA_ID_3056855; gDNA_ID_1591722; Annot_ID_151441
  misc_feature (1)..(2): n is a, c, g, or t

SEQ ID NO: 32472 - DNA, 3000 bp, Unknown; identical to SEQ ID NO: 8391
  misc_feature (1)..( 3000): 2750-1469P.txt file - cDNA_ID_3056917; gDNA_ID_1971789; Annot_ID_175516

SEQ ID NO: 32473 - DNA, 360 bp, Unknown; identical to SEQ ID NO: 542
  misc_feature (1)..( 360): 2750-1469P.txt file - cDNA_ID_3056917; gDNA_ID_1591790; Annot_ID_151508

SEQ ID NO: 32474 - DNA, 1394 bp, Unknown
  misc_feature (1)..( 1394): 2750-1469P.txt file - cDNA_ID_3056955; gDNA_ID_1591821; Annot_ID_151549
  misc_feature (1215)..(1215): n is a, c, g, or t
  misc_feature (1306)..(1306): n is a, c, g, or t
acacatctagagatcttcgatgtttccggatgcaccgatctagataaaatcgagggatcattcgagaatatgtcttaccttcgcgaggttaatctctcagggactaatctgaaaacgtttcctgagttgccaaaacagagcatcctctgttcttcaaaacgtattgttctcgcggattcgagttgtatagagcgagaccagtggagccaaataaaagagtgtttaacaagtaagtcagagggctctagcttctctaatgtaggggaaaaaaaccgcgagaaacttctttatcacggcaatagatacagagttattgatcctgaagttcctttgaatatcgatattgttgacatcaaaagatccactgatcttaaaacagagtatatagccaaagcagagtatgtctctatagcagagaatgaatccaaaagcgtatcttctctcttcgacgagttgcagatggtatcggtaaaaggttgttgggttgagaggtgcaagaacgtggatgttatcttcgaatcagatgaacaacaagagaaagagaaatcatcattagaaagtctttggatctcaaatcttccattgctaacaagcttatacagtagtaaaggaggattcattttcaagagccttaagaagctaagcgtagattgttgtccaagcatcaaatcgctattcccggagattcctgataaccttgagattctacgtgtgaagttctgtgataagttggagagattgtttgaagcaaaagcaggagaattatcgaagcttcgtaagcttcaccttcttgatttgcctgttttatcggtgcttggagctaagttcccgaatctggagaaatgcacaattgagaaatgtccgaaattgaaaggtagagaagatgaaccgaggattacagatgaaatttcagaggatcaacctcacaagtaagtgaagataacaactaaacaaatcgaaactttattttgttttcacacactctgttctgttcttcttcatgtgcaggaatactattgggcctgaaacccaaactcctgcccagcccacaaaagctacagacacagtttaatctctctgttcttcgttcacacgacgaggatgaagaaacaaaatttccgctgattttatattatctcaccgttaataattatcgaagtcttgaactttgacagagcttgtaattcgaaacttttcaaaatggttactttgtgntgtgttgtgttgtgtaaactcttaaaataaagaataaatgaatgttattttatttttagtcttcttcaagttttggtctgcgatcgtgaantttacgcagagagagatcagaatcgaagaaaacattgcaatataaaagagtcaccttcgagttcgtgtctcactccgataaagcaatg

SEQ ID NO: 32475 - DNA, 302 bp, Unknown
  misc_feature (1)..( 302): 2750-1469P.txt file - cDNA_ID_3056980; gDNA_ID_1591843; Annot_ID_151582
agcaccatataaaaaaacaatgacgcaaattattattttgtttatgtgataaataaagaaatataaaacgagagaaaacaaaaagagtgagtgatagtgattacaaaggtaagccaaaatttgaatatttaatggataccaccagataagaagaactttgcttcaaagcggcaaagcttaagcttttttctcgcgcccgcctctctctctctctctcttctcctctaaccaaatttcccgatgtgaaaaaacaagtttccgatcaactcaaaccaccgtcaccacttcttctctccgacatg

SEQ ID NO: 32476 - DNA, 524 bp, Unknown; identical to SEQ ID NO: 549
  misc_feature (1)..( 524): 2750-1469P.txt file - cDNA_ID_3057010; gDNA_ID_1591860; Annot_ID_151618
  misc_feature (1)..(2): n is a, c, g, or t

SEQ ID NO: 32477 - DNA, 97 bp, Unknown; identical to SEQ ID NO: 551
  misc_feature (1)..( 97): 2750-1469P.txt file - cDNA_ID_3057058; gDNA_ID_1591893; Annot_ID_151662

SEQ ID NO: 32478 - DNA, 181 bp, Unknown
  misc_feature (1)..( 181): 2750-1469P.txt file - cDNA_ID_3057075; gDNA_ID_1591911; Annot_ID_151681
  misc_feature (20)..(20): n is a, c, g, or t
  misc_feature (22)..(22): n is a, c, g, or t
tgagaatgaatgcttccttnanatagtttaagaataagtttctcctctcatgctgcaattgtcagatgatactatctctgagtctgctaatatgattgaatctataaaagcccggcttatagggaatggtcagacagagaagaggtctagcgatgggaggggaaaagatgaatctaacatg

SEQ ID NO: 32479 - DNA, 3 bp, Unknown
  misc_feature (1)..( 3): 2750-1469P.txt file - cDNA_ID_3057113; gDNA_ID_1591927; Annot_ID_151709
ggg

SEQ ID NO: 32480 - DNA, 492 bp, Unknown; identical to SEQ ID NO: 559
  misc_feature (1)..( 492): 2750-1469P.txt file - cDNA_ID_3057138; gDNA_ID_1591950; Annot_ID_151744

SEQ ID NO: 32481 - DNA, 1721 bp, Unknown; identical to SEQ ID NO: 560
  misc_feature (1)..( 1721): 2750-1469P.txt file - cDNA_ID_3057149; gDNA_ID_1591956; Annot_ID_151750

SEQ ID NO: 32482 - DNA, 23 bp, Unknown
  misc_feature (1)..( 23): 2750-1469P.txt file - cDNA_ID_3057218; gDNA_ID_1592007; Annot_ID_151839
gtctggtcaaatgatcgaggatg

SEQ ID NO: 32483 - DNA, 250 bp, Unknown
  misc_feature (1)..( 250): 2750-1469P.txt file - cDNA_ID_3057296; gDNA_ID_2684240; Annot_ID_192541
gaattccccacgtcaacgtgactgtgcattccacgtggcggatgtgggccctatagttggaccatgactcggacggatgttgaaattcattgtcgttgccaattgcgtttgtctcactgaaactgtgaaaattttatctcttttatagataaagaatcttgcttttttcagttttcagtatgaagaagaattgaagagagtgtccgaggaaggagacctttggtttcagtttgtgagtcttgttgtaatg

SEQ ID NO: 32484 - DNA, 3003 bp, Unknown; identical to SEQ ID NO: 21455
  misc_feature (1)..( 3003): 2750-1469P.txt file - cDNA_ID_3057296; gDNA_ID_1971936; Annot_ID_177271

SEQ ID NO: 32485 - DNA, 250 bp, Unknown; identical to SEQ ID NO: 32483
  misc_feature (1)..( 250): 2750-1469P.txt file - cDNA_ID_3057296; gDNA_ID_2684240; Annot_ID_137743

SEQ ID NO: 32486 - DNA, 41 bp, Unknown; identical to SEQ ID NO: 576
  misc_feature (1)..( 41): 2750-1469P.txt file - cDNA_ID_3057310; gDNA_ID_1592082; Annot_ID_151932

SEQ ID NO: 32487 - DNA, 1320 bp, Unknown; identical to SEQ ID NO: 584
  misc_feature (1)..( 1320): 2750-1469P.txt file - cDNA_ID_3057383; gDNA_ID_1592123; Annot_ID_151997
  misc_feature (1)..(1): n is a, c, g, or t

SEQ ID NO: 32488 - DNA, 1836 bp, Unknown; identical to SEQ ID NO: 605
  misc_feature (1)..( 1836): 2750-1469P.txt file - cDNA_ID_3057552; gDNA_ID_1592275; Annot_ID_152195
  misc_feature (23)..(23): n is a, c, g, or t
  misc_feature (97)..(97): n is a, c, g, or t
  misc_feature (151)..(151): n is a, c, g, or t

SEQ ID NO: 32489 - DNA, 3000 bp, Unknown; identical to SEQ ID NO: 9477
  misc_feature (1)..( 3000): 2750-1469P.txt file - cDNA_ID_3057627; gDNA_ID_1972123; Annot_ID_179076

SEQ ID NO: 32490 - DNA, 838 bp, Unknown; identical to SEQ ID NO: 611
  misc_feature (1)..( 838): 2750-1469P.txt file - cDNA_ID_3057630; gDNA_ID_1592320; Annot_ID_152258

SEQ ID NO: 32491 - DNA, 588 bp, Unknown; identical to SEQ ID NO: 612
  misc_feature (1)..( 588): 2750-1469P.txt file - cDNA_ID_3057644; gDNA_ID_1592323; Annot_ID_152261

SEQ ID NO: 32492 - DNA, 616 bp, Unknown
  misc_feature (1)..( 616): 2750-1469P.txt file - cDNA_ID_3057680; gDNA_ID_1592352; Annot_ID_152323
ctatagtgacaggctgacagcaacagattgttgtcttaccttggacttggcccaatttccttttttggcccaccggtatgaataaaaagagtgcggttttcagttcggttcggtttataagcgtaacgatgacaaaccgatcggtttgttttaattcttgactttaataactaaaccctaaatcgttcttcttcttccgcatcttcctcactcgattagtaggttctctcttcttccaatctattcccaacttctcacttttccgtctaatcgttgtcttcatcaccatctctccgagttcccttcgagaccatcttatcttcaatggtttaggtattgcccgattttagatagttttgttctctcgtatagttatgacaatggcagatttttgtacgctctgcacatgcttaatcttgaggattgggctattattacgtactatgatttaatgaattttagatttgaattttggaacttttgatgatatgcatgttaatgaccaagaatgctccgaatttgtctgattcgttattcgaattctacttctttgattgtttgtttccaattttccatgcatctgacttgtgaattttgaacaaaattttcagaaatg

SEQ ID NO: 32493 - DNA, 2062 bp, Unknown
  misc_feature (1)..( 2062): 2750-1469P.txt file - cDNA_ID_3057732; gDNA_ID_1592371; Annot_ID_152361
aawawatttttttttttgttctaaatctagtagtagtacctcttaaagtggactgcgttccatggattttctacttcttccagcttcatggtcatcagcagatagactcccgggtgaagtatgataagtgtgtattttcaatgttttgagcatccatttgtcatcactttagcatcatatcatcactgttttataccatttctgatcatttgacatcactttgcatgtttaggatagttttgcatgcatgttgtatatttgtgttgttttcaggtgattcggagctggtgacgagctaattggaagaagcggacctgatcatgtcaaaccactcgacccctaggtcgagtagacgcttcaggacctcaacagaccactcgacccccttgtcttcacctccaccacctgaccatcactcgatcacgccactctacctggaagtcgagtatcaccatcaccaccacttgactacatattcgatggcgagcttcagagtcttctccattccacacttaaccagacactcgagcacaaggaagaaaagaagactccagcttatcactcgacctctcactcaaccacctgggtcgagtacagttcttaatctgtcccaatactgcgtcattttgagtattaggattttggaatattttgcaataagtagcatgtactttacattttccaaaacaagtttttatctaggttttattccgcaaacactctgttctagaccttttgtaatccggatttctctttatctattcagtattcagtatttgttcttgattttcgtttcctgttgttcatccggttatcatcttgctattacagtgttgttatcatgttttcattctgttcaacgtttatgttctctacaatgatgtctaagtagtgaataggtttctgaggatgggttagagtagtgtagaattctcaatatgctaggtggttgagtttgatttgatagatcctttctggattagttgttcttaatgcctattgctttctgatcaactagaatttgagcccagatattttcgcacccgaaaggtgtcttgatgaaatgtctgaaccactaattccagagattcgtggccctataccaaggtattggttgcagggagcgttttggctttaacttgttgattcgtaatgcctgttaggttggctctcgtcaatggtgattgagtctgggactaggttaacttgagggtctctgttgcggtggcacttagatttggttaatgaacttgttatctagggataatttgttgagcatgtcaatcacctataaactgaggaaacgaaactactcaattaccccatcctcaggaattctttatmctgattgaatttattgtttactctactgttgtttactacatcttgtcatctgttgcttagtttctgcaattctttcttgttactcgacgtgatactcaaccacccagttgtctggcaacagactgtgcagttgaatatctttgtttcattatactgtmctgttactcgaccagtcactcgacctcacccagtgctctgcaaagagctgtgttggtcgagtgtcttactttttctgcttgattttctgttttctgcatgttcactcaggactgctagaacacaccaaaacctgttattgctttgcttgacttagtgacttttgatcacatcttgattgttcgcatcacatccatttggattgacaacctaaaatactacaacgacatgattggtgttttaggataattgactaagaactattatcaatttggcgtcgttgccaattgggtgtttgtttgttacatttgagatttcagacttacttagatcaagttcgttttcaattttcaaaacggttgctaactgtgtgcttttcttgttgtcttcttgatccaggtacacctctgctgtatgcaaactcgatcaacaggcaaccagaacctccttttcaacgacaacatcgaccgcatagctcacaaactcagagaaaggagaaacacagtcaacctaataccacaacaaccactcgaaatggctgacgaacataatcaacaaaatg

SEQ ID NO: 32494 - DNA, 75 bp, Unknown
  misc_feature (1)..( 75): 2750-1469P.txt file - cDNA_ID_3057753; gDNA_ID_1592381; Annot_ID_152377
aaacccgaatgatccaacacaacagacacagggcacaaaagaagcaaagaagaagattcatggaaaagatttatg

SEQ ID NO: 32495 - DNA, 2916 bp, Unknown
  misc_feature (1)..( 2916): 2750-1469P.txt file - cDNA_ID_3057779; gDNA_ID_1592399; Annot_ID_152399
aatcgtctcactacatcagctgtttctgctgctgctttactggtaacacttatcaaatcttgtcttgtagtttatattcatacttatctcaatacacttaaagaagcttgatttgtgtaattcgtaggcaagcaagaaagttttggatcctgtagctccggtttataagtattgtcttatatcagtaactaacatcttaaccacaacatgccaatatgaggccctcaagtatgtgagtttcccagtccaaactttggctaaatgtgccaagatgatacctgtaatggtaagttatttagtttttatgtaaaggaggagacttttgtgtacatgtgagtttatcaacactcttctaatctatgtgatgttttttacaggtttggggaactctcattatgcagaaaaagtataggggatttgattatctagtggcctttctcgtgactcttggctgctctgtgtttattctttttccggtaaaaacacaatctttctaaagagatctctctattagtttgtagtaagcttatcttggctgctctgttgtttttgtatttgagttgtaggcgggagatgatattagtccgtacaacaagggaagagaaaatactgtgtggggtgtatcccttatggttggttatcttgggtacatatccgttttactcgtttcattgttgtttggttttgggataggaaccttaatactcgtttgttatgtccataactgggtgttggtaaaatggctaacaggtttgatggttttacaagcacattccaagacaaactctttaaaggttataatatggaaatacataaccagatattctacacaacaatttgttcctctattcttagttttactggtgagaacttctctttgtgcttcttttgtctcttttactctcattttgtttggactctggaccatgtcttaccttctgtgatgattagtttccattactgtttgatcaattttggatacatataaacttctgatttaagctttcaactgaggccatatgttagtagatattaggaaactttcttattccaactgtgattctattagtccatcactgcttttcgatatagaactcagctgccttgtataaacctcaatgtgtggacctaaaaatgctcgagaatcaggttgaccatgcttttttgctactcatatgtgaaatttcttggttgatataggccttatattgcaaggacatttactcccagcagtagactttgtttctcgacatagggattgcctatttgacatagctatgctttccactgtaagttttcagcttagtcattacatttattagactatgattgcattgcagcagtagtcacaactgaccagagatgaacacgttgttttgcaggtagcaacagccagccaatttttcatttcctacaccattaggacatttggtgctctaacgtttgctgccataatgactacaaggcaggtaagttagtctgatctcaactctttgattcataagcacaatataatcaaatctaattccttcttcgttgtctgaaaaataaaaagcttgccagcatcatgctctcctgcatttggttctcacacccgcttagctgggagcagtgtattggatccgtaagctcttccaatcctctctttactttgtcttccctctttttcatctctccttgttcccaaaactaaaaccacttttcactggcgcaggtaattgttttcggatctctatatgctaaaaccttcgtgaagaagaaatcagaaaagccgccggcagctcaagaacttccacgggatgaagaggcagcctctgaagggaaacccttaaagcacagagagagctttatcttctctgaggcttaaacagttaccagccaaatctaaagatccctctgtctttgaggcatctaactaacaaaactaaagcagttgagtcatacatgacgtaggacgggtacttatagagaccaatgagaccaaggatcaatttatttactgtttctgtagacttgttaaaatgattgtgaagtaaaattgttatggagttttgatattgtatcaagaaatatcataaatttgtgatacaatggctgattcatatcaactgaatttaatacagtaacaattttggtttaaaggatcaaacagaacttaaaagtttggttattacagagtttacgattgacacaatataagaaattacactaaagtcaacattagagttggtgagaaaatcctttgccttatttatcagacaagtaatcagggatatatgaaacaattccactttcaccaatgagagttctccaaccttaccaatcaagcttaccagactcgttmtcctgtcaacatctcaascacgktacacccaaaagcccacacatccgcaccataatccaaaacattgtcccttataagctccggtgacataaaccttgcagtgatagagaacgttgcaccataatttttttttagatactttccaataataaagaacagtttattgtggagtccaaactctgaatcataaacgaatcgatccgcgagaaactcgtggttataatataataaacttatatatattatatgcattattgttgcttgttgccaaaaccaagacagaaaaagatcattgcattttgaaaacgtcgtgttgaattgatagttgaccaaaaaaacaaatataatcaggataacaataaaatcaaacctaacgaataaacaaattgtcgatctgatgatgaaataattaagagtgtaagtataggaccgtcttttgttatggatgggacttgttcgagtctggtatatacagattaaatatcttctgacacttctatttttatatcactaagttttttcatgtgcttcttcttctccatcgaacataaacagagaaaacaatcaatatg

SEQ ID NO: 32496 - DNA, 1477 bp, Unknown
  misc_feature (1)..( 1477): 2750-1469P.txt file - cDNA_ID_3057786; gDNA_ID_1592403; Annot_ID_152406
tttctgttaattaaattarktgaattttaattttgatagcaactatttattaaatatcaattttgatagcatatattaatttcggtcaaaaacataattttctcgccataaacgtaaatccgtactttttccgccaaaaaacgtaaactcgtaattttctcgtcaaaaacgtaaatccctaaatttttgccaaaaacgtaaacccctaatttgttcgctaaaaaaatattccatccaaaatgtaaatccataattttctcttcgaaaattatgaattaaattttcaattttaataataataataatgaaaattattgattattgtttgatagtaattattaattaaattattacttaaatgagttattcatttaaccattcaatctatcgaataaataaaatgagtttataaattgactaactcaaccattcaatttattaaatagaatgagttcataaattgacttagatgaggtccgccacttttttaaaaactgggctcgaagcttcctcgttgtttcctcttttgcccctataaatacaaaaacttcgagatccgaagaaaaaaaacccaccaacaatatagatgtcttcctccggtagtccggtacacagtaccctaatttctaactccggcgatgaaaacactgatcattcctccgcagtacacaagcttatcgctgttatcaacggcggagccatcggtttgctgcagatcacagagaattcctcagcttcaaccaatactgcagatcgtcaagccactatcctctctttctgtgtctttattctgatctacgtcgtcctccgagtcactgaagtaaagctcaatagaaaccaagctccgatccatcacttcgttggacacatcagccatctttttggggctcttgcagctctcatgctcatctccattgtttctcccatcttcactctcatcgttgcccctctatggcttgtttggttctttgctgttatgtatgtctttttagtagaggtcatttgcatggtggagattaagcgtccaggggacgcaaatcttacggaccagatctctcaagtatagtagtttaaacgtagcttgagattccgagcatcaggttaatgtattagtagtaatttatactttatagcataaaatcatgtgttttttctttctaagttttcgaaccctaatcgtgtatataataaaagaatgagtcgggcctactttaaagcccgaaacaaataaccaaaacggcccatatacttcttagggttagtttcgtcaaaataccaatagttccaaattccgcgtttcgtgtgggagagaaaaagaagaaaaagagagtccaaccatatcagtttgctttcacagtggagtcggtgctctctttttttttcttctctctttcttttcacctctcgccggatcccggcgatcttataggaggcaaatctatcagtatcgttattctaggatctctaacaaacaatg

SEQ ID NO: 32497 - DNA, 312 bp, Unknown; identical to SEQ ID NO: 619
  misc_feature (1)..( 312): 2750-1469P.txt file - cDNA_ID_3057789; gDNA_ID_1592405; Annot_ID_152410

SEQ ID NO: 32498 - DNA, 709 bp, Unknown; identical to SEQ ID NO: 622
  misc_feature (1)..( 709): 2750-1469P.txt file - cDNA_ID_3057848; gDNA_ID_1592449; Annot_ID_152484
  misc_feature (3)..(3): n is a, c, g, or t
  misc_feature (6)..(6): n is a, c, g, or t

SEQ ID NO: 32499 - DNA, 2129 bp, Unknown; identical to SEQ ID NO: 625
  misc_feature (1)..( 2129): 2750-1469P.txt file - cDNA_ID_3057865; gDNA_ID_1592457; Annot_ID_152498

SEQ ID NO: 32500 - DNA, 3000 bp, Unknown; identical to SEQ ID NO: 10188
  misc_feature (1)..( 3000): 2750-1469P.txt file - cDNA_ID_3057870; gDNA_ID_2213635; Annot_ID_181005

SEQ ID NO: 32501 - DNA, 310 bp, Unknown; identical to SEQ ID NO: 626
  misc_feature (1)..( 310): 2750-1469P.txt file - cDNA_ID_3057878; gDNA_ID_1592462; Annot_ID_152504

SEQ ID NO: 32502 - DNA, 3000 bp, Unknown
  misc_feature (1)..( 3000): 2750-1469P.txt file - cDNA_ID_3057951; gDNA_ID_1620300; Annot_ID_152584
gagaaaatttaggggcacgagctttgcagtcacctatcaattaatccattaatctaactagtctatacacgttatccgatgaagaagtgtaaaatgttggaattgccgagttaaaataaaagataattaccttccaacacttgcaagggcactaatatgcaaatgctcaggttcttcttctctttagaccaacaaactcattttgcttaaacacttctacttcttttcctagtttatctgcagtttcctgcatcctcttctgagactcagccatttctccagccacttccctgcaacttgctccaaattttaatgtctcagcttcacaacaaaccatctccttctctgtttcaagtaaagttttcctgagatgactagttttctcatgaagtaaccttagtcgcctgtacgaagccataaattcactcaacatttgtacatgtttccctgaaatactctccaattgaagcttctctgagttgtactgatcaattaggttctgcaagcaagggaatgaccactcagctccatcaatttcaggttgctcatggtttgtccttccatgtatcacaacagaaccactagagaccgtatctctgatcaaatcactcatcgcttcatccacactcaacttagaaagagcactatttgttggctgatcaccattctgagtctttttccatggctcttcaggttcgctcgtaaccggatcaaacagagagatacctagtaaatagcataagagttcaaagaacaaaaaagtgtattccaagcataatactttaatagaatcaaaattgtccataagtgaagtaccttggttcagagcagtagagtgtacatcagaaacagacattgaaatggaatccaaattttctaatgtagaatcatcctctgcactaacagaatcttgacattctactacacaatcatcctctataccactaacagaagcttgacattctttctctgatgccatttggtttgcaatttccggtataacaccaccacgagcctgtaagctactctcaacatcactcaaaatttgatcagcttcaacccaaaaatcaatctcatccataacatcacaactaggaatcatctcaacatcttcccacttgaagaatccacaagctccaaatccctaacacaatttcttaaaacaatgttaaccagaattatcaactatgagctttaaacttgcgaacgagtcaaaacctttttgatgcagcatatcaggtaagctctaccggaaacgtctttaactctccggcaaggtccagcaccgcaggaacaaatcgggatggtgaaggcaggacggaatttgatatcttcgtcggttactttgtcacaccatttgaagaaacagcaattctgagcctgcgaatttcaaatgtcgtcagtaacaaattcaaatttcctcgcgaattttgcaggagatgaagaatcagtaaagaaagcgagtacgaaccgttggacacttgtagaacttccttccgggattttctcgagtattcgcgaccttgatttcacagaaacctccgccgcatgggcattggatcgccggtggaggatcatcggtgtaggatttgagaggacaatcgttgatccagtggccagcctgacggcatcggaagcaatctccggtctgcattgtgccgttaagcattcgtcgaacattctccttctcgggatgttaatatgggccaggtcatcttttttaagcccacataatttatttttagctatgactgaacaaaacatgctgaatatgggacgggcttaatgggcctgaagactttaagcagattaacgaaacaagtgtgttgtgtataatatgagaaccatgtcgttctgatcggttaaaaactacagctgaccaaataacatctataggcttctgcggatatgactctacggcgtctacgcctcgcatgcctatcatatttaaccgtcaataatggatttggcggttttggtaggccgggtcaaccggattaaaagaaaacggtttggagtccttccttgcaattgaattttcacacattcgggttttgtgatttctctgtcataatgggcccggcacatatggttcataacccatgtgggcctatggtataatttttccaattaaaactattgttaggtcgataaaacaaaaaacaataaaaacgagtggaatacacataccaaaaagaatgtgatgaacattagtaattttattttgatggttaatgaaaaacaaaataaatgcatcttggcatcttccgttggaaagcgcaaatagggcagattttcagacagatatcactatgatggggggtgagagaaagaaaacgaggcgtacctaatgtaacactacttaattagtcgttagttataggactttttttttgtttgggcctagttataggatcataaggtaaaaatgaagaatgaatattagattagtaggagctaatgatggagttaagtatgcacgtgtaagaactgggaagtgaaacctcctgtatggtgaagaaactatacaacaaagccctttgttggtgtatacgtattaatttttattcttttatcacaagcgatacgtatcttaagacataataaatatatatcttactcataataaatatcttaagatatatatacagtatacacctgtatatatataataaataggcatatagtagaaattaatatgagttgttgttgttgcaaatatataaatcaatcaaaagatttaaaacccaccattcaatcttggtaagtaacgaaaaaaaagggaagcaagaagaaccacagaaaagggggctaacaactagacacgtagatcttcatctgcccgtccatctaacctaccacactctcatcttctttttcccgtgtcagtttgttatataagctctcactctccggtatatttccaaatacacctaacttgtttagtacacaacagcaacatcaaactctaataaacccaagttggtgtatactataatg

SEQ ID NO: 32503 - DNA, 3000 bp, Unknown
  misc_feature (1)..( 3000): 2750-1469P.txt file - cDNA_ID_3057962; gDNA_ID_1620300; Annot_ID_152600
ttgattctacagacaacattatatagctagcatcggatgcaacatagattacaattaatttacactagacgactgttccatgcttcttctatgcagacttccctccaaacacccttataaaactggatctgaaagattctctaactcctctccagtacgtatagtttgacccatataaccacagattcactgcttttttccaaccatctctcgggaactcaatttctctaccaatcctggactcctcccaatcttcttcagtgtcctccaaaagcgggagcgcttcaaaaccaccagactccaggtgcttgatccacccgcgcatcagatagttcaccacctgctcgttttcatatcccaaatggtgggttcattatacctaattgcagagtttgaagaatttattgactagttcattatacctcagggacttcatcgtgtgggcagtgacccgctgggctgatctcgtagtatggagcgttggggatttccttctttatcttctttccccataacggtctcacccatggatcttctcttccatacatgagacatatctgaacattgttttccttacacctagcataaaccatcaaatagcagcattcctcataagcaataacaccaatcacgcagagtaaaaaacatataaaaacaagaaaccacactgtcttatacctagataaagcttcggagaaagatagctctccaccaggagcaagcatgattgaagcaaacgatgctgcagcagccggatgctgtgtgacctccacaatacgtgagaatactttatccacattgatagaatggtctgtgtagacctgtttaagtatctcagctatgctttcaggatcacttatcttttgccacctgcagtttcattgggaagtaaagatattagactgatagagatagaaatagaaaatgatacttttcaggtgaggagatgtgttaataaagtctcccttacaccaattctgtgatttttttcactctttccggcagagggaatgctccgggccatggaaagagacgtgctagctttggggatcttactggattagggaagaaaccccagaaaggtgttgcattaagcaaggtaacacccttaaccaggtgaggatgggttgctgcaaagtagagagctacataccctccaagtgagttccctgcaatgtacacaggctcaccgataacctgtacaacacaaataccacatactcttaccgactcagcagcttatttcagatgaaaaagatcgtgatctcaaactagaacacaaacggaatcaaagaacagagatgaattctaatatctagtgcatcctaaactttcccattcccaaagcaacaccagaagactccatacccacactttcaggttctgagctgaaaactattgaaatccatgagtatacgacacatagcaacaatctacactaaaaaaaaaaagctaacacactgcttttgaaattacgactaaaagaacaaaatcaacagcttaaagagtaatagaacaactgaactcagatattgctaacctcttctacaaaatactgaacttgatccctccagagatccagagagaatacaagttgatcagcccacggttcagttttgtcaccaaatccccaaaatggttccttatcttccgaggaactggtttcttcagtcatggtagtaggatcttcagtagggagagataaaccctgtccaagaaaatcaatagcccatactcgataatcccttcccaaatcggtaagctgcttctcatagtgaaatgaaccaacgccaaagccaggaagaaacaacaccgcaggagcatcgagattgtcacaaccggctttctcataatgtactctaagcttgggcttccactcgcagtgagaatgactgattcgagcagcaatttcaccatttgattcatcaggcaaaccaggaatcaaaacctttgacgttgattctcctcttctggctatacgacccaagtcatcattctcaccaacaacataaccatcggaatttccacttcgaatcacaagtctggattttttgacccctgagaataacaaacttgaccgatttgggaccaatcttttcgttgctaatttactactccaagtaaccacagagcactggggcacaacgttcagtgagattatctccataacaagttcctgcaaatgaacaaccaaaaggcatatcctttaatacgaattttccactcatatatctcaacttcatagcaaagctaagaataacaaggaaaatcacatatgaagctggaatctttgtatagttatcagaattttgcttcaaaagctgaaaccacatacaaaaagttgatgaacttgcggtaatcttctatgaactcgtcttatcaaatcctaatcaaaacaaagcaaatcaaggtcaagccaatcttctatcaaattgaaaccaaacaacaacaacaccacccgattcatcgacaaagaactccagctatataataaacccaggaagaaaagaaagaaaagagagagttgcaacttgtaccttttcaaattccagaagcgagaagcttcatcaaatggtctctctgagagcgttattgagaaattaagcgaggaaaaatctaaaggtgaagaagaaatagaagaattgggttgcttgctggcttggttaacttcaatcgttcggtgcaaaccgacagcaacgtttttatcgagtttttattttttcttaaaggatccaaaattcatactgtattattaagtgtagggttatttttttcacaatatgacattttgttttggatctgacattgctaatttgacaccgatgtaacattgcaaaaacacatgtttgttgcaaaaatatgacagaataatattttttttaaaaacaattgatttttgatcttcttttccattgtgtaacaatcggaaaacaaaaaaaacaatcgaaaaacctgcagttttcatatcaaacaatataaaacccgtttaatttttgaatg

SEQ ID NO: 32504 - DNA, 3000 bp, Unknown
  misc_feature (1)..( 3000): 2750-1469P.txt file - cDNA_ID_3057966; gDNA_ID_1620300; Annot_ID_152598
actttgaaattaactctagaaatcttatgtaatgaaaacaaaacgaaagtatatagaatcacgatgagattaactggctaaaaagtaatcatctttcatacaaatttgctatacatttttttaataaggacttctcttttaatgtgtaggaaagatgaaatcaaaacacacctatagatctattttccataacacacaagatctgaacacgaaaaacaattgttataccagatatatacaatagtgtttttttttttggtttgaatgatatatacatttacatatatataaacacatatattaacgtataaaatattacaggaaatttgattggaaatgaagtccaagttgagtaagttttatttcaaccacctcaaggaatatatacggccttgaagcatacgtaaccatctcaaaggcagtttcaaatcaaacgtagatgttagggtataatgtaagatattgagattcttgttggctaacggaatattatatcaatatcgaaatgttgccaggatatgagaaccatgtgatgatgatatatacgtgattgcttttcttcaacttggtgacagagaaaaaaaaaagtttaaaggagaaataaaagaacaaaagctgttcaacccaaccgaattagcttgcaaacgagtaaagagcagatctatgcctcatccgctgaagcataatgcatgaaatgctagaatccaactctcttcggtttttgtgctattatttaggatatttctgcctgctacacattcgttgtcgatatttgaaaaacattgggatcaaaagacatcttatatgaataaaaatatatttgttaattgttatacataatttgatgttattttgacatactatgacaatacatatgttatcgtcaccgcaatattaattaactgttttcgtcaacagtgtataaatgattcccataacattattaaacgttgaatggtaggaagaacaacttggtatgttatatatataacagagatctcatattataaaagtatgaaaatcatgtgtgcacatagactatatcacatctacatgaaacacaaacacaaacacatggatttcttctaaacacaacgacatggatataaatccagtgttatcggcgtattaaaaaaataagacaatgtatgagtgtgacaatcaaccatgtgaaatcttgtctttctataaatatactagtttagaactttttgttttattttatttatttgttattttactatatcttaagataagcttatgccaactgactttcaaattaaaatggaatattctcgttttgttaggtggttggatctcgttttatttaaattttcctatatccgtcttaccgagtaatttaacattttttacaactaagaatatgctcttttccgtccaattgggaatatgcttaacaacactatcatggatgattatcctaaatgtacaataaatttactacttaatcttcattcatgttatcatgttaatatactattgaaggattccattgtaaactatttcatggatgataatcctaaagtgtctttggcttccccagtcaatattaaacaaattcaacgcaaactttttaataacagtaaataaacttacccaacattaatatttgaccaataaaaagtcataaataaagctttgaaaatattaatggggaagaattcaatagttttcgaaacatcttaaaccttactctacctaataactagacttaaaagcaaagaatcgaattaaacgaaccaccccactcttctgctaataggcaaaaacaaattccaggtgtaaaagcacgtcagcaagagaaaacacgtggaccaatgatgtaaaaacgtgcacggaacagtaaaagaagggataccacgcggtatcacagcctcataatattcccttcaaaatgggaatattataattattatccaatcccgaaattaactctcttttttttggttctgacaatgacaaacaaaataggtttcgtgtagtaagagtatcctccacgtgtcattaaaaacaaaaaaaatggttcgaagagtgactggctctacccggtaaatccactatccttgaactgccacatccggtcgcgtggttattatttattttatttcctctacttacaaaaaaaaaatggtgtatttattttcttcaaatgggggtttaagctttttttcagttgtttggttttttctttttcaaagggtttaatgtcttcttcttcttcttcttcgttatttctattctagaagagagagagagagaaagacaaggacgatcgttaaatctttttctcttaaatcttagaatttcaaagtctctgtaatttttttctcttttcatttgtatagcacaattgttcttaatcagagattcgtgagaggtaaaggtagcgtaattattcagtttgcgtgatctataatttaactggcgccagattgtgatccaggaatcgttggcttgttaggtgagtttttttgttcatcacaattcatgttctcaattctgtttttctgatccacaaactcaattcatgttctgtttttggtgacaaaaaagtattgaatctgaagtcgaataaattatttggcggtttgtcagaagttggcaatcgagatctgattatgttttattgtttgtttctacgtaaattgtgagcatttaagttacatttgtttcattgatctaagtttttgcgtttcatctatacgttgcttgtttcgctgcatttttgcatgttttttaaaaaacaaacaaagtgatcaagggtttggtgttcattgttgatctgaatctgtatagggcttagttttatcttcctgattttttttttttttttgcatttgacctcggatctgttgatcattagtttaagaatgtgttcaaattatactgattagcttaattttgttggagatgatcatgacattaaaagtctttgatttttttgcaggttgttgttttgttatgcataattgagagatg

SEQ ID NO: 32505 - DNA, 3003 bp, Unknown
  misc_feature (1)..( 3003): 2750-1469P.txt file - cDNA_ID_3057977; gDNA_ID_1620300; Annot_ID_152591
cttctttcatttcgtcgcaaccactttatccttatcatcttctttgtctttcaccgcagtctgagttagctttaacgaaaaaacaaagatatgttgaaatgaattcaaacattggttgcaatttaagatgttacagactttggtactcttgttaattacttgaaaagatacatgttataatgctaacaataggtttgatttgtttgttgaggtagatgttgattgattattaactcaaaactaaactaacagtgagatttgcatttggaagcctaacgacatgaagctgtcttgaagattggatcttcttattatgggcccaagcactggcccagatatgtcttgtactatttgtatgctttgatagcttgaaatttggagtagtgcgcgtggggagagggaatggtgaaaccttagtggttaagttatgaggaaaatgataaaaggataaaacaatcaaatgcagcttgaaacggccataacataaagtaccttatggtggtgcgaatatttttgtgtttctttcactcttttattgctgaaagctacgacacttgtcttaatatattgtttccgcaagtcacatgatctactttttatttaacgtctagaaacgccgagatatatgatgattagtatatcacgtctatgcaaattgttagttcgtgtttggccaaaagatatcgagacatgtctgaagaaccgagtctggttttgagatatttcttcaagcattactatacaatagaaaaaggagacacgcgaatatgataatagcaaaaggcataaaaaggcgaaaattaaagaaaaacgtaaagtgatttggcctcaatcaacgggaacgtatcttaattttagaggttcttcttttacttttgagacgagagagtttgcgtctttgcgagctgctttggttgactaaacattatcatattgaaaaccaaaatacaacggaggaatatttgtcacagtttcactttcacattgtttccttaacgtttaatcaaccttgttcaaaatttctatagttgtaatcatcattgtttacaaaattttcgttcaaagatgattttaaataaaattgtgaaagaaaaccttttctgaaataaggattggatgatagtgttaaaagaaaaatatgaactgaggcaaaaagaggagtggtccccggaagattgtgaaatgtgtcatctaaaccagccagacgtagtcacgtgttctctctagctttatgaacttccttagccagcaccatcattgtgattgtagtatatatgtaaccctaccttcatctctcccattttccattctccatatagactcctttacaatatacaaaacctatccaaaagcgaagaagccaagcaaacatattataaaaatgaagaaggcgtcagatttcgtgaagcagataataaacatgttgacttgtctagcaaaggacaagacgaaggagcttaagaggaagacaagagccttcaagacacgtctcgtaatattttcgctgctccacaacagacacatggtggtgggttctttgtctcacaagctcaagagcaatcaaacatcaaaaaagatagatcatgataacaaggatgttcaagattatcatgataaaaacatggtggttgtgtatagccaaaacgttaacgccatgtctagcactcctgtctctccgcatgtacaatatcaatatacagaggaggaagatgatgaagaaggggaagaagaaaagtatccagacttgagacactcgttgtttgaggcagaaggttcggtgatagagatggtgaagcactccaaggaggacaatggagaagagtttcggttggaagacgagatcgacaaagtggctgatctttttattacccgcttccatagacagatgtggttacagaagcaactgtctctcgagagtccagatacaccctccccaattcattcttaatatacatgtatttgacgctcctccttgttttttgtttcggggtgaaggactcaatgatccatacagatttttgttttacgtagtgaaaaatatgaaaacaggacatatttattaatttcttctatcaatctgtacctaacaacgtccgttcttccttcaagctccttgacgaaataaaatacagttttttttcttcatgttattgttgtttgtgtgattaattgagcacttggcgaccattaattcttcgtttccatggaacagcatacacggactcatatctttacgaattgtgcaggcctgttttcaagttcattaaagcctattaaggcccatttactgatataataattaattcagggtccgtcgaaaatagatatttaattcaggggccgttcttttgttccgtttaacgacatcgtttcgtctttcccctccttctcccgttctccggtcctcatgcctgccggaatcagctggttagtagaactctctctctcgctgggatggacttgctagttgctaaggatttttttcttctttttgatgatgattggttgataattctagctggtttctctgaataatctagttttatatgtacatctttatattcagtttaaaatttttgcggattaatttagagttatctgtttagttgaggggacaagggtttatctttaaattttgttattgatgtttttgtatgcttataaacttgtaatggttttggttctcgataatgtgcttgaacagtattgctctctgtgtttctgtccatggtgaatcgcacatgcttcttcaagtcatgtgatgatgtctctgttgtagccatcctcttgaaacttgaacctttttggtttgttttttgccaaatctatctttactgagttattattccaattatcaggtcggtttggactctcaatggagagtgtggaagcttccaagcaaatatggtggtatctggtgtcaaatagtgtttctttattatcttctgcccatagatcttaaacgtaaaagcatccaaagatgcattaattaacgataacatg

SEQ ID NO: 32506 - DNA, 3003 bp, Unknown
  misc_feature (1)..( 3003): 2750-1469P.txt file - cDNA_ID_3057985; gDNA_ID_1620300; Annot_ID_152583
aagtgtatactcgtttggtatagctacttttgcaattgtgaccacgagttactctgacaggcacattatattcgcagcagtgctgtaaaagatgcaagtaaaacataattatatgtcaagaacgatgaggtgtatgaactaaaagactagcttaatgagcacaacaagaagagtagggagagctagaaaaaaaaattacattcttaataagcataaagaaataaaacatacctttagcgccaaattccctcgttctaaaagttgatcctttatctgacgtttattaccagttaagttatgccctccctgtccagtgtaagtcactgtatctgcattgtctagatcatcctcgtactggcccgacataacaatagaaacagcaagcggtaatttgtagttactatactcctatagtgggaagaaaaaagtcagatttatgagtaaataaatgaaaaatgaaacgaaatatcttatattttgggatcaaatacaataacaaaaagacaagttgtattactttttcgtattccattgacatataatcaatgccatttagccaatggttatggaatcctacagcacacatttcagctcttgaaaaaaaacggtgtccaacgtctatacctgcaagccaatgtgatcagaagtcagaacataataatgaaaacttttctgtaaaaatcttaagaccaaagcttatgctggcttggaattaaaatttagggaaagaaacaaagttgtaaaagcacaactaccaaccaacctggaaggtcaccgattatttttcttgggtacaatatcgccttagcttttatcatctggaaattttcttaaaggcttaagtcaacttgcattgaagattacagaatagacaaaccatcatatttacaagaacacaaagtataatgatacatgttgcttaacaaaacattgtgacatcttccatttcttgatagacaaaacaatgttgcatgaggcaactaaggccagaggtaagaaaaatcatgacttgcctcagttacacccttcaaatcaggcctgctcaacttagcctacaataaaaaagaggatcaaaacaggtcaacaacacagcaaaaacgaaatttattatcagcattgctagagcctagagacaaaaaaaggaaaaaccacaaacctggacacagaggagatattgcttgttaaataacctcagacactttgtcactttgagatgaggttccaagttcacgtccttaccattcagagaaacactcaatttctgctttcctttctgcattgcggttagctttggagggcttcttcgtttagggctcccatcgacattttcctcttctttctcatgtaactcagtgtcatcgacacaaatttcactctttctgtcactgaggagcttaaccctctcctgtactaaacgcgccttctcatctaacgctttctgtctcactttctgaacccgaacactcgatcttcgctctgtttggtcaggagcattagctcgtttcctttttccagccatcgatcactctttttcccctgaaaacaaaaccctcgaaattccaacaaaagggttccacaaatcgagacacgaacggaacagtattacgaggaaatgggcaaatattgagaggttagagagacagacgtacctggaaaagctagcggagaagaagagacggaaggagactaagcagcgcgagattgaaactgtgaagacgacgaagatgagagttttttttttctcctcttttttttggtataattaattctttttttatttcaaggaggaaagtagacacgaaataaatgtttgtcctctttctttcccggcgatttcaacttttcggtttccctcctaaataattctgtcggatcaatggatgggctttctaaggcccaatttatttaaagaaatattaaccatgttgaaatcaaatcagagatttttccctgagaaatcagatcacttatctgtgaaagatctgcggtatttccggaaattcaaaaggaaacagattttaactacaaaagttgcctattccatggtttttcaaaactaaaatgatacacaaatttaaggaggattagtgagagtttgagttttttaaagacttaacagattctaatcaaagatttttatagattctaatcaaagatttttctatggaatctcggttgaaattttttttgttcaagaattatgtaccactcactgccagtgtgtgaagagaaagaagagatttgaccagctgctgtctgtacgttgaccttgaaatcgttatcgcaaagcccatctttctcccaaaggcccatccttttactcttttattttccttttatttttggatattcaaggaaatctcaaaagaaaaaaagaaaaaaacaaatcggttaagttcggttcggtacggtgggaggaacaaataagggtaggaaaatcgaaaccgaggcagtggtccatggggagcgaagcagcagggtgtttgacggctacttaacggagcccaacaaaaaaatcctcttttgccttatcttcctcctcccaaacaaaatctctcctcttctcttctcttctcttctctgcggtcgtcttgtctccaggtatactctcccttgcttctctactttaggttttctccaatcgccaccaatttcatcatccctctcttcttcaatcattaaattggacttgggtttcttactttatcgcattgcttactccccctgattgtatctcctcctcctcgatctctctctcgggttttggtttgtcagatagaaacaaaagattggatatttcagacacaatcgatcaaagaataaactattcgtcgctctcttctcaatcagccgtaaaagtaagtactttgattcctgaatcagatgttgttacttcatttttttcaatttggacccttatgcataaatttcaattctttgcatcgcttgttacaatttttcacattggtttttctttttcttctctgtggacgactcagaatg

SEQ ID NO: 32507 - DNA, 3000 bp, Unknown
  misc_feature (1)..( 3000): 2750-1469P.txt file - cDNA_ID_3058036; gDNA_ID_1620301; Annot_ID_152622
gacacgaggtgattggctcatatcatggctattaaggttttgaagtagtgtgggaggacacactgagtttcaaagatgattaaagtgttcaagattagacttcaagcaaatgcacatgcttagtttggatatagaatatgggcttacgtatctatagatgggcttaagttgggtttcatgtgacggtctcatgtatggatatatatatatgaggcatgtttgccctaatgtgaatcagagagttttccctatcgttttcctcgtttataattgcatttttcatcgttactattcgttaaatattttaatttttttaattaaaatatctttgcagttatgtcttcttacaaagtgtcttttctccatatttatttgtattttccttatcacaattatttctttctaaaaattaaatattttacaaatatttgtgtcaatttaattgtttatatcttctgaactctatatactttgtttaccaaatattcaatcttctgacaattgtttttttaaagatgattgatggtccaagattaaacccgacccggacagtgaacccgactaccttctcgattattgggtcatcgggttaaccaggttggaccataagtcaattaattaaaatttatttaataaatttaatattaataagattttagagttcttataaattaaaaaataaaaataatcatgtttataaaatataaaatcagattatgtttaataaaatataaaatcatttataccaaaaaataataataaaaaaaataaataatatatatatatataatcaaacaataataataaagtgattaaattttttaaatccaactaaacgtctaataccataacaaatatagtagtagatcaccaatgacggaaataaactagtaaaacatcgtgaatttacacaactaatatcgggtgtctcactcaccattcgtttcatttttaaggcggcattgtaaagtcttcgtcaaaatgtaaaccataaaatgagtttacgaactgaaaagatttctaaaaatgattgaataaagtctaaaatctcatattatattccaaaataaagagaatattttaaaacccacacccgaccggttcaccggatcataggttaatagtgagtttttgtgggtttttttgattttgaacttgtcgggttttagcactaaacctaaatcagaaaaatgtttgggtcacggttcaaccggtcggaccgagtgtgaaaacactgaccactgggtttttctatttaaaaataagttgagagttttaaaatggataagtctaaacttgagggttttttcattaaaatttatttttctaaaataacaacaacaatttataatattcatcattttgagtttgatttattgtttgagaaatattgtataaacaaatttaaaatatttttcttcatgaaatcgcgagaaaagatatgtttgagttttattaataataaaaataatcagatcatgtttaacaaaatataaagtctaacaataataagaaagtgattaaaatttataaatctaactaaaacacggtaaaaaaatactaagatagtaggatagtgaatacgaagaacttaaaaaagttttgaaataattcaataatgaacagtgaatacactaaaactctatctttttgtccaaaatcaaatatatatatttttaaacgaatacccgaccagtttaccagatcacaagttagtgccaaatttttgtggatttttgcgctttttaaattgtcggatattaacagtaaactcaaacccgataaatatctgtaacactggttaaccagtaggattggacgtgcagattttttttttctttttttgaatgaatgaccaatgctgaagctttacggtttggttgcaaaccagagttgcagtccatctctcatggaggttgaacccatttgaagatatatatagaagccgattccgaactgtccggtcaatcacttgaattattaccgatgcagagatgggaagctcaccatgtcttcttcgatttctttccgtccaaattgaatggactgtcgctttaaatatacgtagcgtaaaatgaattgatgcgtcttcgagaactgagaagtggagacaatacttagcaaagcagagtaatccaaagtaaaatcttgcatgagaattcgcttggcaagatgttcccagatttgagccgagaatgtgcagctgaaaaacaaatgatcccttgtctcaaatggaacttgacaaaacacacatgttggattgagattcgatgaccaagagcacatttgatcacatgtcacgttgaagttggttttatgtttctaaaaataatgccaaacaataaatgctcgaaactgaagtccacctacaagttttacgagtaggtttgtcatatcataaaaaacaaaatctacgctgtcgatgagatgcaatcatgcaaggtcgttttaaaataatcgtttgtttgtggaagacgtactttaggtagtctttgaataattatttcacaactagtttatattttcacaaatttaatatttaatcttgcaaccagcagcctcatatataacaatataaatatacattttagaaaaatggccaaaacttgtatatatgaaaaaagccaagtccatcgctaaacttactgatcagcatagcagtctgttcatcttcagaggtcagctcttttctctttccctcataagcatgcttacttcttattcgcaccaatgttttaaccttaaataagatcttatcgaaatctattatttatgtgaacgtaatgagcatagttttagatatcctcttacagtagttccgtttctgcaattggtgatcttaaatattgtgttggttcttcgcttgacaatatgttttgtttttttaatattcccaatttaattaaggaacacatgtggatattgatgcagattattgtactaggaaacacaagaaccacttcatatccagctgaatattgataacatcagttcaagatg

SEQ ID NO: 32508 - DNA, 3000 bp, Unknown
  misc_feature (1)..( 3000): 2750-1469P.txt file - cDNA_ID_3058040; gDNA_ID_1620301; Annot_ID_152621
actaggcaaaaacgttgtaggctttgtcaagtttttgtactacaaaaacgctcgtgttgtcatcggagatgatcatggcaacaagaccctttcatctgatctcctagaggtcactgattcaatttccataatttaaagttctagatttctatcgtacttggtcaacttattatcattctcgatgtattttttttttcttgttttgcagttcttgttggatccgtttgaacatatcatatcagtggagggtacttatgatgatacatctggaggtataaccatgcttaggttcgagaccaacttacaaaaatctccatactttggatttggtacaacatcaaacttcttgcttcacaaggataatcaccagatcgttggattccatggaaaatccagtaacatgcttcatcaacttggggtccacgttatacccaacggttttaaatttatttaataacgttctcttactttttcttttaataagtcatgttttaatgacatcacatcttcaactatcacaatataattttcttctcctaacatttaagctctgatacttctcagcaagtgttgattttcttacccaaaatgcaaaaacacattgtcccaaattcgtcttacggtttggttccataatttacatttatgagctaaatctatatacacacatacatgtagaaattttggcaatgcgtgttatacatagagctgtcaattgggcaggacgtccatgggcttgcccagtccaaatgcatatgggcggcctatattccggactaaaaaaaaatggtctaattgggcatattaccagttttgtccatggacaatatgggcttgaccgtatgaacaatgggctgcccatgggcatgaattgagtcaatagacatgtcttcattttaatcatatttttataattttaattacaattacaactaaataattttcaaattatatattttacattataagtttctatttttatgaaaattttaaattttaataaattatttcttattaaattatttacggttttgaaggaaaaatagtattccacaattttttggaatacgcaaattttcgattacggttttgacgggaaaaatacaattctccgattttataattttgacggaaaaacgcaattctctaattttacggttttcacggaaaaacgcaattctctaattttacggttttggcgggaaaacgcaattccataatttttccgccaaaatcgtgattttattgtattggtaagaaaaacacaattttaccgttttgtcggaaaaatgcaagtctccgatttttacaatttttgcggaaaaatacaatttttgaatttttctttaaaatcatgatttttgatttatcaataataacaataataaaatgggctgatcattatggacatggtctttattgggcatggacattttcagaccattgtccattatggaccgtccaacttggcccataaaaaaaactgtctgtacggacacgcccaatgatctttggacggaccatttgacagctctatttatacagtaaaaagtaattttcgtacgtttctacttagaaaatttagtgttactgttttaatataattccaaacattgtttttttccatatttggaagcatcttctactttttagaccacatcaaccaactgcatttcagaatactgataacaagtggttagattgatagaaaaaaacaaaaataaaaaaaaacaattgcaagattgctcatttaatttttcaatcttggcgatggcaatttctcacataataataaacaaataaagtaataaactataaagagttggaaaaaaaaagcaatgtataatccatttctattttattaatccggcaggcgtaaattattgtctcgccccatgacataaccgatcaacaaagactaggaggtaatggtccatgagatatactttataaaatatgagtatatgactctgatttggtctaaaattgcatgataaaaaataattatatttttgttggcaaaaatcaaaattgttattgcgtatatttaaaaaagctatagaagttttaatatactttttagtcttattttttttaaacttttattgtgtaatatattgttaatgtttctaattaaaattattaagaaaaattctcgcaataaagcgtaaaaaacaaaaaaaatcgcaatgttttttttatatatatacaagatagaatatataacttttttgattttagtaaaaaaaatttgtaaaataaaaagttaaatgttttttaatatagaaacgacccctgttttaattggagtctaggtctaaaaaatctattctattatgtcgatagaaaaatgttcgggttgaaatattacttttgtttgttaagttttacgagtaggtttgtcatcataaaaaacaaagtctacgctgtcgatgagatgcaatcatgcaaggtcgtcttaaataatcgtttgtttgtggaagacgtacttttggtcgtctttgaataattatttaacaattagtttatattttcacaaatttaatatttaatcttgcaaccagcagcctcatatataataatatcaatatccatttttgaaaaatgaccaaaacttgtatatatgaaaaacacaagtccatcgctaaacttacggaagtctgttcatcttcagaggtcagcccttttctctctctcccataagcatgcttactctttattcgcactaatgttttaactttaaccttaagtgagatcttatcaaatctatcactgtaaacgtaatgagctatatatttaaagttgtagaaatttaaatatccctttatgttaactaatccatggtagtataatcaattggtttttcttccttctagtttagatattgtgttggttcttcccaacttaaggaacacatgcatgtggtactgatgcagattactgaataggaaaaacaatacaccttcatacccagctgaagattgatattagttcaagatg

SEQ ID NO: 32509 - DNA, 3003 bp, Unknown
  misc_feature (1)..( 3003): 2750-1469P.txt file - cDNA_ID_3058044; gDNA_ID_1620301; Annot_ID_152619
ccacccatatacacgaagacgattgagaacagaatgtatggtgcagtttggtaatatcacatgggaaagattagtgaaacttacagttcctccaactgtaggatctgctgtatgcagaaagctcatgaaatttccagagactcctccgagaatgtaaatgagacaaaacgtgaataatccatagtcacggcagacttttggtccaaaagtaagcagagcccaggagctaagggctacatgaggaattccagagtgctgcagatgtaaaatggaagtgtttcattgacgaaaaggggatattacatgaaaccaagtcatcaagagtgctaaatgtgacatgcaaaaagatgcaacggaatgaggaactaaagcaatatatacttatgatattaacaatgttgttgtcaggtatttaaaatctctagctgttttggtcaagtgtgtttttaaaacagtaaagaatgggaacacagacccaatttgttggtcttgtaccagaaacatgggtgtgaccagcctccaccattctccagcaaggattagatcatttatctttgctccatataacaaagggagtgataagagtcccatattgttgttcctaactggcgctgccgcctcaaacaagcagacaccaacattgatggatgctaatatgctcctgcaattttaatggagagaaatatatttctaagcatcaataagaagaacatgtgtggcattgcatctaaaacgaacaagaagtgattaagagtttttacacagcatagaagttcaatgtatcttctgcttgatcttcatcatcaaactgctggaaaggactattattgttttcaataccagtctttctcaatttgcttgctactgaaccgccttctgattttaccacgtccaaggtggacgagactaaacctttagattttgcatctgacaaacagcaaaataagtgaacattaacaagaggaaaaagccagaaaaatcaagcaacaagacaccaaaaacaagaatacctttttggagtttgtcaagataagcactcaaagaatccaactcttcattcacattgagttcagctttgcgatcaatatcatctcctgttgagatagaaggcttctcatcatcgttttgaagtttcccaaagtaagaatccaacagtttaagtctctgtttggtaatcttgttctctgatgacgctctaactaaacataaccttcttcttggtgaacgacaatacgggattgatttcatataactcttcatcctacaatccctgccaagcgtggttgcttcagccattgttctatgtttcagaccagacgaaaaacgtcttaaaccatttgaatcaaacaatacttctcctttacaagggacttcatggtgaagaggaaacagtgccatcttcaggtcctgtccatttcagagaaacatgtcatcatcaaatctcatcattcaccaccaaaccccaaagaagattatacaaaaacatgtgaatgattttgataaaaacacaaactttagagacgcacttaacaagttagtcctaagataatcaaagaagctatttgggattaaacccatttcacaaccgaaaagaacaaacagagatacgattcacgaaaagctttaaattaagtaatctcattgaggcatttaaccaaacaacaaaagggcataacgttttcaagaatccaataacgaaacgagtatcaaaatcacttctttgaagtgagacatttgtcttcttcctcaccgtttgcgtgagacttttcaatttacgaagtacagagacgagtatcaacacaattgggaagaagaattagaatttgagaaagtgataagattttacctttgaacgaagaaacctgatcctaatcttgaagattgaagatttgtggttgcgaggattaggaaaaattggagttcgaataacgaagcagtgacttgtgaaaattacgtttaggaacagaacataaagcgactaaggaaacaatattttttatttaatggttcaaatttcgtcgtgttggatattttattgttgacaaaacaaaagaagagatattttattcttgaacattactgactcacaagtacaactcaagaattgaccattttatttgctttttcttttctgtttttgatcaaattggtttgctttttctaatttaatgttctgatgaatatgaatagcataaatatttttttttgactaagggcttgactcgtttaaacgcagcggatacggttgttgttgcgagagtttgctttatccctgtgatttaatttataaacttcaaatctaccaatattttagtatgcaaaatgttattgtgcaacatacaataatatgatggtacgaaccttttgggaagtggatggaaaaaatacagactaacaataaatttaggatggtacgaagttgtatgctcaattacatattactagtgaaattttttaatctatattaatgcatattagtccgcaatagtgaatgatgaattaaatacggactgattcgatttcagtcagatttgcatcatactacacaactatttatattttagatttggttaaccaacttataaaaactttaaatactacacaaccatttgttttttagatttggttaaccaacttataaaaacttaatttatataatcttgttggtttttgttaattttcacatagttgtccaattgttcccacacatctcagtattgatatccatcttcttatcttcgttaaccacctaccaaatgtcacgtggacgctccatttcggtttctatccggattcgcggtggattctcctcccaccccaatcatcggttcatttcagcatttggttatatccaaattattttaaccggtttataccgaaactactcgaaccagacaatctttgattggtagaaagagagccacgtaggattatctcttctaatggcaaattaaccaaaaacgtaactgaagatcaaaagagaaagagagaaaaaagacgatg

SEQ ID NO: 32510 - DNA, 3003 bp, Unknown
  misc_feature (1)..( 3003): 2750-1469P.txt file - cDNA_ID_3058048; gDNA_ID_1620318; Annot_ID_153248
gggagactaatctccctcattctaccaaaaaattaagggaaatattttttcttaaatttgttgatatgataattatggtctacataatatcgtgttttaaatcaatatataataaatgttggttaaaacaagagcaataacataattttggtgaaatttcttgggaaggtaagaggaaaacttccttgatagcatggaagtatgtaaattaggaaatttcaacaaagccttacttgtgaaacaattcggccggatcgtacatttatcgaagctagttacttccttgtaaaaagttttttatgtagtgatggtggttgtagacctttgtatacttggaatagtgttctctattgatgagatctcttgaaaagtggcataataagcaatattggacaaatctactagggtttggcttgataaatggcttatggatgaacaaccaaggagacccactaagaaataaattttatttattattaaacttaaggttgctaatttgttgaatgagagaggtgttaatttctcccaaatgatgttaatcaagtcttattgatttatcttaattcaaacaagaaagatttttcgttttggcgattcaataaaactggagctgaaatcaaaattctttctagggatataaagagtttgttggattcatctcttgaaaaattctttaaaagcaaatcagggaactagacgaagattttagcggaagtagctcaaaaagcaaaagcatccatgaaaattgctatggtagatgaatcacgaaaagctgaaaaagctctgatcgctagtaaatagtaataatagattgagtctagttgatcagaagaaacttgcacaagttatcaaggtggtggtcgaaatggaggatgaactcgaggagaaggttcaaaaagtcgagaagataaacagaaaggtagatgagaagatgaagaagaaggcaaagaagagacatttttcgtttttggtttgttgaatgttgattcgtcttcagctatcatatcatgtcggtgttagacttaaaataagtgtttaccaataacttatacaagagaggttctacaccgtttaccaagagaatcaaagaatgcaaagtttgtaacttttgtttgtggtttaaaagaacaccacaatcattgttgaatgcataacatatttcaaccagataaggagttaaagaacttttatatggatctaatacttaaccactaatactaaaaattgatcttgaagcaacataggagatttgagtagttagaacatatctagcaaattctgatctattgtgaaaagaataactagagacggatgacttaatttctatatagcatttggagggtcataatgacttgtttttatttacgtgttttacgttattttgtttttgtcaaaaggctttcataaattagtaatactctataaataaataaacacaataaaatactctttcttatcgatttaggtatggccaatgtaaaaaactaaaaattaacaaaattttgaaacttctatacatttttatggttctagtaatattataaatttatacatatatagctaagataatattctaaatatgactataatattgtttgtaatttgaattattgttagcgttattctctaatgttacttattattcaaaaactcttcggtgttttcgatttgtatccaaattttatgataaattctaaacacgataattaatttacaaaaataaagtacttatttgagtacccttaaatttatgtttacttgacttcccagttcccagccagtataaatctttttcttatatttaaattaattaattaactttggatatagaattgaattattaggaaaatatatacatatcaatcaaaaatataatatttataagcttaatacaaacatagaaatatctatatctatatatatctagcttaattaattggatagtaaaagcttatctttgcatttttattattttaattaattacttgtatatatatattattttaaatacttattagcatattgacatttaagatacaaggtttaaatttcttttgttattttgaacagaagttttgttaatcagtaaaataaaattattgtaaataaaagaaaagattttgtgcaaaacaaactccaaagtcgtttatttttgtaactttatctttcacgtttaaaaatacaaaacaaaattatgaagtaaaaataatacgtaatgtagtcgattttacaactttacatctattgtaaacgttttcacgatcacatatatttgtttttaaaagttttaaagatatagttgaactcctcatctcaagggctttgatttgataaattatctatctaaattttaaaattatttatcaaaattttaaaatttgacaatagcaaaaaatttgacatatgtataatttttgatttagtattattattctgcattgttaagatgtaaaatgtaaagttgtaaaaagtaaatgattccgaggattttgtgtaaaaaaccttaaaatgttttagagtttcttgcactaaaaggataacttttactttttttccaaaccccaaagtctgatttacctgtgagttaacaacaattactactctctttgagtaaaaatcgcatgccaaaaagattatagaaaatataataccgaagaaaattccaaatatacaagcagtaaattaagttgattttgggaatagtctacaatcccatgtacacatctccactacattccatacaccttttttaatctaacggctcacaaacaataaaactctccgaataagtaatcaccacgtgatttatcttgacacaccaaagtttgtatagacgtgcatgtatgtaattaattaaccttttatgtactatgaattaactgtgttgatatataaagggtgactcaataccccaaaagcggtctctctctatactttgcttctctctctaaacttctctctttctttttttctcaaagcttttttccttctccctaaacgatg

SEQ ID NO: 32511 - DNA, 3003 bp, Unknown
  misc_feature (1)..( 3003): 2750-1469P.txt file - cDNA_ID_3058083; gDNA_ID_1620302; Annot_ID_152682
ccttcaaagttttatttaactctcttcattgtcaaatccttcatctttactactttttcaatatctccccattatgtataaatttaatgcatcaagtactacaactattccacatgtgcattgataaatcaacctcaaaatagaggtaaaagagagagagaaccacttttttgaaaggagtggaattgttctcgtatcacgagattacataaacgtgagtcgtccaaactactagattcgaataaaccaaccaaatcacaaattgtttcttttaaaataatgaaacatgatgtgaaaacacaactcgtagcctatttgatattgttttcgttcatgttttgtcgacgtagacccatatatcttagtaggttttgaaataaaccaaactgagccccaactaaagctactaaaccacggtcgatagaaccaaaccgacgtaaattcaaagctataaactcaaaccgaattataaaatatgaagttatgtttgattttgatatttttctcactgaatcaaacctaaacttaaaccaaaatggcgaaatctgaaaacccaatgtaaatgcagactccctatggtcgattaattttgttgttgcagaattctttagaagtatgatgtgacatcaccttgactaatgctaatgtcatcacttaatgtaaagaacgtactaatatttagcaacgattttaaaaataataagcatctcaatacttaagattatctcaagtaaaactaataatccaaagccatgatgattcatatgaagcccactgcccaccaaggcaagccaaatgtcgatctctctcgctaccagcaaccaccgcacttgcctcgtccatgtcacttccacaaccataaatttttttggtgccactcgaaataaaataaaaatataaaatttatcaaaatcattaacgatttaaagcaaaattctaactttaataagataaagctacaatccggagatggtgaaaaaactttaatccatattcacattgtaagtttttctatggaaaatcacttcttctttttttccacgcggtttcaaaggttaatcataaaaagagtagaagttaaaggaacttttttgtatctattatagtttgtttttatatgtattgtgaccacaaacacatatatctacatatttattttatatataaagagatagataatctaactgagaaatccacttgaagctattcaacaatttttatagctttcttcctctccaaaaccacaccaaaaaaaaaaaaaaaaaatttgattttcagatccaatcaaccagagatgagagataacaacaataacaacacaagagaagaagagagaagcagttcttcaaagcagcaacaaccacaagctcctatgtctttgaagatcatagattcatgtctcagactaagtgtggttcctctcagtgttgcaaccatctggttaactgtcactaaccacgaatccaacccggactacggcaatttagagtacaactccatcatgggtctcaagtaaacatatactctttactttctttcaactttttagtaagtattttataattattaattaattagttataatttgtaggtatatggttggtgtgagtgccatatctgctatttatgctctgctctctactgtttcttcatgggtcacatgtttagtctccaaagcttggctcttctttattcctgaccaggttttttaaaattatcttctcaatcatttatcaaatatctagtatgcaatttcttatgttagttaataatgtttttatatttttttgggtgtatgaaggttttagcttatgtgatgacaacatcagtagcaggagcaacagagatagtgtatctacttaacaaaggagacaaaatagtgacatggagtgaaatgtgttcttcttatccacattattgttcaaaactcacaattgctttgggacttcatgtctttgttcttttctttttcttatttctctctgtcatttctgcttatagagcttttagtccctttgatcctccttgtgattctcaaaccaataatgatgcttaaattagtcagttttggattcaactttatcaaaatgttgcagcagtttatggtgttttaactttcttctcaaaatattacaaaatatttttttttatgccgccaactgttgttgtaggcaccatactcctacaaagaacaagcgggttaggcagccgtttagaaataccaatttattttatgttttttaaggctaccaaattattattttactttttaatgttaatatataggtgtatcttaaaatttttgtttaataaattttttaacacaaattttgcatgattttaaactaattttgaataagggatagaaagagcgctacaaaaaaaatcttgactcggaccatcatttttgttggaccggcacatcctgtagatgtataaataacttattttgcggaaaaaaatagatgtttacatgattttacctaaatactaccatttatgtaaatctataaatatcagtttatagcaagttataaatccttacatggattaacaggtgtacaaaattttacaaaataataaatacaaaagcattgaaatagtgtttttaaccaaaagaaaaaaaagatactgtaatctatagaaagaatcaaagtgaagttgcagaaataaagaccaaatcaaatgaataatttattaaattgataaggtggcaaccaacaaatatattgcacttaatatagtaaaaaatcatacattgctgtcagtgagtagtaaaccaagtagtcacccatatataaatttcttgaaaatatgaaactcctaatcctacatgacttaaaccttttttagataatttcattatcaaatggctattctttcaattcacccttatatctttgcacaacaatagagagagaaaaagaagttcaaaaaaaacataagatctaattaagagaggtttttggtctagttcctctggttcataccacaccaaccatg

SEQ ID NO: 32512 - DNA, 3000 bp, Unknown
  misc_feature (1)..( 3000): 2750-1469P.txt file - cDNA_ID_3058091; gDNA_ID_1620302; Annot_ID_152675
aatgggcctacacggatatgagagttgcgcgtccattatacgcaaagaaaatagataattattctctgcgtctcacaccagttattctaaacgtgaaaccttccccacttggtcactaattcgaacttatccatccacgtgtctagaaaataatagatctacggctaagatttagccgccataaaaagaagatctatggtaaaaaaaaaaggtctataaatacaaaaccttccttaagctttcttcttcatcaattgaattaacaaaaactccaaagactccatcgaacaaaaccttcaggtacgatttgttctttcttttgtagatttgatcgtttcgttgtttgttgttctctgtttgattgattgctctctagttttaattcgatttagggttttgaagctttctctttgttcgttgtttcgttttcgaatcggattggtatgattttgcgttctgtttttcttatcttatggttttgatgtgtgatttggatataatctctgcataaactatcgaatctcatattaaagcgaattgatttacttgattgttatggttttgagaagtttgatctaaattttggattgtctcctctcaaatcattttattggtcagctttagggtttggattgagattgaattcgaatatatccatgatccagtaattgatctatatagggacttttcgtatgttataatctagttatatgttgaacatcatgatgacatgatctatttggttaagtcatgctctgttcttgattaattgttgttgataaagactagatttgtttattgttgattggagtctaaaacttgggttttctcaatttgttttgcagagagaatcaaacagcttaagggcagtttcttagttaaaagtaaccaagtttacatggttgagctagacattcagattccatcagcatacgatccatttgcagaagctaaagattcagatgcaccaggagctaaagagaacattcacattcgaatccagcagaggaatgggaaaaagagcttgacgactgttcaagggcttaagaaagagtacagctacgagaggattctcaaggatttgaagaaagatttctgctgcaacggtaacgttgtgcaggacaaagaactaggcaagatcatccagcttcaaggtgatcaaaggaagaaagtgtctcagttcttggtccaaactgggattgctaagaaggatcagatcaagatccacggtttctaaactgaacccgaattggatcgtttgatatatctatactatttatgcgaataattggtgtggtgtggtgtgtttgtgaccattacaagtttttaaagctttggttttgttattgacttttgcaatgataagaaatatttcgattgttctaatttctgaagctcttcctttgattacttgcaaaagaaggaaataagattcctgaaacgaaatagaatggttagaaaaagctgataatttgatggatcaagggatgagataagaagctagagcattcaatcaaatgtactttgagaaattgaatgtcgtccactatatttggaataaatctgaaatatgattttgtttattgtatggttggaaatgtatgaaagtaacgaacgtatcagagaacagataaacaataattttgcaattagactcagaatatttatcaaccaatctcaagttaaaccgaaatttgtatatataccaatactaagttagtacatttttctagttacccaactttttttctttgcaaaaattaagtccaaggttgaatgggctttaaagtagtatctttgggctaatccaaaagaagaaggattacattacttcgctaatggcctgataaatcaaagatctttgcatagcagacacgtggttttcacgtgacctctaaaaaagaagaagtaactgatcacagaagcataataaaaaagcaagaaggaaatatctttaagcaaagatattatctaaaagcccaaacaaaaacaaaccattaatttaacaaaacagagaaagtgttataaccaaacaaatccacaattttttttgctgtaattaaaatatttttggccctctcaaatgtttttgtcttttttcgcattagccctttattgactcgttgttaaatgccacaagaagaaagctgaagaaagggagacgaaaaattcgcaggtctgtgttttttctctctgtcttctatgtctctgtgttttacaccgaaattgacggaaaaagtttaaagcttttgtttcctgtgtcgtgctttgttttggttattttgggtaataatactgtgtgtttcttcactcgattttttttttgaaatccgagattttttgttttttctggggttgtctatgtgatttgattctagggctactgagagattgctaattttgtttcttgtgtgtgttgattagtggtttgattttgagttaatttgtaattaggagtcttgattttaagggtttagaaatggttgcatgttcttttggattactggatcttatctgctttaatcccaggtttttagtagaaatgtgaataaaattacagtttcattattcagtttttttcttggattgtgaaagttatttgtaaaaaaaaaaagtttacatttttgaaacttgttttggttttggttaaagattttgtttatagaacatctgagatttttaacttctcgttactgtgatgatctttggtgttgtactgtcaattgtgtgtattgacgattttcacctgtgttttatatttactgtctcagaggaactatagccaacactagtcactgcaatatcgagcttggagaaatggagaaggaaagccatgaggagaacaaccacactatctcaggtgatttaacggcaaaacggaaacgaggtcgtccgaggaaacaattgaagctggaatcgaatgagcactctcttggtcattctccaagttttagcaggagtcagcagcagtctcgccagaggaatgacgatgaagctatg

SEQ ID NO: 32513 - DNA, 3003 bp, Unknown
  misc_feature (1)..( 3003): 2750-1469P.txt file - cDNA_ID_3058099; gDNA_ID_1620302; Annot_ID_152672
aatgtggtgcttgttgatcatggaagcttggaaattgctgaaagtttgaatctttctcaacatttgagtgaaatttcttatcgggattcgcgggttagggataagataggttcttatgaagaagatttgataaaaatctgtatgaagaaacatggtgtcatcagcaatgtctcacactctttgatgcttgaaaccaatgtgaaggttcttagttttgatcatatattggcttctcctgcagccatggatgtcttggcaaaaggttttatggtaacaaagttttcagaaggaaagcaagagtttgagctcgaggttcctcctggatcagctttgttgttcccgagcgaagaatcggtaaagatcaattatcttaaagagaaagaagagttaaaagtaaggaatctgattgttcttgatgggacttggtcgaaggctagaagaatataccttgagaatccatggctaaagcttttacgttgccatgtgaagctagaaatagaaggtacaagtttatacaaagaagtacgacggcagccaagagcgggatgtttatccacgatagagagtattgtatacgcgatgaaggagatcggtgaagatcctgaaggtttagataatatgttgaatgtttttgaatccatggttgaagatcaacgaagatgtaaagatgagaactttaacaagattatctgaaagacaaaattactctgctgttgtaacttgtaagctgaatgaattagattcttcaattttgataattatgccgaaagttggagtcgtttttggcaatttattaaaacaattgaagatataaatgttggggtgtgaacaagaaaaattcatagttctgggccaatatgtaaattaggaaatataagttttgttgagtaagacttttgttaattttgaactcagagtgtgttttcgtttccgaatgctttcaattcgcagaagcttaactctagcaaaagagccaaaagatttgtttttgtttttgtgtaatctccgagctcgatgtgtatctacagatgactatgatccaccattttcgcctctctctaaacccactaaacctccaaaagagaagaagaagcagaagacgaagaagcaagaccagtcgtcggagctggtaaatgacctgaagattccagtgatttcagacctccctttcgattttaggtattcgtattcagaaactaacccggaaattgaaccgattggattccgtgaaccgaaacggttctctccatttggaccgggtcgattggaccggaaatggactgggactaccgcactggcgtcgccggagattgatcagagtcaatgggtggaggagagagcaagagttctcggcgagactttgacagaggatgaagttacagagcttattgaacggtatcggcatagtgactgtacacgacagattaatctcggtacaattttgaatcttttgcctaagttttttagctttgaaattagtttgcttgatcaaatcgaatcgtcttcaaagttaagagctttcgtcatcgttgatgttgcagattcactagtggtagaaacttctttgtgttgacatcacttgtagatttgtggtcttgatgatgatcatgttgtgatataatcaaattatgtgattggtctcttcttataaactttgtgatgttatcagggaaaggtggtgtgactcacaatatgatagatgatattcataaccattggaagaaagctgaggcagtgaggatcaaatgcttgggagtaccaactcttgacatggacaacatatgtttccacctcgaggtgtctattattagatctccagaacacggctctgtttttctttcggttgatcttactatagttgtgttcttgataggaaaaatccggtggaaagattgtatacagaaacataaacattctagttttgtaccggggaaggaattatgatccgaagagtcgtcccatcattccactcatgttatggaagcctcatccgccaatatacccaagacttgtaaagaatgtggctgatgggttagaatttgaagagaccaaggagatgagaaatcgtgggcttcattctcctgccttaatgaaacttagtaagtagtatatacatcgtcaagttctttgtcatttttctagtatttcctcgtttttgattggcggattgtattgtgattcagctaggaatggtgtttatgttaatgtcgttggaagagtgagggaagagtttgaaacagaagagattgtgagactagattgcactcatgttgggatgagtgactgcaaacgaattggtgtgaaactaaaggtataataaactgtaaatggtttgcttgtcttatattgtctgtcagattctctagaattgatctatcttgatgctgtgatcaaaattgcaggagatggttccatgtgttcccatattgttcaaagatgagcagatcatactctggagagggaagaggactggtgaagaagagcttgttactctatgaatctttgatctagaatcatgatcatgtgagtgatgtgacctgaacaaatccaactgtagaccaaaacttcttcatcgatacaacagatactaaagtttcacatgtctcagaagtagtcatagatacaacaatcttggttgatttgtatattcgattatgtacttcggtttgatttattgaactaaaattggatcagtccaaaattgttctttatgaaattgactaattttattttatttttttgattaagttcataatttgatttttagagtaatccaatttactgttctgttgtcatcattcttaccttagaacactaaccatgttcaattactcaatatcatggcccggttcaaaaccaaaccggtcaatggtagaacaactaatgggctgatataaaaattgggcctataaaaaagcctacaactgtatatcataactataaaaatgctttattttcgaagcgaaagtttaggttttggtttttttgtccgtcgtagtgatg

SEQ ID NO: 32514 - DNA, 3003 bp, Unknown
  misc_feature (1)..( 3003): 2750-1469P.txt file - cDNA_ID_3058107; gDNA_ID_1620302; Annot_ID_152667
atcaaatctaaatgaataagtaacttttttataccaaaaagtagaaaaccaaacaaatgcaccactggcttccaaattggggtatatgcgaaacgatttagtagcttaagtttctaacttagcaaatttgaagcagaaaagaggaactgagagttccatgataaaaccaattgtgaaatgagtcatttcaaatgagagctgagaattagatgttgcaaagctcttcacaagcacaatctagaggaacaaaccaattgtgtactgcatcatcataactaaagtctttggcgttcactttcaagccatatccagcgtataaatgtaaaagaaaagaaaaaatcaaatcaaagcaccaagatcaaactctaaccatacttataagctgagaaagaaaaacatcaaagctagttatagatactagacatgacacatttgaataagtgcttaaagcacatcattatcataccactggttctcttaactaatatcaaatgtttggtattacgtgtatctatcagattgattgaaatagaaggttgaaacataaagcaaggtaatgtctctcagaaacgattccacgttattatcaaaatcaatctctatcaatcaaaagcaagaggcaatcacaacaaaaggaggaaaagaaaacctacgcactagtgatttgaagtaaaacaaacatgagaacgacatttttgtgattctaatccttgaccagtcacattcaacagcgaagaaacaagtcccagaaaaaataggccaaattcacataaagaacaaacacaaattcccttaattaaaaagcaacctagctaataatctcgatagatcaccaaaccatggattcgcacaaagaaagcttaccgatttataatggatcaagtgatcagaagaaagctaaacccttttcaaatttcaaaacttttagaactccaccatgtaattgatctaattggattaaggaacagcattgaacatttaggtctacaagaggggaaaataaaaatcaaaactttggtcttttgattggttttgaaatctgagtttccttgttggggcgtgatgaattaagcagcgactagtcaacgttccttgtttacagtgtagagtagattgctccaatcatttttattggactcggaggtaataatgtttcactttttttacgaacaggaagaaaaatatgcaaattatactgaaagccctaaacttttgagtttatcacatttttaacctaaagttatcagttgtatcaaaatgatgtagttatattgaaactctcttcaccagttagaggctttaaagacttgccgacaaaatgtagaagtaggtgtatatctccggccatttcagtaactagttctgttcttggatgtcgtgtgttttgtctaagggagaagcgagaagagattaaaagattagaccttttcgcattcatggattcgaagttgagaaattttgtgatgggtctgtttgtgatgactgcgatcttgaataattctggtgttggcgcgtggactggagagattcgtggtagagttgtgtgtgatgtctgtgctgattcttcaattggaccagaagatcatgttcttgaaggttagtatctctgtccctcttctttatgtcttctctttagtcagttttagatgttcgattgctgggaagaagaacaattgtctgattttgagaaattctttggatttaactgtgtagaactctggattcacttttaagtagtgcttcttcagaaagagtgttgctttgctaatgttctgatggatttcttcagagtgattactgttcaattcagtagtagttgtttctcactcatcaaattggtgtgaatttcttcagagtagtttattagcccgaagcttgttggtactgtttgttcttatttcttgagcaaatggtgcatatcttggtgagtgtgtgtctacagtttttgcagattcttatttttcttttttaataacataaatcaaagttagaggggattttgtttagtatcatctctggtctctctgcgacataaaaatctgttatgttcattttccttatgtttttagctgcgcttttgtatatatcctatagtgtcaaatgttttttgcagattatgttatacttctatgcgaaatcttttcaagttttctgattcatatttggttctctgaattccatgaatcaaatttaggagagcttatggcttggatcatctcttgtctctccggaacttagtaattagtttgttcatccttgtgtttccagctagttttatgtattatccgatagtgttaatgatttttccacactgcttcatattccaaatagtcttgttgataactcaaaaccgggattgcttagaagccactcggttttatgtgtttaccattctgctagtgaaatgatctctttggcacttttaaccgtgttatgtgatccagtcacttcatatcattgacgtatcaatcacatttgcgagctgttattgttcaatctttacaggagctgaggttgcggttctgtgcataaccaaatctggagaagttgtgaactaccaagctttcacaaactcaaaaggtgtctacacagttgcagagacaatgccagagagcgaacgttgggacgcttgccttgcaagacccatcagcagcttccacacaccttgcaatcgcctacaccaaaccaataccggaatcaaattcacttataaccgcccttccggtttctttcatgccgtgaaaccatttgtgtatcgacctcaatatgcaccttcttattgctgattcaaagacaccttgtaaaagtccttgtaagttgtaatactaactagtttggatttgtgaaatgctaatatggatcaagcttaaagtgttttgatgtaaggataagagaagtttgtttatataaaagtctttagtcaaaagtcaaagggagactagtctcacaaggcggtgacgggggaggtaaagaacaattaattttgaatgggtcctacagatg

SEQ ID NO: 32515 - DNA, 3003 bp, Unknown
  misc_feature (1)..( 3003): 2750-1469P.txt file - cDNA_ID_3058122; gDNA_ID_1620302; Annot_ID_152657
ttaaaataatcaaatacaggtcaatgctttgtatatttacaattattattttttattttttttggggtcacatatcatttttctttttttaacaactggggtctacatatcatacggttagaggtattaacgtagctcaccggtctcgtgaaaaaagaaaatagctttcactatcactctttccgcgattagtaatcgtaaatttttttgttttaagtacccaaacttacaaaattacctccttttctcttaagacactgagttcttgaggatatactttgtacataatgtaaatctcatatgtttttattttctctaagtcttctgaattaggccaaaaaaaaaagagaaacttagaaattccaaatcgacacgtatagcaatataccgccccgggaaaatgaaatgcacatgctgatgctatgacatattgacatgcgcatgtgagtcaccaaagattctcaagttgttaagctaaatatgattatgagagcggttaaggccaatgattaggaattaggatgctaagccgtatccaacagaaacaaatctttaatatttagctgtttcctaataattgtctatcttttgtccttttactcttgaaaatggttaattatgatactacttcatacgtattttagatataatattgttaatttacgattacaaaagtgttgaaaaaggactagtttaatggttttttctcataatattcttgttagtgatatataaaagttgttgtattagaacaatttgtatcaagaaattattaaatttataagttaaattctctcttatatgaagcaattatttccgacaagacatgcatatgatgctccaacctagaacgaaagctcataattaactgcggttaaatcataacacgtactctagtatattaaacaagaattgacatgtagcttttaggaagtataattacaatcatgtacacagtactaatgtatattgaattttctacagtgttttttttcgggttaagagaatcaaactgtattagactctgaaatggttgatgcagaacaaaaaacaaatttgtgggcttaatgggcttcgaccgggcaagttatatataacatgtaccgacaattgagttgagttcaattgtagcatgtacactaaacacattcgaaacttgattctgcccatatttaaataaaatgtatatacaataataagtagcatgtaatatatagataaaatctactctatataaaaaataaagtttttttggaagagatttttttatatacttaattacatgccatgaaattaaaatattttggtaaagagaaaattatttaaaattatttacatcaaaatttacatttattaatttcatactacaagccttaagatagctcataacttcatatcataaacctacagtaattcaacaaaataaacttttcatagtaacaaactaggtaaaaattaactttatggtaacaaatgatttcataatccattgatatcaattgtcttaattacattccaagataatcaaaaataaattatttacgaatcagttgatcaatgataaaaacatctaataatatgatatatgttttaaaaacgcttaaaaatcatgttatttattatataacacataaaatcaaaacttactcaattcagaatttgtacacaaaaccacattatttttacaaataaacctctagaagttgacaatttagcacaaatactaaatcaatagtgttggtctctcccaatatatacgcgcatatatacacttatatactccttagttcttatataattctctttctctctataaagtataaacaattgcgaaacctaaattacttaaaatctctctctcatttgaattcttcttagtgtttagattccaggtcaaactgtgatccatcatctttgctgctagactaaatttttttctctgatcgagttaaaaagttttggactttctaattttttaattcgacgaaaaaacctctccaacaatggttttatcggcgaagcaaaccccctctttgaagatatacatacagtaataagtagcatgtaatatatagataaaaccacactatatatcaaaaataaatatatttttggaagttttttttatatacttaattacatgccatgaaagtaaaatattcacgctaaagagaaaattgtttaaaattatttacgtcaaattacatttattaattccctactataagccttaatatagttcataacttcatatcataacctatattaattcagcaaaacaaaccttttatagtaacaaactaggtaaaaattaaatttatggtaacaaatgatttcatagtcaattgatatcaattgtcttaattacatttcaagataatcaaaaataatttatttatgaatcagttgatcaatgataaaaacatttactaattaatatgatatatcatatatgttttaaaaacactacaaaatcaaaactgactcaattcataatttgtacacaaaaccacattacttttacaaataaacctctaaaagttggcaatttagtacatatactttttgttttttctaataacattttcttttctaaaacataaaaccaaaaataccaactgaaagtaaaccaaaacctatttgcaagtacataattctttaacaaaaagtaccgaatttgttttattttgtcaacaagcttaacgaattaaaaaataaattaatagtgttgttctctcccagtatatacgcgcatatatacacacttatatactcaaaagtttttatataaatttttttctctctataaaatataaaccattgtaaaacctaaattacttaaaaagatctctctcatttgaattcttcttattgtttagattccaggtcaaactgtgatccattatctttgctactaaactaagttcttttctctgatcgaatcaaaaagttttcaactttctaaatttttttagttctaaggaaaaaacctctccgagaatg

SEQ ID NO: 32516 - DNA, 3000 bp, Unknown; identical to SEQ ID NO: 640
  misc_feature (1)..( 3000): 2750-1469P.txt file - cDNA_ID_3058128; gDNA_ID_1620302; Annot_ID_152654

SEQ ID NO: 32517 - DNA, 2846 bp, Unknown; identical to SEQ ID NO: 642
  misc_feature (1)..( 2846): 2750-1469P.txt file - cDNA_ID_3058132; gDNA_ID_1620302; Annot_ID_152652

SEQ ID NO: 32518 - DNA, 1085 bp, Unknown; identical to SEQ ID NO: 630
  misc_feature (1)..( 1085): 2750-1469P.txt file - cDNA_ID_3058135; gDNA_ID_1620302; Annot_ID_152651

SEQ ID NO: 32519 - DNA, 3003 bp, Unknown
  misc_feature (1)..( 3003): 2750-1469P.txt file - cDNA_ID_3058173; gDNA_ID_1620303; Annot_ID_152712
agagtgatccgtaaggacgacgaaaacttctttcaatttttaaagtatttctatatcattttggtaaattccaccaaaaattcacaactcttataaatcattttgttgttgctccatttattgttttgtatcaatcaagtatttggatgttttataactacaacctagaactaatatctacacaactaatttacaactacaacgctaacaaaacagattcataagtacaactgtgagacagatttagtagaggtttgattcttaataatctaaaataaatgtgatattgtaattttgaaggatgatgtgtacaatgaatataatgatccatattctaaaacatattcaaataagtttattctaaatactttgtacatatatttaccttggtacgatgcatgaggaggagggagtttccatctttatccatgaggatgagttcctcgggtcgggttcgggcataattatcgacccggtaaatcaaatctccattcgaatctatcaccgtgaatccttcacaactcaccagaagcgattttctccacaccgtgagtgtcgtacacgctcctccaatatctgcggcagcgacggagactgtggactctgtagatgacggtgcatcttcaccgtggaccgacctcgaccgttgcttcaagaaagggaacatttttgtagttttggtgttcttggttaactattttaagagagttttacagatctaattaatctcaattctcaatacaaatatggtaaggttaggtatacatatgagatatatatatatagatctaatatatatgtgtgtggatgaaagatattagctttgttatattatatcattgtcttattatattataatttttttcttctttatatcaacttgcaaagtttttaaatatcgctacttgatatttaaatgcgaccacaaataatacttagtgacaaaactgtactattctacaaaatataaaaataagaatttcacctaaaaagctttaaacgttttattaattatgagtcaaaatttttagtgttatttgaaaaataatacaatatgataagatattataccattctataagttaattagaattttttttaagttaatgaatacaggtcattagatttttttttatcacattacaaatacaaatttaacgtacgtaacatttacatttagtggactagaactcaaatcaccctattacagcttgcatatatagtaaattgtttttgttttataagtccaaaaggattagtctaaattacattgtttggttatcaaagaaattaaaataaaaaattagataaaattaatcgaaaatgaaaacttaacatgaaggttgaaatctccaaattatttactcatcctttttaccaaactcaaatatgatatttttttctatacgtaaaactcaaaattgtatatacaagaaatttagctatctaaaaataactatataataagccattatagtaagccacaattttgaccatctacgatcttttcttttgtacgtagtaaggtttggtgcaaacttttgcaagtaattagtatatagctcttatggatatggtatattcctgatatgaactctgattgggtaatgattagcacttagcaaggtagtcagatttttggctttggcacgcatgggtttcactgtttcaggattgaattggaatttttttttgattaattaatgtataatattttatacaatataaaaatatattactgtattaggtaagaactttacgacaaaaaaaaaaaaataggtaagaactttaagattatgcaagggtcttaaaacgagccacgtaatcttcttagacccacgatagtagatttttgaggtctccaagaatctcttatcctttttgtcatcgaatctctctctctttctgaagatatattaagaaacaaatctctctttttcttcgaaaaggttggttaggtgaaggacaattctcatccacacgattagatgcataaaattatatatataagaagaaaatctaattatatgaaatggtggaatttcatgtcacactagacgacgaatcttccatattaaactcacttctaacactgcatgtgtatgtaattatgtatatgaatgaatatccaaatagaataatatatttggactaatcaaattattggaaaagtacataaataaataagtgagctttcattgtcaaacctgattttgttgatctctgggtttgccattactccaaaaaatcttaccttcaagagtgatgtcgacacagtggagcacacgtgttgtaacacgtgtcatgactcagctcaaaattggatcccacggaagaagttagatctcgaggccaagagaccagagtcatcaattcaaaccccacgtgcgtgagagtcactgactattctcctcttatcttccgggtcttcgaaatccaatatctccaaaacgcagcgtcttggttaatttttgagatgtcaatatatataatctgtgaccttgtaatgtttaatcaacaggtgtatgatcatctttcatctaggagcattttcattctatcaacatattctcataacaattttactatgcctaacaattttttatttttactatgaaatggatcagtaataaatgggccttaatactgtaccaacaatcccataaatgggcccaatgctggatcctatccgccgacatctaacgttccactaacggagacgttatcgggaatattcacattaattaacgaccgttagttccacgccaaatatgttacatctgctacaaaataaatagtttgattttccaccgtggacggttacctactcgaggcccagacccgaatcaaacggactggattaaatgttttaaatcaaggggtgggattaaatctgaagcacacgcttttattcgtcacagtctcctcccacactcttcaatcagtaaagagttttaggtttttttttcttcttctcggaggtttgtagaatcaacaaaaatg

SEQ ID NO: 32520 - DNA, 3000 bp, Unknown; identical to SEQ ID NO: 643
  misc_feature (1)..( 3000): 2750-1469P.txt file - cDNA_ID_3058193; gDNA_ID_1620303; Annot_ID_152701

SEQ ID NO: 32521 - DNA, 3003 bp, Unknown
  misc_feature (1)..( 3003): 2750-1469P.txt file - cDNA_ID_3058227; gDNA_ID_1620304; Annot_ID_152767
agcacatcttacaggccctctggaaccaagagtttccatatgtgcagcgatcgcacaaccagtaaggaccaccatagttgtcgtacgactccgcctgtacctcgggcaaaccttctcgtaaagtcttgatgaaatgataaaagaagttcccaatgttggttgtctcgctcaatagcttaccgcaagtaagctctttggcttctgtttcctcctttatactctgtgagaaactatggacaatgccagacgcgttttgttggaggaatcgcaggtactctctcttcgccatatcatactctgtgtggatatagtcgtacgcacagctccatttgaggaactgtctgcactgaacaatgagcatcagtccttcccttagtaccttaacgtcttgctccttcaagtcactaggtttcttgattatggattcctcgaaagcttctagctcgtatttagcgttcaccagattcacttgactcgcattccagagatccaaacacgaaatccccggttttgctctgttccaatgattgaaaccaacattgctcgaacgcgccggtgccaaacaggatcctgaggttccgtgagtttccggtgaccgaaaacacttccaacagaaacgaccgctgaatcaagaaaacacacaaattagtatgatcaaataattaagatagagaaatctaataatctgcgaatagcaaaaaacagtgttattttcataagagtgaaacctgcagacacaagtcaagaactgggcccatggtcgttcaccatcaatctccacaggaataaagcaatgagggcaaggcttggtattggcatcaatccaggagacggtcgatggcttgtctacttcttctatcaatttctccaagtctctagacaaccaatcagaagcgttgttgcaggtcactggtctgtgtgactcaagcatgcatctccaacagaagatatgaccacagagacacacaatgtttaagctatgctcttcatcttcacttgccagatgaaactcaatcacgtaattgcaaccccgtgcaggacacagtttgagcttccatcccaggtatttctcacggtaagatttcagaatatacaactcgtacatcgcttgatcacgtacggttagcttctcaaccgtctccggtccaacagcagctcgacaatctcgatcaggacaagagattgcagtgtggtttttctccacagagaagaaatttttcttaagatacttgctccaacaagctttgcagaacttgtgagaacaaaaaggcgtggagatcaaatcaccatcaacaacaacagcatcaccatcataatcgtcatcaccaatattagagcagatcccacaatatacacgagataaatcttgattcgaatcaataacaactggtttcaaacctgattcagtcattagtttctccatgtcttcacccaaacgctccaaaacccgattcgagtcccatcggaatcaagattgactccgaaggtaaacagaggaaagctttaacagacgagagttttcttgtatctactgttctagggttttccttttttttttgctttggagatatcgattgcttctctacaaattgtttttttaatcattattaattggaccctaatcattctaaatatttgtgatttatataagattacaacagccaattatggtttacattgattttttttttaaaaagcctataaatagtttttttttattaactcaacattatgattctttattatttatcaatttaataacaaaagttgacaaacaaaaataaatctaaaaaaaaagatctgtactaaatgtgattaaacttgttaagaaatgttactgaaagcaaaaggcaaaccaaatctaaagtcaataaagaaaatatccacctccatgattcaataagccccctaaatggctaaatcaatcaaaaataggaaacaaacatagacccaaaagtatatttaagtaatatatttgactttcagctaattttattatctttggtcaaaaaaaaataaaaaaaaattttgtttatgttttgacttggtgaacactaaatctagtgcatgtggttaccaactcacaaactaataagcaatgcgattggttctttatcatgcaagtgacgtcacaagagttgagtgaagggtataatagtaaaatcagtaagaagaggcaacgccgacgaacccgtggcccgcacgtcgtgagaagagaagagagtctgtgtgagcagaacagagcgaggaaaggcgcgtttgttgcgttttggccccaaaggccaaagcccgccttttgcttttcacctttcgttataaaaagcgtttcctctccttctctttccatttctctctctctcctctctcgctcgctggcttcgaggagaaaaaagaaaaattggagaaataatttaactggttctcggagaatctagggttctttttagccacgccttgctgatctccttcgtgaattcgattccgattctcacctggtacggttttttatatttactcttggttagaattcgcgtcagatctggaatttttgtcatactttttttttctttcgatatcgattcctatgatgacctcttctgtgtcatatttttgtgcattaggcttgatttgtgtgttgttgtttcgccgaattgcttgatctcgtttagttttggtggtcttagacgatttgtggcttagactgtccaatgtggaattgaacagagtttgatgtctagctttagaaatacagtaatctcctaattgttcaggatttggtttaggaattatgagattgtgctatctctggcacgatagaaagggaaaaaactaggtcactagctttgttgaagcggaattgttgagccattattgaatctgtgattattgaggttatctcttcttacggagacttatctggcaggtcttttgtggcctaaagctcataagtttatgctagtgcaagaagttatataggaatgacatattagatttacaatgatg

SEQ ID NO: 32522 - DNA, 3000 bp, Unknown; identical to SEQ ID NO: 659
  misc_feature (1)..( 3000): 2750-1469P.txt file - cDNA_ID_3058231; gDNA_ID_1620304; Annot_ID_152766

SEQ ID NO: 32523 - DNA, 3000 bp, Unknown; identical to SEQ ID NO: 656
  misc_feature (1)..( 3000): 2750-1469P.txt file - cDNA_ID_3058245; gDNA_ID_1620304; Annot_ID_152758

SEQ ID NO: 32524 - DNA, 3003 bp, Unknown
  misc_feature (1)..( 3003): 2750-1469P.txt file - cDNA_ID_3058252; gDNA_ID_1620304; Annot_ID_152756
ataaatgagcttctcttacgagaatatatatatgtaagaatatacatttttagttaattcaaaatttcattcgattatttgtttgaacccaaggtgcacatatgttcccgtaagccgatagtcataacatttgaagcattaacacatttctatgggggaaaaacgttcaatcaaccacataattgtaaacaactaacatttatacaaacgatcgtctgaaaaaaattgattcatataaaatctgataactttagtttatagtatacacactgttttgaaatttgcggatttagattgattcaagttcaaaaaatttgaaaatgtccaaagtcaacatttgaccaagaagtcgagtgttgtttttaatattgatggctaatatgattttaaagcccatacataaaagcccaaatacggcccaataaaggaaaagactcctctgggaagaagaactaaaaaagaaactgggattttggaagaagtggtcgagagaaaacaaacgataatgggaagcgcaccagctcagattccgactagcttcggccatgagcttagggcttgtcttcgttgccgactcgtcaagacctatgaccaggtttttctttactcttctttcactgtttcttccttcttttagggttttggtgtttgatttgcctttctataagctgggtttttttttttttttggttcaaacagtttagagacgctggttgcgagaattgtcctttcttcaagatggaagaggatcatgagcgtatcgtggaggtcactacccctaatttcaatgggtatgtatttcatcaattctaaacctttactttaggcttctttggtaggaaagtctttgcgttgatgggtactgtttcaaattacttcttttagggtttcataagatttacttagctgtatagtaatggaaagttctcaactttagagtgattttgcgtcaggatgcttcgtggtttctaagatctctttgaacttggattctttgttggattagtgatttagcttttaagagtaatttttagaaagttcagtgttagagcttattagtgggtttgtgttctttttgttagttgatatcttgatattcctagctactgatatcaagattgttttgcagtataatctctgtgatggatccaagtagaagctgggcggctaggtggttaagaatcggtatgttgatcgcttcccttaactatcgacttgcttattccatcaatgtgttcttattatcccatcattatactctatttactaaggagattactgttacatttattaacacatctctgtattaaagaacgaccatgagatctccaatgaaagattacattacaagatttgtgtgattctctgtttctagaggcctaaaatctgatataaattggaatgtggctttagatctgaagattttcaagatactttgcctccttgtttggtttattgattgcataatgttgctaaatttgtgcagggaagtttgctcctggttgctacacacttgctgtctcagagccactccctgaggaaatgcaggtaaacgattagcaggacaatattttatcttcgtggtttgaaattgtactcagtaacacattagccttcttcttcaaaattagatcatattttgttcacttgtctgattttgtgtgtttcattcggtggtgatttaatgtagcacttatgccaagaggagcgtgtacaatatgttctgccgaaacgcatgtgaagaaatctatcacgatgaaggctagtagggaagaccaagtattccactttttcattaaaagcttcttgaaacattattaggtgctttatttgaatcttcaatcttgtggaatggtcgatgttaatgaagtcagagactccttaacactcttctatgtaaggcgttagtccgaaaagaaaaaaaaaagaaaaaaaaaatctgtgtctgaacaaaaaagtcttctcttatctaaggtttagactttagttaaccaatcggaccctaactaaaaatattaatgagagtaggaagaataaatttgtgtggactctaaagatcaagacaagacaattataattcttcataaagtcatgcaattaataataataataaaaaaataataattttcttgattaattgctcaaagtgaaagtcaatctaaaatttgttcggtttttcaattctacaatttttatttgaaaatatataaaataaaaaaaaatggttaataaagaattgcttagagtttcctctttttctagaacaaacaaaaatgcttagaccttctcgaaagaatagcacatcacgttatatccaaaagcatattcttttgttagattaatcgtagtcatatggtcataagtcatacataacatgtaacatgttagttcgatcattattaactttcaattaagtattttcgtaagacgtaattttcaacaataaacaacaaatccgcgatatacggtttttgaaagggcaggcaattgtttttttaaattattaatactataaaacaattttcttattggctataaactaatatttaattccacgtggaagttactgttcgtcgatataaaactttcttcgttaccattttgagtctccggcggctttcacactccagaaaaaaaacacagaagctacgtttttcaggtaatatgaaattctctccgatcacctcttcttcgtctggcagtatctctgtctcaaattttgttagatccattcgaaaatccgtttatcgaatcactcttagtctcttaccattcgtcgaatctaaaaatcccgtctttttcgctagtttggtggactgataagctgtgatttgtatgaagaatcgatataaagtctctgcttttttgtgtgggttttgtcgcttctttggtaaaatggatctctctgtgagaaagtgacgatcatgatcttaggtttttgattcttatatcgattgttcatttgcaggactttgattaggtttttggagatttacaaaaatg

SEQ ID NO: 32525 - DNA, 3000 bp, Unknown; identical to SEQ ID NO: 665
  misc_feature (1)..( 3000): 2750-1469P.txt file - cDNA_ID_3058256; gDNA_ID_1620304; Annot_ID_152751

SEQ ID NO: 32526 - DNA, 3003 bp, Unknown
  misc_feature (1)..( 3003): 2750-1469P.txt file - cDNA_ID_3058265; gDNA_ID_1620304; Annot_ID_152747
gagccatagcaccatatgctgtaaaaacagcacatcccagaatggcagattcagagtagggcaaagactctggtagaggagctaaaccatgagctggtgtaacacagtactcagccatccctcccatactatacatatacactggtgaatctgccagaaattaagaaatgtaattaggtaaaacaatcacagttctcctaatatgccacctgatgtttaaaaagtcttcaaatttaccatcatgtcgcaaaaagagacgagtttcgccatcgtaaagagttcccttggctctgttgtaagcaaagaagtcttcacatagatcatcatggccctgtatccaaattaaaatatcagctaaaaagctacagttctcagattagagaatccgatgaaagcaatacaatttcgttctcaccttagcacaataagaacaggttccacaaggcataatgaaagctccaactacacgagacccgattggaaatctgaagaaaagttgagacatttaggatttcttcaaaacatatgattccattagtgtggaggtgaagtaaagttgacaaacctattaatgatcttgtgatcagtaagtggaccatgttcaacaacttcaccagtaatctcatgaccaataacacaaggactagcgaacggtatctctcctttcatcacatgaagatcagagtggcaaactccacaagctgcccacaaacgaaaatgaatactaactttcaaaactcgaatcctacaaattgattcaatcaaatcccagaaaatgaagaagaacctttggttttgatgagaatttcattggatttggggcggggaatatgaaattcttcgatggttagaggcttattgggctcgcgatacacggctccacgcatgaatccgccggggctcacgtgatacccacccatcgattgagaatcatcgccggaggctccggtttggagagacctagtggagagggcagagccaacggcgagtcttgttaaagagaagaggttcttaacggcggaggcgcggcggagaatcggagcaaacgccatgcaaacacgacggacgaatttgatcggagatttgggcaacgaaagagacaggcacttgacacgatagactgaatctgttggacactttgattgaattacacgacgcgcttaatctgaatttacgaaatgagtctgcgcaggtggtattcacgcgccgatattgcgtgcggggatgatttgtatcactttaaggatgtattccttgggtcaacatccacgtgtatatcttatctacgaaattaagatattatatagacaattaggacggaatgctaattgttagttttttatataaaaaattttaaattaaaataaacaaaatttactataaacattctttagtttcaaatttaaaatacgtgaaaaatattaaatttatgacaccataaaatttacagaccaaataaacgtaatgttaagttcggttcgttttctatgtttttaaaactaatgtttacaaaataatagtaaaatcaacatagttttatttatgaattttttaaataaataataataattgttttttaaaattaagtttaagagttattttgtacaaatcatgccgaactttgtatgtcgaaaacttacagattaacgaagacataatgcataaacgcagttatttttcgacgctttttaaattaaacacaaataacatttaaaaataatattaaaattaacataaatggttttgcttaaaaagttaactattttgttaacactaaattgttgattttataaaaacttttaaggtaaatcactattatttttaaaaacgatttaaaatgttaaatcaaatatatattacgtgaaacccatgttgaacttcaaataccaaaacttacagaccaatctttaaagggtaggataaaacattttaaaaaaaaatccaagtgcctaagtatttaattatgtgtaaaccatattaaacctaaaacacttcttaggggtttgaatgttgtatctaattagtttacacaaaaactaaaaatttaacacttaaaaaaaaaaaaaatccggtttgttctcaatgcattgaaatttaacacttaaaattttttaaaaccaaaataatttctatactgaaaacagttagttaaaattttaaaaaacatattttgtataagtaaaaagatagtttacctaataaaaatatttttaaaaaatcataaaaactaatcttagtgttaaatttacttgcgtgaaagcggttgaactaataacacggcttaaggacccgtaggatgggacggcatgcttaatccggtttgttctcaatgtattgaaatttaacacttaaatttttttaaaactaaaataatttatatactaaaaacatttagttaaaaaaaaaacataagtaaaaagctaataaaaaatattttttttaaaatcataaaaactaatcaaatttacttgcgtgaaaagcggttgaactaataacacggcttaaggacccgtaggataggacggcatgcttaatccggtttgttctctatgcattgaaatttaacacttagggggtgttattggtttgggatttaaaaagagttttaatgactttaaaagttatgtagaatatgttgttattcaatcaagactttttaaaactctgttacaatttggtgttattggttgtggatttataaaaagtaatctaaaatttttataaatctagtgttattggattaagagttttatagagtcattaaaagttttgtgttattcaattaaaacaaaagaatcttggattgttgataacttaaaatattatgttattggtttaggattgattgtacataattttcttcataacaaaagtcatgaaaactcccacataaaatagagagattgtggaaagaatgtatcatcaaaaaaaaactctcatcatcattagctcttcgacttttgtgagactctgttacggcgagaattgagaatgaaaacaatg

SEQ ID NO: 32527 - DNA, 3000 bp, Unknown
  misc_feature (1)..( 3000): 2750-1469P.txt file - cDNA_ID_3058267; gDNA_ID_1620304; Annot_ID_152746
gatacaatatctaaatccctaaaatattttggtttttaaaaaatctaagtgttaaatttcaatgcattgagaacaaaccggattaagcatgccgtcccatcctacgggtccgtaagccgtgttattagttcaaccgcttttcacgcaagtaaatttaacactaagattagtttttatgattttttacaaatatttttattaggtaaactatcattttacttatacaaaatatttcttttttaattttaactaaatgtttttagtatataaattattttagttttagaaaaatgtaagtgttaaatttcaatgcattgagaacaaaccgggttaagcatgctgtcccatcctacgggtccttaagccgtgttattagttcaacggctttttacgcaagtaaatttaacactagattattttttatgattttttaaaaatatttttattaggtaaactaccttttttacttatacaaaatgtttttttttttaattttaactaattgtttttagtataaaaattattttggtttaaaaaaaatctaagggggtgttattggtttgtgatttagaatgagttttagtgacttgataaaatctttaaatcaaggattttaaaagattgctaaaaagtttgatattatcttgatgactttttttccaaaatcttgtaaagtcttttaaaacttttttccataatcttgtatacttttaatgactttttcaaaactttccctgcaaaatattttcaaaatattgtccaatttttttttaacgtctagtgaccatcttctatcttttatataacatgttctatgtacgggtgttcaatctagttcaaatatcattttttcaaaaccaatagtggagtttttcatgtttaacagcttttgttcatattcggttttattagtaaagaagatttttcatgttcaagcagaggctccaagcaatctttgttacggaacattacagaagacaagtgacgattcaaaaactgaactccattaccaatcgaagacgaacgagaaggacgtagcacgtttgcattgttttcattctcaattctcgccgtaacagagtctcacaaaagtcgaagagctaatgatgatgagagtttttttttgatgatacattctttccacaatctctctattttatgtgggagttttcatgacttttgttatgaagaaaattatgtacaatcaatcctaaaccaataacataatattttaagttatcaacaatccaagattcttttgttttaattgaataacacaaaacttttaatgactctataaaactcttaatccaataacactagatttataaaaattttagattactttttataaatccacaaccaataacaccaaattgtaacagagttttaaaaagtcttgattgaataacaacatattctacataacttttaaagtcattaaaactctttttaaatcccaaaccaataacaccccctaagtgttaaatttcaatgcatagagaacaaaccggattaagcatgccgtcctatcctacgggtccttaagccgtgttattagttcaaccgcttttcacgcaagtaaatttgattagtttttatgattttaaaaaaaatattttttattagctttttacttatgttttttttttaactaaatgtttttagtatataaattattttagttttaaaaaaatttaagtgttaaatttcaatacattgagaacaaaccggattaagcatgccgtcccatcctacgggtccttaagccgtgttattagttcaaccgctttcacgcaagtaaatttaacactaagattagtttttatgattttttaaaaatatttttattaggtaaactatctttttacttatacaaaatatgttttttaaaattttaactaactgttttcagtatagaaattattttggttttaaaaaattttaagtgttaaatttcaatgcattgagaacaaaccggattttttttttttttaagtgttaaatttttagtttttgtgtaaactaattagatacaacattcaaacccctaagaagtgttttaggtttaatatggtttacacataattaaatacttaggcacttggatttttttttaaaatgttttatcctaccctttaaagattggtctgtaagttttggtatttgaagttcaacatgggtttcacgtaatatatatttgatttaacattttaaatcgtttttaaaaataatagtgatttaccttaaaagtttttataaaatcaacaatttagtgttaacaaaatagttaactttttaagcaaaaccatttatgttaattttaatattatttttaaatgttatttgtgtttaatttaaaaagcgtcgaaaaataactgcgtttatgcattatgtcttcgttaatctgtaagttttcgacatacaaagttcggcatgatttgtacaaaataactcttaaacttaattttaaaaaacaattattattatttatttaaaaaattcataaataaaactatgttgattttactattattttgtaaacattagttttaaaaacatagaaaacgaaccgaacttaacattacgtttatttggtctgtaaattttatggtgtcataaatttaatatttttcacgtattttaaatttgaaactaaagaatgtttatagtaaattttgtttattttaatttaaaattttttatataaaaaactaacaattagcattccgtcctaattgtctatataatatcttaatttcgtagataagatatacacgtggatgttgacccaaggaatacatccttaaagtgatacaaatcatccccgcacgcaatatcggcgcgtgaataccacctgcgcagactcatttcgtaaattcagattaagcgcgtcgtgtaattcaatcaaagtgtccaacagattcagtctatcgtgtcaagtgcctgtctctttcgttgcccaaatctccgatcaaattcgtccgtcgtgtttgcatg

SEQ ID NO: 32528 - DNA, 3000 bp, Unknown
  misc_feature (1)..( 3000): 2750-1469P.txt file - cDNA_ID_3058271; gDNA_ID_1620304; Annot_ID_152744
gcttgtaagttttctggatcacttgattgagtctagaatctagatagattacatgtacggtttgattcctttggctgattttccaaagttttgttcaaatttcaggagaactacaaagaggaaaccaagattgttttgttttgttagactctaccccttttccgattcacatggtaaggacattgaggtagagaataatactaaaaagcaatgggagatgggagttccagtagatccaacagctcaaacagcactagtgagaaaccagagtggctgcaacagtacaatctcgttggtaagattggtgaaggcacttatggtcttgttttcttggctagaaccaagactccgcctaaaagacctattgctatcaagaagtttaagcagtccaaagatggagatggagtttccccgactgctatccgcgagatcatgttgcttagagagatttcccatgagaacgtcgtgaagcttgtgaatgtccacatcaattttgcagacatgtctctgtatcttgcctttgattatgccgagtacgatctctatgaaatcatcaggcaccacagagacaaagtcggccattcgttaaacacatacacagttaagtctttgctctggcagcttctcaacggattgaactatcttcacagtaattggattatacacagagatttgaaaccgtcgaatatcttggttatgggtgatgcagaagagcacggaatagtgaaaatagctgatttcgggctcgcaaggatatatcaagctccgttgaaaccactatcggataacggagttgtggtcacaatctggtaccgagcaccagagctgcttcttggttcgaagcactacacgagcgctgttgatatgtgggcagttgggtgtatattcgcggagttactaactcttaaaccgttgtttcaaggagcagaagcgaaatcgtctcaaaaccctttccagttagatcaacttgacaagatattcaagatcttaggccacccgacgatggataaatggccaacactagttaaccttccacactggcaaaatgatgttcaacacattcaagctcacaaatacgacagtgtgggtctccacaacgtggttcacctgaatcagaaaagtcctgcgtatgatctgttatccaaaatgctggaatatgatcctctaaagcggatcacggcttcacaagcactagaacacgagtatttccgaatggatcctctcccaggacggaacgcatttgtagccagccaaccgatggagaagaatgtgaattacccaactcgtccagtagatacaaacaccgatttcgaaggcacgacaagcatcaatccgcctcaagcagtagcagcaggaaacgtagcagggaacatggcaggagctcatggaatgggcagtagatcgatgccaagaccaatggttgcacataacatgcagaggatgcagcaatctcaaggcatgatggcttataatttcccggcacaggcagggcttaacccgagtgttccgctgcagcagcagcgcgggatggctcaaccgcaccagcagcaacagctaagaaggaaagatcccggaatgggtatgtcaggttacgcacctcctaacaaatccagacgcctctaaaggtaaaatcgagatcatcagtctcgggttagaatctgtgtgtttgccgcagaagaaagcgttgcgatttgctttatagagtagagttagattgtaatgcagcatgtggaatgttgctattcatatggatggattggattctctgtagtttttgtataaacatcctctcaagtatttgttaattatattagatcatcatttctcttaacatcatttctcaaaacgtagtaaataggagatttgccaagtgaaaaatatatataatgagacagttattatgaacacaatttacagttattatgaacacaattttggtgatgtttctactgtttatgaaatttgttttttttttacctgccagtcttatctatttaccaccaacatacattagaatctaatgtaattacatcatcaatcatagacctaatgaatatttaataccacacagtttaaacattgctattaaagtttgaaaagattatactttagtaaaataatgttttcaaacttgtattcaattatactacgtaagcagtgatccaattattacgaacataatacttttccaaatcaaaattttgtttttgttcaccttaccatcagtttcataatagaaatattatatatatacaacacaaacaaatgaatgagaaatgtttttctattattatgacttttatttaagattcaaaagaacgaagaagagttatatatatgcttgtttgtttcaggacaaatacaataaataagtggataagaaaaccacaaaccttgaactagcctgaaatgtgtgaaccaagctatacaaactgtacgtgattctgcatcgtggaagtcacaaacagacttctgacttctgctaaagataaaactcactgtttgcaagcaatttagtataaatatgaagcattgacctaccaagatcgacacaatcacacagtttcttcttaattaaacctagctatttttgtctttagcagaagtcagaaagctagttttgtatttttcttatttcttaaatatatggcggccaatgttatgagacggtttatgatttaaagatacacaatggacccacgacgttgccataatacaattattaggctgttaattaacgtgatcgttacgtttgctacaaactagctagttgtgtcttctttattttagtagataagtataagagtctaaaaatattacaacccaataatggttacattcatggtcgacttagaagatgaaagttgatttcttaaaaaaaaaacacgcacaataaataaaccaccaattcacaaatacaagaaatttaataacctcgagcagttaccctatttaaatcccctctagccttgttttccttctcacacctatgaagcaatg

SEQ ID NO: 32529 - DNA, 3000 bp, Unknown; identical to SEQ ID NO: 668
  misc_feature (1)..( 3000): 2750-1469P.txt file - cDNA_ID_3058275; gDNA_ID_1620304; Annot_ID_152742

SEQ ID NO: 32530 - DNA, 3003 bp, Unknown
  misc_feature (1)..( 3003): 2750-1469P.txt file - cDNA_ID_3058279; gDNA_ID_1620304; Annot_ID_152740
ctactaaatctcaatctccaaggatctttatatattaataagaaaagctactatccaaatgcgaccttgttcgtgaagtgtttggtttataatttggtggcttaagactatagcccaccattgacccaaaaaaagaaaggaaaattaatagtagactatatagctaccaactccctataatttaccttgaaattaaaccagctttgtatttttttaatagaagtcagggctctacagtttcattttaaacttttttttttgttatattacatcctgcaggttagttgtaatttgtaaacgtaatcaacataataaaaccatttacatagactgattaaagttgattccatttgataatatttagctatttatatatcaatcaaccaccagctcttaaatatatgtattcaaattgttttgttgactctttttgctacactttaaatttgaatctagaatgttgtcctgaaacaaaaatctgtggattgaacaaaattatacaccaggtaaaattttgaagtttttaaaagcaggatcacatactcctaattttagattggatagatctagtataaaaatatgaagtttttttcccaaaaaataataataccatttagctcttaattaaatgcatgcaaactaaagataaaaagaggaattattttaaccattctaactcgtcacaacatgcctaatcattccaggttaattttagagttttcaaatcgtcatattaacatgtgatcctgaagactcttctcttctttcttctaccattagctgaaatctttacttgtaccacaattaacctcaaaccctagcccctaaatccccctagaaatcaatccatcctcagttctccaaaaagatatctttggtttttcttcactgacaaaacccctaaaaatggccgactcattcgagctaattgtaacccgaaaagaacctgttctcgtctctccagcctccgaaactccaaaaggtctccattatctctcaaatctcgatcaaaacatcgccatcattgtcaaaacattctactacttcaaatcaaactcaagatccaacgaagaatcctatgaagtcatcaagaagtcactctccgaggttctcgttcactactatcctgccgcagggagactcacgatcagtcctgaaggaaagatcgctgtggattgcaccggagaaggagttgtagtggtggaagctgaggccaattgtgggatagagaagataaagaaggctatatcggagattgatcaaccagagactcttgaaaagttggtttacgacgttcccggtgctcggaatattctcgagattcctccagtggttgttcaggtgaggggttgatcgattgatattatgttttgcttgctgttttgtgtgagtgaacgaacatgacctatactggatttggtccgatattggtttcaaataactatattatatagtagaattagattaatattgattttttaattatgcatgtacgtataaatacgctaattagtaagaaagaaaaagatccatactattattcactacaaaatacataaatttcataacttttaattcaaaagtatttatattggaacatatcctaattgacgtttttccaagattgttgtgtgattgtcgacaaaataaattttggacatactcgtttttttttgggcagtacattcgagtaaatacgattgaagaaatcatgcatttttagttgatcgaatacattgtatacgatgcttccatacaaattttggtttgtttgttaggtgacaaatttcaagtgtggagggttcgtgctaggactaggcatgaaccacaatatgttcgatggtatcgcagccatggagttcctcaactcttgggccgagacggctcgtggccttcctctctccgttccacctttcttggaccgcacacttctccgaccacgaaccccaccaaagatcgaattcccacacaacgagttcgaggacctcgaagacatctccggcaccggaaaactctactccgacgagaaactcgtctacaaatccttcctcttcggacccgaaaaactcgagaggcttaagatcatggcagagacgagatccacgacttttcaaaccctaaccgggtttctgtggagagctcgttgtcaagccttagggcttaaacctgatcaacggatcaagcttctctttgctgcagatggaaggtcgagattcgttccggaacttcctaaaggatattccggtaacgggattgtgttcacttattgcgttacaacggcaggtgaagtgactttaaaccctctttctcattcagtgtgtttggtcaaaagagccgttgaaatggtcaacgacggtttcatgaggtcagcgattgattactttgaggtgactcgagctaggccgagcctaacggcaacacttctgatcacgtcgtgggcaaaactgtcgtttcatactaaggatttcggttggggtgaaccggttgtatctggaccggtcggtttacctgagaaggaagtgattctgtttctgccatgtggtagtgacacgaagagtatcaatgtgctgcttggacttcctggctcggctatgaaagtgttccaagggattatggatatatgaatcattaaaattatttatggtttaatgtttgaatttaaattaactatgatttaaaaagcaaataatgatgatatatcaattacgtgtttgtggtcgtatgaaatattgttcgtcggtggagcaaaaatgtaactaagatgttaaagtatcaagtttaataaagaaagctattgtgtttactaaaatgttgtttggtaagagctcaaatctttgattttcttcttacaatactttttctgacatagagatcaattacaacctacaagtcacaccttacaaaataaacttatcacacatagcaaaaatattatcacgaaaattaaatcgttagaattgtctttttttgatcaacgatttgtctaaattctgaaattttatg

SEQ ID NO: 32531 - DNA, 3003 bp, Unknown
  misc_feature (1)..( 3003): 2750-1469P.txt file - cDNA_ID_3058295; gDNA_ID_1620305; Annot_ID_152805
gctcttaatcttttgttgttgtttctcctaattttcgtatgtcaatcttgttcttggatataaaaaattagtttcaattttaaagaataagaaaaactgttctcgctataacataacttcctaggttagacatactgatgacatgcatatgattttttttttctaccattaaatttggagtttgtcgaatatttttaattcgaaaattcctacaatattctcaattaagccagagtaatcaaccaatgtgcttagtttcatctgaactagtcaacctcttcggtttcatagaaacctaactcccctcgccaattcgatttgcagtcgatttgattgattttataaaatttggttattttaaaagtgtatccccacaaaatctagtggacctttggacatgggacaagcatggtgagttgccactagtaaggttttttatatataatatctcagtgtaaagaataaacatatatatctaaatgtacaatgaccacatacaaattatgtaaatgtaatttaactattgcaaaacgtctttagaaattagattaaagaagagtatgtgaataatctatctaaaaaccaattgtctgaatcattaacgaatacttaggacttggtcaaagttttccaaaacaaattccaccgattgagaaatgtaaacaatttttctgccaccaccactataagagagctaggaaacgcattcaatgccctacgttagtaaggaaaattcaatgtcatgcactgtatcacaaagtcataaacatttaattgaaaccctatacctagctagatagttcttatatacccacccattaccagtttttatttattaatttattatttaatagattgtgatgaccatacctatacctttcatcttttagttttaacttttacctctatgttcgttgtcacactcatcttttaaagtcacattcactttctcgtctcgagttattagtaaattaaatcgaattacgtttcttgagatcatggatattaataaaattgattttgtctcatacaaatttatttgtgaaatcatatgaaaatatagaacgaaaaaataatatagactgcattatacgttcgtctttaaaattaaaaattaagagggcataacgcgttacgcgtgcatacgtagtatttgtatatgtaagattttaatgtataataagctcatgttgcatcttagtatgggcatgcaattgcaagtgtatccataatgtttttaatttgtccgtggagtattgaacatgatctctaatttaaagggatacgttttttatttttgacgaatgaatatcaatttatatagtaaattacacatgacatgaatttttttggatttgatttcgaaccaaataatttcttcaagtatatgtatactaggaataataaatatcttgcatgggatcattatatcaaaggcgacacaacttggaatcgtgatgatactaagctcacacagtcgtaaatcgtaatattaaatacgatcatcatgtacacttgcaccgccaactcatgatcatgtaaaggatacattgagtaatgaacaaaatgcaccaccccgaccacaccaccccacccactataatatattgaaggaaaaggagagaaaaatcaaagcaggtcccacttgataaaatggcactaacgaaatcccaaaaaactcttataaatatacaatttgtataatacaaacacaaatctccaagcaaagaacaatagataaacgaaaaagaaaaaagtaagaaaagaagaggaagaagaggaagaagaggaagaagaggaagaggaacgaatatggggaactgtttagtaatggagaagaaagtgataaagatagtgagagatgatggtaaggtacttgaatatagagaaccaattagtgttcatcacatccttactcaattctctggtcactccatctctcacaacaacactcatctcctgcctgatgctaagcttctctctggccgtctctattatctcctgcctacaacaatgaccaagaagaaggtcaacaagaaagtgacctttgcgaatccggaggtggaaggcgacgaaagattacttagagaagaagaagattctagtgaaagcaacagcaatatcgatggtgatgacaccaagaacgtaactgttgtaagaatgaagatcgttgtgcataagcaagagttggagaagctacttcaaggagggtcggtccatgagatgatgtaccagactcttgagaaacaacttttacttacttcgtctgatgatgatgatcttgaatgtaatagcggctggagacctgcgttagatagcatacccgaatctgaaagtctcagaagaacataacagatagctcatatatactcaaaaaacagtttgagctttgttcaaggaaaaacttgtttttaggttttgtttgtaaataaagctttaagctgttataggaaaagactgtgtgatattgatgataacactaagactttttgagtcaagctttttgttttccaagtaaatttaaatgaaaatttcatccatgtttttccatggattgagaagaactcaataggaaaagtaacaaccatgtattagatttaatataacatgaacaaacatttatatgcacttattatttatcatatgtttcagaaccagccttagtttcttgctcatgtctcttcaaatctcttcatcagtataagattaagttaattttgttcatagtcaacaaagaaactaatgtgttttggtaaagtaacgaccactctatgttgaaccgtttccggtttaagatattctaaccggatgattgagagtcgtaccgattggtttgaatcggttttggattttgctgctctatcgtcgtgggagagagataatcatcaatttttccaggcaaaaagcttcgattttgaaccatataaatcatctcccatggcggaaatcgaagtctttaactaaagaagaagaagaagataaagctttgtaatttatagaatg

SEQ ID NO: 32532 - DNA, 3003 bp, Unknown; identical to SEQ ID NO: 32531
  misc_feature (1)..( 3003): 2750-1469P.txt file - cDNA_ID_3058295; gDNA_ID_2926241; Annot_ID_204082

SEQ ID NO: 32533 - DNA, 3000 bp, Unknown; identical to SEQ ID NO: 671
  misc_feature (1)..( 3000): 2750-1469P.txt file - cDNA_ID_3058301; gDNA_ID_1620305; Annot_ID_152798

SEQ ID NO: 32534 - DNA, 3000 bp, Unknown
  misc_feature (1)..( 3000): 2750-1469P.txt file - cDNA_ID_3058337; gDNA_ID_1620306; Annot_ID_152816
ggttaggatcttgagccgaggcaaacactagcactccgccatatccgttcttcaaatgtgttgcatccacaattaaaactttcctcatcactctaaaaccttcaatgctagctcccaaagctacgaatatgtactgaaatttatcattctcatccaatttcagataagtaactgtaccatcatttaccttcttcaacatgtataaataacaattgatatccttgtagcttttttccgggctaccttttaaatcataaatcgcatgatatttcccccttagcgctgtcgagtatgatactttcacacctaatttcgtctgaactagctccatgataattcttggaaccggagtttccaactgtcccgaaaaatgatcatgaaggagagctgcgactaattgtgggttgcctttttttttcctgagcctactactacctttacttagccgagtgcaactatgcatcttattataccttctaatcgagaatatatcaatattactgatattggacgctcgtaaacgccaagaacagctctctttggcacactttaggacatagcgctccttatccgacttcttaatcacataaccaaaaatggtagcaaatacagctctatccaccacctcgtgcaatgccgccttgtttggaaattcttgacgtaaggtcaacccaattccgtcttcccattctttcttaaacatacccggttctacaacaggtggcgactcaacatactgttcccccctatcagaatcatccatagactcatcatagcgtgtttcatcttcttgagtctcgtgatcctccactattgcctcaagttgatgttgagttccgtgatcctccactattgcctcaagttgatgttgagtcccgtgatcctccactattgcctcaagttgatgttgagttccttgttcctcttctaataagacgatgagtgcaccatcatccactctcatttcatcctcctctgtatagttcttaccaacagaacttttaccaactctagacaattgctcgggcaattgctccggctcgggcggtttagagatctcctccacaaccaaaacacttcttcagttattttttgcggatgttacataaacaaagacatcctcatcatcacaaacgttcatttcttcctctactccgaacaaccgtggattgtacctcatatgcaattttaccttatttgcatctaatccaagcttcgtcattatcctatcttctaacattgagagagtaatcttctcccctaatgtcttcatcatcacattatacatgcgaccttggaatttaaaatatatgatcacgttctctttcattgtaacctgccaaaacaatacacatactcagtcaatattactagtattatcgattctagtacattttcagtaatactattactaattctgaaatattacatgtgtgagtaatactattacatatatgaaatactacgtgtctaagtaatattggtgctattaaaacatactatctatataaattacggtactactatagttagtgcgaccagtattattttcgcgacaagaacaaatattcgatttgagttcaatttagtatgaatcagcatgtgaaatcaattgcttacccattaacagaccaaatgaagcctaaatctatacttaaacttctaatgtaggtgctaaaacacaataatccaaatctaatttgattgaatttcaaaatcctcaaaatatgtaattcaaagcttttgaagctctctccatacctggacttagtagattgatgcagcttgcaggaggagaaaaacgacaatgcggctcgccggaggaagaagcccgaagaagaacgagctcgagctttttttttttttccgtttttttttttttcaaaatgttttctagaaatattaattattcattcaaaataaaatacaggggtaaattcgtcttaacacaattcattaactcaaaggagataggaagactctaaagtggttttgcagattagttgtcccacaaaagggacacaagagatgatcattctaaataatgactaggattcaacctgtgttttattattttgggtgattgttgtatatttagtaggagaatatattttaatgtcgtcaagcatgtgtactatttaataagtttgtatgtaattttaagatagttaaagtagttaaataaatgtgaaaaagtttaagtattcataagttttaggcattaaaatttttcttatactttgttttttttagattaaaaatattttgaacttttttgatatgatttataaaaatcaataatactcaaaaagtaaatgacagaaagattaatgataaaattttaattaagtaaaatattttaaacaaaatgaataggttttttaaatttttattgtaagtaattctacaaaatgtggttaaattaggtgaaaatagaatcttagaaataatatttgtataaatgatgctcattattcatcatgctaaattggagtctttgttaatcagagaagtcagcttatgcagtatatttagaaaaagccaaaaaggctagaaagagataacataaaacaactttcctttgttgttgttataagtaaaacatttacgaaaaatcccggatattcacctagtaaattaataaagtgtgcataagagagtactaaaatgaataaagtatgaaatttactgctaaaccaaaatcacctttccagcgaattgtggtcgttcgaatggaataatccggttaagctataccagagatggatgttaatacggtttactttcttgagaaaaaaagaatttatgcaaagaaaaataaaacttttttgacaaataagatatgtggataatgtgagagataagaaatatcgaaaactatataataaaactactgttgtggataatgtaagagacgatacaaatagcctcataaggcaaaaaacaatggcatcatcatcatcatcacatttgttttgacgctccaagaaaatttgcatg

SEQ ID NO: 32535 - DNA, 2503 bp, Unknown; identical to SEQ ID NO: 686
  misc_feature (1)..( 2503): 2750-1469P.txt file - cDNA_ID_3058356; gDNA_ID_1620307; Annot_ID_152867

SEQ ID NO: 32536 - DNA, 3003 bp, Unknown
  misc_feature (1)..( 3003): 2750-1469P.txt file - cDNA_ID_3058371; gDNA_ID_1620307; Annot_ID_152857
caaagtttttgatttattattttaaaatcacaaaaccatataaagtttaaaaatcttgttaaacttcataaaatccgtctttaaaatttttaatataaaagtttgattcatattattgttctttcttaaaccaacatttcgttgatgaaagatggtcaaatgaattttttgttgtcaagctagagaacacctaaattttttccaattgatattatgtatgttaacacaaaaagagttatctaatacgattagttaatttatggatgattccaagtagaaacgccaacataaactttgactttgaggccgaattgatctgcttcttttatttctcttacaaatttgaaattaaattagtcaagtgtgatgataaaatacataacgtttgtacgcattagtatgttgtgtagcggagagactcttgtttataaaaacaatgtttggtttattctaattgtcattttattctttggatctttagttctcgcttagcgtctcgtgcatatttttcctcaaaatcatcaccattaaatgactcacgtacacaataatcacaacaacatacatatatatcaccatgccaaaatacatctgaaaaaaataaattcctagtcgctacactgtcatattttgattgatatttagactatttagtcattcagataacattgttacgaggaagtatatatacatacgtagcgttgtactactgtaactggttttaaatttatagtattaattttgttgatgttccgattgaaaaagtcattttaggaaagaacgaaaaaatagtttgaaagtgatttttttttaaaaagatataatcctacactgtcatgttttgattgatatttagtcattttgtgtgttaattaacactttattatagacagggttagttattaatttaaatctaaatgttcttgtaaaggcttccacttaattttctaatcaccatctgccgaccaaactactttatcaagtcacagcttttgtggaaaaatttccgttaattcatgagcttttctatttgttcacacttcacacaatcattaaattaaattttgcggctaatgttagaattatcgtacgacaactgatcacacgctacatgttctctagcttaaatttgcaacatatataattgaaacatcactcaaccccacaggctacaacatcccacatttaatcaagaaatcaatcagttcacaattactgatgaaattacgcagcaagtaaccctagctaactaggataaaagaaaacgatcaattctcgggaaaattcagtctctcccgaatcccaaaaacaaaagcatgcatttcgtaataaacaacgcactgattctgtttgattttttctacctttatcctacacaacactagttaaacgacacaaaactcaaaacacgaacacagttacttaatctattccccttattctttctttttgattataatagcatatcggaaaaaaatctacaaacattcaaaaaaacatcatctactcatctatatattcaaaccttggtccattcacatcacgaagtccatcgcctataatcatataacatatccaaaaccctaaaacgcaaacactaagataactatttcttgaaattaataatgtcgtcgagaggattcaacattaaagctagaggattatgtaataacaacaacggaggaggaggaacgggggcgaagtgtggacggtggaatccaacggtggagcaagtgaagcttctgacagatctgttcaaggcgggactgcgaacaccgagcacggaccagattcagaagatctctatggagctgagtttctacggtaagattgagagcaagaacgtgttctattggttccaaaaccataaagctagagagagacaaaagtgccggaaaatctccaccgtcaagtttgatcatcgtcaagatacagatctttctaagcctcgccgagacaacgtacgtcgtcatcaactaccagcgaaaggttaatcaagatctctttctagattgttttataatcacattttacagtatatattatcagtttatcactaagacgctaataatgtgtcttggtttcttataaatatttttgaagtttgtaaagtagaagagaaaatgatagagacgttgcaactcttcccattatcgaaagttgagagagtgagagcaaacgttactgctgcgagccacaacgaatacacacgagagcaagcatatacgacggcgttttctacattctcaacatgtggggctgagatggaacattcgccgttggatctccgattaagctttctatgaacggatttgatattaacgtacaactctagtggtgacgttgctaagaaataaagacatgatgatcacatttatttagatctagctagattttgacaaatttcccttgtaacaatatcaacctaataatatcgttgctacattttttttcattagcttcttctcttcacttattgcctgttctgttctgtggcctacccgtgaaatgagtacttacgatttagggttataacattaccatagtggaagggatgatatttctttttgtatcacatttatgatttacacttttgaaagtctccacaacttaatttgtcattattttattttattttctcctctacaattcatattttcagcactcgtttgaaaaattacttcaaaatatttgataaaataagaaataaaatcctatttaattatccaccgtcttaataaattttcgagaaatgtatattggaaaattgcccaataaatgacgtgatcaggcccatcatattgggcttaacaaaagaaaagcccattatagggaaataaaataaaacgaccatattagaagcaatttagtgcaaagtggtttttcctggagaagaagcaaactctcaagctccgtcgggaaaaaaaggaaaaccagatcggaaagttcacgtttttcaaatcttctccggagaaatcagattacttgattcttcaaacaatg

SEQ ID NO: 32537 - DNA, 3000 bp, Unknown; identical to SEQ ID NO: 681
  misc_feature (1)..( 3000): 2750-1469P.txt file - cDNA_ID_3058377; gDNA_ID_1620307; Annot_ID_152852

SEQ ID NO: 32538 - DNA, 3000 bp, Unknown
  misc_feature (1)..( 3000): 2750-1469P.txt file - cDNA_ID_3058390; gDNA_ID_1620307; Annot_ID_152847
aatggatctttaggtacgcatagacgccatacgttttaaagcgataatgagataacatgtgtacaacagtacaagtatatcttaaggtctccgaagatacttctaaagtatgttataacatacactccgaattttttaaaacttcgaactaatataagttattagtggtttcagaaataattaattaaattggtttcccaccaagattaaaggtgataaactgataatggaatcattagagaatgtgatcgagttaacattttgaccaagtcattttagtttctcccctatattatagctacatataagtaaatgcattaaagctaaaaaaaaaaaaatgcattaaagctaactaggattattgcataatggtgtggtaaacgaaaagcgtgaacgagattgtttcatataacattcaacgttctctaggttttgtgcacttttgaaaattatttatacgatattaaatgatgtcatttttgtaaataggttttacttagatcttagtgtcgtaattttaatactaagtgcatgtgttataaatgattgaagatttgatcttaggtgggggactcactgagattccatagcatataagaagtagaagataaaaaggcaaatcaaacttagagctaagagaggcaagtgttgctaatcactacttctatagctactcctttgcttttttactcctctatgctcttttttccattgaccgattttcctcttcgccttgggtgtataaactaattcatacatttttgttttcaacatatataaattaaatcattcttttctgagtggatgagaaaggtaaatatggtaatagtgataaataaattgaaactataaagcaacagtatttgatactatcgtccaaaggtgtgattaatcaaataaaccccaaatccaaccaaatttgattaagactaagtccaaaaacatatacaatccttcaattcaaatgtatgtatcgacccacctttctatatcatgtccttaaaaagtataccgcgtaaaagtcacatgtaagtacatcaaaactcatcatgaagtactgaacataattggtattatcactaataaattatgaagaggcctaactttattagagaaaagaaatatatcttttaaagaaaagagatgatgggaaactcatgaaatggggactttgggtgagggaaagagagagacatgtgaagtgttcataggcaatttgtggaccaacaaggcacatgctactcttctttcatcaactttttttcttagttttgtgcgaaagataatgttttgtgattatctattttctcataaccatgtttgatcttggtgaaaactaatgatgcaaatgtatatccagtatatgtttttgaatctaacactgactacattcatcgaactatagtttgcaaaatttctataccaatttaaaattttcgtttcactttcatacgacttattttttgtaaggaatcggcaagccaatccgaaatgaagccactggccaagtggtacttccacagtgatcccatcccccatgtactggtttcgagccatgttggtatagggatacttgttgattgatattttttaaaaatataaccattagccgtcgctagacactagtaagaaaaacattagtttcttttaaaatgtttttacaaaatttattctaaatcagtatgataaaataattatgaaacttccaaaaataataattagattcctacactaagtaaagtctcaatttgggcaaatgcaaatgcaatactagaaaaacaattcgaaacgcaaatcagtagagaagaacagctcacaactcctatcctccactgtaactcatgtagagttttgtttgttaatttgaatccatgtccatcaaaactaataagttttctcatttatatataatcaaatcaaaaagaccgaaatcagaaactatttttttttatagagaggtgcttggatgtgtaagatctacaaccaaacaaaaacatgggccaatatacatagattgaaaaatcaacaaggatccaaacaaaatgtaattatggaaccaaaattcttgacctatgattcatcagttcctccatttctctacaataattaatattcaataagaatttcacattaacatccttttaatatattttaattatctgttgatgtcactagtttgttgatgtcatcaacaaaccgatcgataatcaatggattaaaattggttcgatttcttttcacttaagtgtcttttgaagttagctaagtccagttacaatcaaattatcatgacgaaatcagaagttaaaaaaaaaaaaaaatcagaagttaaaagttgaataaataatatttagcatatgcatgtgtgagttctctgcaaccaaatacgaaaacacactaaaccataaacattctggttccaaaaataaacggaataaagctaccggaattacttttttaccagcaaatgatatacaatcccaaattatataaatgattctacatatagtaagaaaatcatgattccattaccatgtgcataaaagttaataatatacatagacaacccacaaattcatctatatttactataattaatttcgtacatgccaaatatgttttagttataatacagaaaaaatataactctttaaggcactaaatcttttaaattatagaattttgctctctgataaatttgaaaatctgtgtgttagagatgtttgaaacaaaatttagaatagtatcgaaaatattttatccttatttaaaaaattcatattttatgaagaagttattattcactgcttactgtattttagaaaattacttataatttagaagaaaaagaaaagaaaagaagaagaatgcaaaagagtataatgatgaaaggtcctactttatgcagaaaccccccgtgtgcccactctccccttctccattaatactctctctccctcatcctctcttcttctctcatcatcatcttcttcttcaatg

SEQ ID NO: 32539 - DNA, 3003 bp, Unknown
  misc_feature (1)..( 3003): 2750-1469P.txt file - cDNA_ID_3058401; gDNA_ID_1620308; Annot_ID_152887
tcactattttatggattacctttcaaaatgtataacgttttttgtaataacgtggattttgctacgaacatgatgaatcaagagtgacgcattttgttgtggaagaaaaagtgagacatgtcactatggagatgggatcaatagttatttaattacataattaaaatataattagaatattatataagtcattaagtaattgttggtagaaaggacaataggggtttaggggtggggtcatgccagtttgggtaaaaaaggattagcagaagagagatcagagagatgccacgtggagcctacggccaatgggagagcgataagcttatcaaagatttcaaagtgcggagggtaaagtgggcgacgttgcttttccacgtgtcaatgtttcattggtaggaaaagttaaaagttagatttccgcttagtcggtatttgggtcccatactgtcttcgcaacttggccctctctcttgcgctcagaaggttttgtcttttaagtttcttcttgattttggttttatcctttgttatttttagtctggtccgtattttctccgtatcttgtttcaaatacattctctcgtaaagaaaccgctttttttggtttagtactgaatgataaaagtattgttttcgtacgaaatttatgtcaaccgccctagttctagaggatcacctagaccatatgcatgggacttggtcgagcttcgatgtggattagcccgagttatcaatagaatactgaaaattggcataattaactttgatttaatggaaatgcgtttttataatatactgaaaatttaacagacatgatgattgatgagtagtaaatttcaaatggtataacaagtttaattgtttttttagtaagttatatatactgaccaagacgtttttgtttgagtcagtgactatcactctttgtttttactcaacttaattccatagatcctggtacttataacgtgtacaatctagaatcacaagcgtttagagatagtgataattagcttggctactttctcagctgtgttgttgcttgatcgaaggtggaaaatgagagtggtcatattgaagttcttgcttagtgctattgttaatagaacggttggagagccggccaagcttatggataatatatttatatatggagaatgagaataacataaagatgagacatggttgaacctaattaatcaaaaaaacaatttacatgaattttttttctttaaaagatttcaatctgtaacatgcatagaaacttgtctcataaccctcgtagtcgtatagcaagcattagttttatgatagagatgtttcggttacgaaagaaaatttaaaccaacttaagtggttgtaaatcacgttgtaatttttatgtttatgtacaatttcaaattacaaatcttcatttttaattataatctttgccactgaaattcacgataatatcactaaggttcgatgcaattcgtcaaacatttcacgtactaaaatttgttcggcgagtgatggagacatagatgtaaatggaaacgtgtactcgtaaattgtgtcatctttcgtggcccataaaattgagatggagttttatcgttttctatatcaaataatgtaaataactgaataaaaaaggttttattataaaaagtaccaaagaaatggaccgtagtcaccatttacatggttacatggttacatggcgcgacacgtagtgtcacttaatgctgcaagtgttttttcctctttgttttttgcctccctgaatattttaaatttggtatataaaatatttctgctgacgagttttagttactctagtttctaaaatggtctagaaaaagttgtgatatataaatataataactcggtaatggctacgtacagagtcagccacgtaacactaaatggatgtgtcatggacccgtattacactccccattatacacggatagcgcatacatgtagtagagaatgataatgtagttttaacctctcaacagggagataaataattatgtatttcgttttctaaagtcatagttaatataagtgataataaataagttttgacttgtttccaaaccacttaacaaaatgatagttatttttctgtccccgaatcattatgaataattttctagtgggaattagctatttcagatttgataaacaaaatttctttctttaatcaatattatgtttaattgtaaaatgtacacacaatccacaactagaaagacgaatccaaaaactaaagaaaataggaaatactcgacctttattttctaacgtcaatccaccacatgatatttgtggtttttagcgtaataattcagttctaacacaccacatgatttgctaagctaccagtactactttctttgttaggccgtgagaaattgaatattccttcctcttattctgcatattctttgtatttgttttgttacctacctcttctagtgtgtagcctacgtaaatatacactcaagttgttttgatgtaaccggttttctccaccgaaaatcgtattgtgaacataagtgttttttagtttttttgtctagttgattacactacatatcaattcatacttattataattacactgattatatataaatgcatgaatgaaaactcgaattcgatatattacgattcgtcaaaaaatgtatatctagtgaattctggtatcaattagaggtctgaatttgttcaatatcgtccacaattccctacctaaaaaattagagctttttggaccaaatccaaaaatggatctaaaaagtgaaaaccaaaatattcctttaagaatctacacagattcgaaccaaaccggattaaaccgaatagtctacggcacgtgtggaaacgcgctgcgtttcaaaaacatttggggtatttttgtaatttttgtaatttttaggatcagggttttaggagaaacccaggaagaagaagaagatcgacatggacttagaacaccaaaccatg

SEQ ID NO: 32540 - DNA, 3000 bp, Unknown; identical to SEQ ID NO: 699
  misc_feature (1)..( 3000): 2750-1469P.txt file - cDNA_ID_3058405; gDNA_ID_1620308; Annot_ID_152896

SEQ ID NO: 32541 - DNA, 3000 bp, Unknown; identical to SEQ ID NO: 703
  misc_feature (1)..( 3000): 2750-1469P.txt file - cDNA_ID_3058409; gDNA_ID_1620308; Annot_ID_152888

SEQ ID NO: 32542 - DNA, 352 bp, Unknown
  misc_feature (1)..( 352): 2750-1469P.txt file - cDNA_ID_3058439; gDNA_ID_1620309; Annot_ID_152932
cctggacatgatattatgtttaagaaaatggccaagactactagcgtgaagccggtttttcgatgaacacatcatcatgtaactctaaatagtaacacaaatattcatgccgagcagttaataacaattatgtagttttaatttcctaattaaaatcttaataaatataataattattaattaagacaaaagataacgaacgatagtgatctgttctatcttcttcctctacgtctctctgctcgaagcttgtgccctttcattattatgtcaacaaccctcctctattgaagatttcttcaatcatcttctccacaacaaaaaaataaccctaatttacacagaaaatatg

SEQ ID NO: 32543 - DNA, 3003 bp, Unknown
  misc_feature (1)..( 3003): 2750-1469P.txt file - cDNA_ID_3058443; gDNA_ID_1620309; Annot_ID_152931
gtgttccaatggatccatacgctcgccgtgtaatcgagcctgttcaattccggaacccgtttctatggaccgcagtgattcgtgggtatgcgatagaaggtaaatttgatgaagctattgctatgtatggatgtatgaggaaagaagagattacgcctgtttctttcactttctctgctcttttgaaagcttgtggaacaatgaaagatttgaatttgggtcgtcagtttcatgcacagacgtttagacttagagggttttgttttgtatacgttgggaatacaatgattgatatgtatgtgaaatgtgaatctattgattgtgcgcgtaaggtgtttgatgaaatgcctgaacgagatgtgatatcgtggactgagcttattgctgcgtatgcgagagttggaaatatggaatgtgcagcggaactgtttgaaagtttgcctacgaaggatatggtggcttggactgctatggttacgggatttgcgcagaatgctaaacctcaggaagctttagagtattttgataggatggagaaatcgggaattcgagctgatgaggttactgtcgccggatatatatcggcttgtgcgcagcttggagcaagtaaatacgctgatcgggctgttcaaattgctcagaaatctgggtattctcctagtgatcacgttgttatcgggtctgctttgatagatatgtactcgaaatgtggaaacgtagaagaggcagttaatgtgtttatgtcgatgaacaacaaaaacgttttcacttatagttcgatgatcctaggtcttgctacgcacgggcgtgctcaagaggctttacatctttttcattacatggtaacacagacagagataaaaccaaatacggttacatttgttggtgcgcttatggcttgcagccactcgggacttgttgaccaaggacgtcaagtatttgattctatgtatcaaacatttggtgttcaaccaacgcgggatcactatacttgtatggtcgatcttcttggccgtacagggcggttacaagaagcccttgagctgattaaaactatgtctgttgagccacacggaggtgtatggggtgcattgctcggtgcctgcaggattcacaacaatccagagatagcagagattgctgcagaacatttgtttgaattggaaccggacattatcggaaactatatattgctctccaatgtctacgcgtcagctggagactggggcggagttttaagagtgcggaaactgattaaagaaaagggtttgaagaagacacccgcggttagttgggttgtagataagaatggtcagatgcataagtttttccctggaaacctgaaccatccaatgtcaaataagattcaagacaagttagaagagcttgtagaaagattaacggtattaggatatcaaccggatttgagctctgtgccatacgacgtgagtgacaatgcgaagaggttgatactgatacagcataccgagaagctagctttagcgttctctttactcactacgaacagagattctacgataacaataatgaagaatttgaggatgtgcctagattgtcacaagtttatgcgtttggcatcagaggtcacagggaaggtaattataatgagggataatatgagattccaccattttaggagtggagattgttcttgtggtgatttttggtgagaatcgaggttgtacacagaccaaatgcaatcttcgaggagacttttcttgtgaatcaagaaaatggctatggagaattgagaaactgggatagttttggtcgaagaattttgaacacatctcgtgaagacttgagagttttaacagaaacgccacggatctgaatcagatcatagctagtgtatttttatgcgacttcgatcttgcttggtcctcatgggcttgggctgtctctataggcccaattatatacgtccttttgtgttagagctaattcgttcttttttgtgttacagctaattcgttcgttttttacgcatagcatatacctaccaaaacgaacgcatgtcttcgctgtagcctgtaattcattttttcactttaacaacttcgaatatgatcaataatacaaacactttcgtgttaatttttttcttcttaaataaacttttctattagtctctttgtattgctatcataagagtataatgtttggtatatattaagactttttggaaatatgatggtccacacaaagaggtatattcgactattcgtagatttgcgagaggatcaaacttttcgtcgtaaaatgtttaccaccgttttatttgtctgaaactgaaaacaacgaacagtgtctatttaattaaccaaaacggcagacacaaatctctgggtggagccgatttctacggaagtcaacaaaacgcaccgtcgctgcagatcactacctcctctttcttccttaacgaaaacgaaaacattgaacagagagcaagaacaaaaaggcacgaaagcaaaagaattctcaaactcctgagaaaaattcgagctccgtgtgattaattaggtaacgtattgctcgatcttcagatgaatttggagttttgctttcttcaagcttattctattttgcgagattttcggagaaatgataaattaattgatgtttttgagtttcttcctgatctcgatgtgttcgaatgtaattagatttgagttgcgatattgagagatctctgttgtttgaattttgaatttggatcttcctgatgtggttttgcttcttcaacgatggggtttatcgttgctttcccaatattttactgagttcttaagcttactcgtaaagtgattatctgctaggtgttcttctgcaattgcttttgattcaatgtcctctttgatgtgaagtaatgcttaatcaattcatattttgcagtttgtgttggtaaacttcaatcagatgagtttgatgatgaaagtttagaagagtgtttttgcttccaaagcaaaataaaaacaaatg

SEQ ID NO: 32544 - DNA, 3003 bp, Unknown
  misc_feature (1)..( 3003): 2750-1469P.txt file - cDNA_ID_3058470; gDNA_ID_1620310; Annot_ID_152961
aatatggataatgttgagtatgttaaatatatagtgacaagttacataaaaaaagcctaaagaaatcaaattggaaaaaatagtaaggtacaatgtatggttatcgaaagcccaagctgtacttccattgatgtaggagatgattaggaacacgtggattatatttgaccaaaaatagtagaaattctatttatatttgttttcttcttttggttttgggtttgattttgtgatttggatagttcggttaaggatggtttgatcaatcaatataaccatactaaaatatgattcagttaactaactatagtaactgtttcttcgttagtaaaatgatacatttattggaatctattgacaaatcttaatgacttattataactggtgataacaaaatctagctattattttgtatccaactacatattttgtataaaatggaaattcgtatatgatatttgtttagtttaaaagtagagtgtatttgttttttcaatgatgatttaatgaaatcaagctcttagttgagatcaaaagacaaataaaacaaaatgtttttttttgttttgtttcttttctatttgagggaaggccatgaattcttatttttgacaaatagttgttctatgcaattaatattgatgtctaatacatatacagcagaataaataaaaacttgctatataaagacgtattatttatagcattctgtggagtataatgtcgaatcctgttctcatttccgattttacatatttatggtactaacgccttcatttatttttccattttcgttagtcaacaacttcagcttttgataacgcctaattgtatcatcaactttagttagttttctcaaataacgtcattttcaaataaagtttttgatttctcttttattatatttatgcaaaaggaaaattataatttcagtattttgcagaacgctgaaatgtataatagaacctattcatgtatttttgtaaaattttaaagattgttttaatactaaaataagtaaatcattaaaaaaattcctagacattggtctctaatataagataaatagatctaaattatgtttggattttaattctaataaaaaggtagccaaaagttatatatacaatatttaaacaattttatttgtttaagatttgaattttatagtatgcgagaatcgcgtaaacttttctcgaatgtaacaaaaaatttcaaatcttctcgacacatgtaatcttttgcgagttagaagatttgattccttattttttgttcgtattcttaaagttagtcacgtttatattatttttcgctttgtaaccgtccctttaaatttttaataaaaattaaaaaaattgctagaaaacaacatttttgtattactcaaatcaaaagtacaaaaataaatttagctagcgtttcacaaaatcaagtaaaataatctccatttgaaactccataatcaagctgtttgatgtattattattacatgtaatgaggagaaagaggggtcgagaaatttaaagtaataataattctcttcttcgtccatggaataaactacgattagtttaaaaagattaataaagatggattaaagaaactatatgttaaacctggaaaatttatttaaaaagacgtttttttagctataagaaaaaaaagaataatacctttatttttacatgttatttacaagtaataattttttttttctctctctctctttgaaggtggcacgagcacccataaccttcagacctatagatacaaatatgtatgtatacgttttttatatataaatattttatataattgatttttcgatcttcttttatctctctctttcgatggaactgagctctttctctctttcctcttcttttctctctctatctctatctctcgtagcttgataagagtttctctcttttgaagatccgtttctctctctctcactgagactattgttgttaggtcaacttgcgatcatggcgatttcgaaggtgacttctttcaaaaaccctaatcctctgtttttttttttattttgctggggggctttgtacggactttcatgggtttttgtagcttttccctcggcttttgcgcaaatgagactttctgggttttttttccagctttttataatttcatcaggtggatcgaattcgtagtttcagcttagatctctctccctcttcattatctggactttccagacttggagttcttcgggattgttttcggtttctgggttttgttttaattgcgagatttaagcttttttcttttttactactgtacttggtttgtggttgaccttttttttccttgaagatctgaatgcgtagatcatacgggatctttgcatttttgttgcttttcgtcagcgttacgattcttttagcttcagtttagttgaaatttgtattttttttgagcttatcttctttttgttgctgcttcatactaagatcaattattgatttgtaatactactgtatctgaagattttcaccataaaaaaaaaattcaggtctgaagctgatttcgaatggtttggagatatccgtagtggttaagcatatggaagtctatgttctgctcttggttgctctgttagggcttcctccatttggaccaacttagctgaatgttgtatgatctctctccttgaagcagcaaataagaagaaggtctggtccttaacttaacatctggttactagaggaaacttcagctattattaggtaaagaaagactgtacagagttgtataacaagtaagcgttagagtggctttgtttgcctcggtgatagaagaaccgactgattcgttgttgtgtgttagctttggagggaatcagatttcgcgagggaaggtgttttagatcaaatctgtgaattttactcaactgaggcttttagtgaaccacgactgtagagttgaccttgaatcctactctgagtaattatattatcagatagatttaggatg

SEQ ID NO: 32545 - DNA, 2402 bp, Unknown
  misc_feature (1)..( 2402): 2750-1469P.txt file - cDNA_ID_3058470; gDNA_ID_2926221; Annot_ID_142406
cttatttttgacaaatagttgttctatgcaattaatattgatgtctaatacatatacagcagaataaataaaaacttgctatataaagacgtattatttatagcattctgtggagtataatgtcgaatcctgttctcatttccgattttacatatttatggtactaacgccttcatttatttttccattttcgttagtcaacaacttcagcttttgataacgcctaattgtatcatcaactttagttagttttctcaaataacgtcattttcaaataaagtttttgatttctcttttattatatttatgcaaaaggaaaattataatttcagtattttgcagaacgctgaaatgtataatagaacctattcatgtatttttgtaaaattttaaagattgttttaatactaaaataagtaaatcattaaaaaaattcctagacattggtctctaatataagataaatagatctaaattatgtttggattttaattctaataaaaaggtagccaaaagttatatatacaatatttaaacaattttatttgtttaagatttgaattttatagtatgcgagaatcgcgtaaacttttctcgaatgtaacaaaaaatttcaaatcttctcgacacatgtaatcttttgcgagttagaagatttgattccttattttttgttcgtattcttaaagttagtcacgtttatattatttttcgctttgtaaccgtccctttaaatttttaataaaaattaaaaaaattgctagaaaacaacatttttgtattactcaaatcaaaagtacaaaaataaatttagctagcgtttcacaaaatcaagtaaaataatctccatttgaaactccataatcaagctgtttgatgtattattattacatgtaatgaggagaaagaggggtcgagaaatttaaagtaataataattctcttcttcgtccatggaataaactacgattagtttaaaaagattaataaagatggattaaagaaactatatgttaaacctggaaaatttatttaaaaagacgtttttttagctataagaaaaaaaagaataatacctttatttttacatgttatttacaagtaataattttttttttctctctctctctttgaaggtggcacgagcacccataaccttcagacctatagatacaaatatgtatgtatacgttttttatatataaatattttatataattgatttttcgatcttcttttatctctctctttcgatggaactgagctctttctctctttcctcttcttttctctctctatctctatctctcgtagcttgataagagtttctctcttttgaagatccgtttctctctctctcactgagactattgttgttaggtcaacttgcgatcatggcgatttcgaaggtgacttctttcaaaaaccctaatcctctgtttttttttttattttgctggggggctttgtacggactttcatgggtttttgtagcttttccctcggcttttgcgcaaatgagactttctgggttttttttccagctttttataatttcatcaggtggatcgaattcgtagtttcagcttagatctctctccctcttcattatctggactttccagacttggagttcttcgggattgttttcggtttctgggttttgttttaattgcgagatttaagcttttttcttttttactactgtacttggtttgtggttgaccttttttttccttgaagatctgaatgcgtagatcatacgggatctttgcatttttgttgcttttcgtcagcgttacgattcttttagcttcagtttagttgaaatttgtattttttttgagcttatcttctttttgttgctgcttcatactaagatcaattattgatttgtaatactactgtatctgaagattttcaccataaaaaaaaaattcaggtctgaagctgatttcgaatggtttggagatatccgtagtggttaagcatatggaagtctatgttctgctcttggttgctctgttagggcttcctccatttggaccaacttagctgaatgttgtatgatctctctccttgaagcagcaaataagaagaaggtctggtccttaacttaacatctggttactagaggaaacttcagctattattaggtaaagaaagactgtacagagttgtataacaagtaagcgttagagtggctttgtttgcctcggtgatagaagaaccgactgattcgttgttgtgtgttagctttggagggaatcagatttcgcgagggaaggtgttttagatcaaatctgtgaattttactcaactgaggcttttagtgaaccacgactgtagagttgaccttgaatcctactctgagtaattatattatcagatagatttaggatg

SEQ ID NO: 32546 - DNA, 2402 bp, Unknown; identical to SEQ ID NO: 32545
  misc_feature (1)..( 2402): 2750-1469P.txt file - cDNA_ID_3058470; gDNA_ID_2926221; Annot_ID_203288

SEQ ID NO: 32547 - DNA, 3003 bp, Unknown; identical to SEQ ID NO: 32544
  misc_feature (1)..( 3003): 2750-1469P.txt file - cDNA_ID_3058470; gDNA_ID_2926224; Annot_ID_203443

SEQ ID NO: 32548 - DNA, 3003 bp, Unknown
  misc_feature (1)..( 3003): 2750-1469P.txt file - cDNA_ID_3058491; gDNA_ID_1620311; Annot_ID_152995
ttgtctaccaatagtaaggcccgcatgatgagtgtggaggcttttacgagcgaggcggctagaatgattggaattacagtagagtgcagaaatatgtggtgtactactgtcagaattatttgatctaagttccatatacacagacaatcgatttaaaaaatcatgttcggaaaagacttacgaatcttttaaagaaaaacagcttggaaaagcaaataataaacattttaaattgtttattcgcaagaattatataaaaaaaaaaggttttaacttatagaaggcaaactccaaaaagaatatttcaggaaagactagaaaacattatcacattggcttttagatcctgttgaatcattcaatatgtattattggcagataacatttgacctaaacaaaagaattagttttctcgattatattttattagatctccgaaatctgtctttgggtaaaagtattcttgagaagttttgaaagctttacgtcattaatgacgccatcttatatgtattgattaccagttgattattatcccacgtggtatcgatattcaattgaagcaaaacaaaaaaaattgtttagttttctttgcgtctcgattcattttatccaaagctagcgttgactaattttatgagtacgattcaaaaaaataaaaaacatgcataagctctggtatgtcgacggaacctgttattgttgacttgatcgtattcccttttaagggatttcgtttactctttctaagattcatgtgtttatacaatattatcatatgatccgatttctagaaactttcacttataacctgcaagtagttttgtataaactttctatgaaacaattctacagtcaagaaaaaaaacagttctatatgtttgatgtgcaacaataacagaataactgacctatttaagtactctactcgtcattaatcaatattaatagatgttatgaagaaaaagggataactgagtaactgacctattacaaataaccttatatgtacgagtgaataaaaatataaattaaaatatggtaacggtctcattatattgcacaccgtaactgtctgcataagtttttaagtttaaaagaaaaccattatagaaagaagaaaaaaaaagccttacaagggttatatagatgaaacgagaaatacacactggtttgctttgaaatgtttcaccagatataatgaattggaagactcgagcaggatataaaaagtttcatcaaattctaatgaaaagaaaactcacttgatctctgttaaaataattttaccattcacattttagttttactaaaattattaaagtatattttagaaaactcacttgatctctgttaaagtatattttgaaaaccaattattgtggacagtaaaaactcatttgtgaagtgaaatccatgaagtctaagtcgaataatatttagaaacaagagttaaaatctttatgtatttcattttctaatttggttgaacataagctaaactctatatatatattgtattgtttttcttaaaatcaatcatacatacagaaatagttttctcaaatcatttgctaatttatctgtttctatttttcttagcatcaccaaatagatatgtcaatttcccatctctttatatataacaaaatatgatttatttctataaaataacaatcatctcatacacattaatctcgttgtgtgtcatctattgtgcaaaactgtttaattagtatcttaaaatattaatatatttactcttagtctttgtcgacacttagtcattgaaatagttaaaactattacaaccaaagattgcctcaaactcaaagtaatgcatagtttcacatgtcgatacaaattttgttttgtccttttatcccaagaaaataaaaattaaatcaatacttattcacacgtttcattaaataacaaagacgttgctttcatcgtctctagccgatttctagattctcctccaccaccattttacccttcttttaaattccttccttcaatcaaaattagaattatttctcaaacctcttctttatatactaaaacgtctcacatgaacaagaagaataaatagaaacaaagaagatgaacaagaacaagattgatgttaagatcgagacgaagaaaggatcgatggatgagtggcctgagccaatcgtccgagtccagtccttagccgagagcaacctctcctctctccccgaccgttacatcaaaccagcgtctctacgccccaccacgaccgaagacgctcctaccgcgaccaacatcccaatcatagaccttgaaggactcttctcggaagaagggttgtctgatgacgtcatcatggctcggatatcggaggcttgccgtgggtgggggttcttccaggtggtgaaccacggggtcaaaccggagctgatggacgcggctagggagaattggagagagtttttccatatgccggttaatgccaaagagacttactcaaactcaccaagaacctacgaaggctatggaagtagactaggtgttgagaaaggagcaagtcttgattggagtgattattactttctccatcttcttcctcatcatttgaaagacttcaacaagtggccttcttttcctcccaccataaggttcctcttctttaatcattttctcttctttttaagaatttttttagtgaattttcatgagtactgagtagaaaataataaatacggtatttttctattctttaaaatgtacggacatgtggtacaatcttgggaaattatcctctttttattagttttgatatactattaagttcttggggaatgtgagaaggctgattttttgcttttcacgaggagaattatgtgagttttaacgttgggataaagtccaatatagggaaatggataaattattgattatatttatatttattcaaaaaatagagaagtgatcgatgaatacggcgaagagctagtgaagctaagtgggagaattatg

SEQ ID NO: 32549 - DNA, 3000 bp, Unknown; identical to SEQ ID NO: 720
  misc_feature (1)..( 3000): 2750-1469P.txt file - cDNA_ID_3058498; gDNA_ID_1620311; Annot_ID_152990

SEQ ID NO: 32550 - DNA, 3003 bp, Unknown
  misc_feature (1)..( 3003): 2750-1469P.txt file - cDNA_ID_3058502; gDNA_ID_1620311; Annot_ID_152985
atcatatctttggttatttcacagatggtggtgatataacaagtttctatgtatttctcttacaggattcgagggggttgtcacaaaaacagatctttctagagccgagttcatcagaacctagattatatgttctcgttcgtaaaatggtcgaagatgatttggttggggaagtcatagcagaggagaataatgcgagttctaagaaacggaagagagaaaatcattctaaagggaccagagatagacgcaggtgtaaaccattgtccagacgaaaacagagaagcaatgtcaaacgaagaagataatatcaaggaaaatcaagaactcaaagcaaaatgataagatgataattggtccggattcttgaaaattgctttcactgtgactctagtttgtgtttggtcatcgttgatgcccttaatgaaccttggatagtattttgccaatttaaaggttaaagaactcagagactattgatttaagatactcggatgcaactgcatacttgtggatgtattatatatatcttatgataagtggttatgataaaaatttagacatgaaaaagcccaagaagaagcataaacatgtaactgttaagcatcagaagctgtagtttggatacacaagccatcattatacgtggacactaacacaaatgtagatcatacttgtcagctactaaagagttaaggaagatttgctccagtacaccaatgtacactaacacgctagaaagtagaagaaaacaaacaaagacatcctaaagagttctctaacttccatcctacagattaaaacaagtaacaggatcctccaatttcaatgagcttcagattcaagtaactcctctttgcttcaccatggtatttcctccaccaatctaattctacaattgcttacctgtacaataaaggcagatcaaacttcagtgaactcattaccatatgaagaatgttcgactactatgaacattgatcttttttctcaatttcaaacctggaagtctactcctcctaatccagttcaacattccacgaagctggagaagctaaagaagtaagagaatgctatctagacttttccttgccagaccactggaagcacagaagctcaactgaattgtatattgacaaaattggtattcttcaaaagcagagaggcacatgactttcacatatcaacaataagtcaattactaaccagcctcatccatgcttacaacaactaacagcataggtataacattgttgttgaaatctaaggtccttccacggatacattatgcggtttaaagagaaagagtaacaaccatgtaaagtctaagccaccactagtaacttgaaaacctaatgtgagttcttcttacctgaagcacttgcgcgtttccggtgctttgatttctcaatctctaactgcatctccatcaacatgttcattcgttttaactctacctcctttgtcacttccattctctgcttctccaactcaatcatcatctgttgcttcttcccttcaattctctcgtaaacttctccaaacttgagaatcgccgtagctagttccctacacgttgatccttcactcagatctacctcttccacacgaggatgcttcctagcaacgaattcccaatcaccaacctcatcatcatcctcatcatcatcttcaagagagcttccagtagagttcgatccagttggattcagatgattcttaaaaggcgctgatttgacaactccgccagccgatttcttcacaacgggaccgattagaacatcgaggcggttatagaaacgccaagtcgacggcgagagtttagctttctctgttttgtacttcttcttcaaagtatcgacccggttcttacactgtaagtcggtcttcttacggctgttatcaccgtgtctagagttaacggcgtcggcgacgtctttccagtcattctgccggagatttccgtggttcagcttgacgtaacgattgccccaggcttctaccagcgtcgccgtcgcttcctcactccaccagtcttctcttcccaacggcggtcggtgggacacacttgattttgactgcggcgtcgtcgtctccattcgtcgggagtagtgttgctaatgtgcgcaccgggaggagagtgacggcgtaggataagatcggaatagaaacaaacaaaacataaaaagaagttttttttttttggtgggaggaaaccggaatgggagagaagaggataagtgtggcctgacattgatgaccggcggtgacgtcactgaccgtattggagcgttttggtcccaacggcgattatccgttaagaccgaaccaatctctttggtctcgttagtacttatgattaaactgttaaaaaaaacctcataatttttcatttatcccaaaacaaacctcaaactaaaaagattacataaataaacctctaaaagtgacagattgggtcaatagcaaatagttggaaatattttagttttatttcattttaagccttcaagttttacttctttccaatgtttaaattttgtctttcataagctcagacttcgtcccagatttcattgcatctagcacagaaagtgtttgattaaattcctctgagaacatctctctttcactaagcgaaatcttccgactttcgatacttttttgaacctcactttcttcattccgttcagtttagagcctcgacaatcatcggaactcgtttgaaacctctctatccggtttctaatgtaagtgacaattcttcctactcacttcttcttcttcttcttcttcttcttcttcaatgttatcttcctctgtctcgcttacttttcataaaacgatttcgacccgcaggtttaaagagaaatgagaatctcaaataaaattttgaaaatagaaaagactagggtttaagcgctaagacaacttggaaagagcgggagagtgtaaattaaacttcaccaatctccattgcctgttggcttcggagaaaaaatg

SEQ ID NO: 32551 - DNA, 3003 bp, Unknown
  misc_feature (1)..( 3003): 2750-1469P.txt file - cDNA_ID_3058508; gDNA_ID_1620311; Annot_ID_152983
tcttttccagagtatgatttgatgtcgacgatcaatgaagccagcaaattctcgtagccgttctcgttcttcgccatttttacttcgccgaattgaagaaagcaaaaagggacaaggctagtgggagatagagagagagagggattatatgaatttgaaaaaagagtgcaccttttgattttgaaacgttctgatacagcaagaggctccacgatccctgcgtaaagctaaccggctaatcggtcaaccggttaaccagataatcagataaccagctaatcactcagccggttagccagataatcagataaccggttcagtaaggtattgacaggaattgtaaaacgctttttggaggagccgtcaaattgatttcgccgatttgctcatctctgactctcagttgctttgctccttctcatggagaatccggcggagaaacccgacccgaatccatcaaaacccaaaatcgaatctgaagatgaaagagaagaactaggagatattaacggcgacgaagaagaagaggaagagtatgaggaagaagacgatgggaaacctcgaacgcgagaggatgcaatcgcggataggatcaaagctgagtctctgttccgtcgtatgcgagcaactccggtcgctgtgcgtgttcacgacgtgatcgtcaagggaaacgagaagactaaggatcatgtcatcgaggctgaggtggatgttgtgaggcaagccactacgttgcaggagcttctcaaagcctctaaggttgccaatttcaatctacaagcgcttgatatcttcgattcagtcaaaattacgcttgattctggtcctcctgagcttcctggtaccaccaatgttgttatcgatgttgttgagagcaaaagccctatcaccggtcaaatcggaaccttcactaaagcagaggtatcactttcgttttcttatttcagtggattaggatacttaggtcttggcaggaagaattagatacatccattgattgatgcatagagttggatttgttgctttatgaggataattctggatttggatttcatatatagacttttgtatgtcatgtgttttagtgatttccagattaagtgttcttgtgagaatttgaaatgttgaatgttgttcataagtctaatgttcttgtaggctcggtcatcaagccttgaaggctctttgaagtacaagaacatatttgggtatggagatatctgggacgggtctcttgcttatggctgtgatcactctgcagaggtcggcttggggatgtatttgccaaggttcagagggcgtcctactccatttacgtcgcgggtttacctttctacccaagattggcttaagttttcgtcttataaagaacgagctcttggtctttccctcgggcttatcgctagcaagtatcatgagctggcctataatattgcatggcgtaacctgatagacccatcgcaaatggcatcaagatcaataaggagacagctgggtcataatttggtttctgctctgaagtacactttcaaatttgaccagagaaactcatctttgaggccaacacgaggttactctttcatctcgacttctcaaataggtggtcttgcacctgatagtcgaactctccgctttttgcgccaggtttgggattcttcattcttatgtcagaatttacataaacctatatattacagtgtggaaagttgtagcacaaatatattactcagaaaacttccatggcacctagttcctcgtttatgcttttgcaccatttatccataacttccgaagtacatctgacactctttacttattgtagcagtgaatgaaaagattggttagcccttttataacatatgtggttcttttatgtttgccatacatcatgttgagggtttcttgtccttttgcaggaaatcgaccttcgatatgctgttccactcgggttttatcgtgctgctctgaactttggtatagctgggggaatcacatttccatggggaagcggatacaagagcagagcttcttgtgtacctgagaggttcttcttaggtggaaacatatcgcctgtgtgttctttgggaggaccatctgcattatggggattcaagactaggggattgggtcctaacgaaccaaggagggaagtacaggacgatgagagtggtgacacatatgaacgggattttgtgggaggagatgttgcggttactgcatttgcagacctttcttttgatttcccattgaaatggttcagagacagaggaatccacggacatgtgtttgcatgtgccgggaatatggcggaattatcagagaacaagtataggaacttcacagctccaaagttgttggagacattcagaagctcagttggtgcaggaatcgtggtaccaactagtctatttcgcatggaggttagttagttctcttgtttctcttttcttatcaaggatcataaaaaaattgcaatccttttaacagatattgattgttcttcttttgttatgtgatctcttatgccagctcaactactgccacatactgaagaaacaagaacacgatcgagcaaaatctggatttttcatgacattttcaacatcatcttaatgctacttttgatgatatcttaattttggctttgcactcacagtgtcatggcggagtcttttgttttgtttccaggagctttcattgtttaggttgttgtttggaattgaaaactgtgcaaattttagagagagagattacctgatgtgcggattgttcttgggaaggagatagatcaagaaataaaaattaactaaagttgatttgttttgaattaaattttaaattagtaataaactttttgttttccttccttttcaatgaagataaagatgacacggtagaataaatttttgtttcctttttcatgaatatgttttggatcgagtactgtcatctctataaatataagtccaattacaagtagattgttgggtggacaaagtcatg

SEQ ID NO: 32552 - DNA, 3003 bp, Unknown
  misc_feature (1)..( 3003): 2750-1469P.txt file - cDNA_ID_3058512; gDNA_ID_1620311; Annot_ID_152982
aagctatagccggagctaaaatcagcattatctgcaagaatcataggcaacaagtgagtttctacaaagtctttcgaactgattcctacggccatttctatggtgagctcaaaggtttcaagatgactccacatttcttggaccatcctcttcattcttgccgagccaagctcgtctcttctcctcgtgaagactgcaatctcttctccaacattaacaatgctctagatggagctccactccgatatgaagagaagaggctcaagtggactaactatgaggccgtgatttacgccgctggtccattggctttccgtcctgaccactgccctgcgactgcaccacccacttactgatttgggttttgaagatcatcatatactaattacataagacaatgttattgatttttctctattttgtatctttttggttttatggtttgtcaattgtttgtaagatgctgagtaatattgtaatggcctaatgggactcttgtgactcaattttgctcagtttaaatcggttaaatcattggtcacagaaacattataaccagaataattctaaatctcaaaccttacgacacaaatatgtcttcaagttacaacaagaacaaagatttctcataatttaacacaacagagaggtacaaagcaggaacatcgaccacaaacattgtctgcttctaggcatacgttatgagagtagaacaaagtggaaccaaataccttgttccttagaagtccattggcattgcaaacaatttgttgatttcatccaaggctacttttgtgcataccgttggttcaaatagttcgcgctcatctgattttgaaggcaatctctgagtcggctggctcttcccttgatgttcttgctcagcttcttcttcatcatcatcctcgagtattgagaaacctgcagcaggatttggttttgtctctactactgcttttcctttgtttttagagcggttgggtctaacaaaattgattggttcgccaaacatgttgtttatgtcctccatagcttcctttaggtttactgtagggtcaacaaggccatggtggcaggcgttttcaactgcttcaggctcatcggagattgttgaaccaacaaatctacgaacaactgtatcttctctaaatctagcccgaggaggagtgtttctgtctgcttcttcagagctttcaggtgaatggtctcttggcaggagaaagacaaaagcttttccagcctcatcattttcatccgcagtttcatcagtgttttcatcatcaatgaatatctcaaaggactcttgattaggctgggatccacactgagtagtactagtctttgcttttccacttgtccctgtttcacattcgagattctcgtccagaaaaacctcaaagctattgttgcatccttgattttctttgttctgacttctctgtcgtgatcttctctgaagtggagcagtttctataggctctttgaacatgttgttgattgtattcatggcttccttcatgtttattgtgggatccaccaaaccgtgatggcaagcattttctgcttcaggcttccctacaatggctttatcaacaaaattcaacacaggctcatgttgttgcctctcatcaaccttgtggtgctttccagacagtttttgttcttgacgctgcaagaggaaacataaattcagacatctgcagaaattgtaacccttatacaaacggagcaatcaaattatggaaacagtacctgtgtcttcttctttttgtgcctctccatgcgagtaacgaactgcaagtatgatttctgtaactcatccatgggttctgcaaggctgggaacaagaggaaatagtcactcaatttaaatcatgtcttccacatatcacatatgctagctcaaactggcattatagcattcctcatatccacaaaaccaagaatagatttgattgatatatgttgcatatgcatactcactcgaatacatttttctagagtttccaagaatacttacttttgaaccccaagacggtacattttctcagcatcctcaaatctcttcatcttctcataatggagagcatatgcctggtagaagagtgacctcttggtccctatactttttgcttccatggttcttaaaagagctcttggatcgtctacaaagtccatctacccaaacaattcatcatcacccattaagacccacatgctaacgaatcaacatctgctatcaaaatcaagtgcaaaatcaaggggtgaatgtacattaccagctgcaaccaaacacgaatataccgcgaatcgttcttatatctcttatcagattcaaatgactctgcacatttctgcaaaaaccgcggcagcttctcgttcaatatctgagacggcaaactctctttcatcttcttaacacctctgtttcagattgacccaagattcaacgacacataaatcaacacaaacatctattcaattaggtttctatgaacttaaagatacagacccgcccacaaaaatggtgacacaaagagtaagacatagacaaaattaccggatccacggaagaagatggtcttttccagagtatgatttgatgtcgacgatcaatgaagccagcaaattctcgtagccgttctcgttcttcgccatttttacttcgccgaattgaagaaagcaaaaagggacaaggctagtgggagatagagagagagagggattatatgaatttgaaaaaagagtgcaccttttgattttgaaacgttctgatacagcaagaggctccacgatccctgcgtaaagctaaccggctaatcggtcaaccggttaaccagataatcagataaccagctaatcactcagccggttagccagataatcagataaccggttcagtaaggtattgacaggaattgtaaaacgctttttggaggagccgtcaaattgatttcgccgatttgctcatctctgactctcagttgctttgctccttctcatg

SEQ ID NO: 32553 - DNA, 3000 bp, Unknown; identical to SEQ ID NO: 719
  misc_feature (1)..( 3000): 2750-1469P.txt file - cDNA_ID_3058520; gDNA_ID_1620311; Annot_ID_152978

SEQ ID NO: 32554 - DNA, 3003 bp, Unknown
  misc_feature (1)..( 3003): 2750-1469P.txt file - cDNA_ID_3058532; gDNA_ID_1620312; Annot_ID_153034
aattaaattaaaattttgataaatgtagggtgatatttgggatgttggtctctctacctgtgctcgtcgcctactacgcagctctggagtttattcattgattaaactaataaattcgattatatcatcaatattaccctttgttcatctttcacaagtttttttttttgttatctcttttacactttcctcctaaaggagattttgaagtatattcgagatatgaaaaccattaactgaatgaattaacctagtttatgcttaattttatactttcttaagctctctttattttcgtagtatgcataatttagtattttgttcacatatacgtatcaagaaaagataaaaactctataaatgaaaatacatcatgttcggatctaaaattgttttaatacgtacactaaatattataagccctttttttgttaacaaaaaaaaaaaaagaataaatgaaacgaaattcaggttagagatcaaataaaatcttgttattatttgattcatgatcatacatactaaccaaatcaggatttatgaaataaattattctttctcctcaaccgaatcaatatgaagataaaaggggtaatttagtcttttcgaattcgtttttcttaccgaatctctttagttttttttctttcttttgtgtggaggagagaagagaacgcaacactttcttcccaatctctctctgctttctctctctagacgtgatctctaattctctaatgtcttcctgcattgccatttcctctaacccctccacaatcggaggaagacgattcctgggagcaagagaaacgatgggacttcccatcggaaaatctcttagagtgagagaattatggtgtgttcttaatgcttaataatcaccgacacagccattgttcttcatcatctccatggattttgattccatttctcgggaaagcacttttctttccccattgcttaaccaaagtaccatcctttattccctctctgatgttctgattcaatcttaaaaacctcagcttgaatttttgttgtggggttttggttgggtttgtgaattttagatgcaatgtggcaaatgaacttgggatcagatgatacaatgggtgttgatgggtcttatccggaacgtcacggagagccagattgtgcttattatataaggactggactttgtaggtttggttcaacttgccgattcaatcatcctcacgaccggaaactggtactgactctgtttctgtgtttgttctttcctctgtatcttgttgactcaaagtttgtagctttgagggtctgtgtgtgtgtgtgattacaagctgatgaatagtctcgtatccaatttctaggttatagcaactgcaaggattaaaggagaataccctgaaagaattggtcagcctgaatgtgaggtagctctgtttcgaattactatcatagtaatgtcttctagttatcacattgtctcaaagcttctatttttgttgttgtgtctgtgcagttttatctgaagacagggacctgcaaattcggagtgacttgcaagtttcatcatcctaggaacaaagctggtattgatggaagtgtatcagttaatgtcttaagctatcctctacgtccggtatgtatacatttcaactttctaatctcaccactgctttgtaaaattttgcctctctcatgagttctgtttgcagaacgaagatgattgctcttactttttgagaattggacaatgtaaatttgggggaacttgtaaattcaatcaccctcagactcaatcaaccaacttgatggtttctgttcgtggctctccggtttactctgctcttcaatctctaactggtcaaccgtcttattcttggtcgagaacatcttttgttgcaaaccctcctcgtttgcaagatccttctggtttcgcttcaggatctcaaggaggtctcttctcatccgggtttcattcgggaaattctgttccgctcgggttctatgcattacctagagagaatgtattcccggaaagaccaggccaacctgaatgccaattctacatgaagacaggagattgcaaatttggaacagtctgcaaatttcatcatcctagagacaggcaaacccctcctcctgattgtgtcttaagctcggttggccttcctttacgcccggtaagctaataaaagacttcagattctttcctttatagtctcattatgtggtttggtaaattcttgttgctggtttgaaacagggagaaccactgtgcgtgttctattctcggtatgggatctgcaagtttggtccaagctgtaaatttgatcacccgatgcgagtcttcacttacaacaacaatactgcatctccttctccttcatcatctctgcatcaagagactgcaatcaccacagagctcaggaatctcctagtctcttcttctgtggaagcaaaacccacatcactccctgaaacaacctctgctaaagacaccattgttgatgcacagcactgaaaaccctgtgttttgtctatcttgaaacaatatgtaacatttgttttgctttatcttgtaagcatttatgtacagagatgatatctgatctaatctgattcgccttttgttgtaattttctattggcaacagtttgtgcattaaaaaaaaaaacagtttggtcttaaacgggccttcaaaaaacgtctaacaagcccaataataaaaccataatgaaaagaagaagaaaaaagaattaaccactcgcatgtgtaacgcgttgaatacacacgctcgttgtatctatctatctactcctccggttaacgggggtttaaagccacgtcggtgctacacatgtccctgatttctcctttaacataaaactaaacagctgttttgtccgcaatcattatctattactaataaaaaatctcaacttttgttccttactcttattacttcctaaatccgatcgaaacaactgttgggttagtttctaatttccaagaatg

SEQ ID NO: 32555 - DNA, 3000 bp, Unknown; identical to SEQ ID NO: 731
  misc_feature (1)..( 3000): 2750-1469P.txt file - cDNA_ID_3058553; gDNA_ID_1620312; Annot_ID_153035

SEQ ID NO: 32556 - DNA, 3003 bp, Unknown
  misc_feature (1)..( 3003): 2750-1469P.txt file - cDNA_ID_3058556; gDNA_ID_1620312; Annot_ID_153033
actacactcactatttacaggaaacaattggaatagaatcatatgccacggcacggtctggtcaattatattgataacgataactctcttgtttctcaattaaactaatggctaaaaatatgaggttgattttaatttttttatctaaatatttagactcaaatttcaattgtatctattctataggaatttagccaaattatttataaatattcgtaatcatattccgaagaaaaaaatattattgtttaatttatatctaaactttacttttgtttgaatattactcatggatatctcattacctatcttttttctacaacaaataaaacaattaaaaatttatctataaatatgaacatgttggtttctctatcgtaacacatttactatctacgaacgaatttagaagctttgttttctttcctttcgtttgctactactgcaacatttctatttttctgataaaaccatgataaattgtggagatgtttacaaggtaatcgaagcaatggttccactctatgtagccttaatcttaggctatggctctgtgaaatggtggcacatcttcacgcgtgatcaatgtgatgctataaaccgtctcgtttgctatttcaccctgccgctcttcaccattgagttcacggcccatgtcgacccgttcaacatgaattaccggttcatcgcggccgatgtcctctctaaggtcatcatagtcacggtcttagcgttgtgggccaaatatagcaacaaaggaagctattgttggtccattactagtttctctctatgcactcttactaactctcttgtcgttggtgtgccattggctaaggcaatgtacggacaacaggctgttgatctggtggttcaatcctcggtatttcaagccatcgtgtggctcacactcttgttgtttgtcttagagtttagaaaagccggatttagtagtaataatatcagcgacgtacaagtagacaacatcaatatcgaaagtggaaaaagagaaactgtggttgtgggagagaagtcgttccttgaggtcatgtccctcgtttggttgaagcttgcaacgaatccaaattgctattcttgcatccttgggatcgcatgggcttttatttctaacaggtaaaaatgaatctttaattaaactttatattggtacctataagatgtttaacaaagtgttaattagtatgtgtgatcagggactcaggagactacattaattccaccccttactccgaggcaaccgttaaaattgcctaaaaatatctatagtttgacgtttaaaccatctaaattattacttttctgtgtagcgcctgatgatctatagttaaaattttgacagaaatataggtcacgattgtttctttgcatttgcgtttatatttccatgtgacaaatgactaggacatttttaacatggtaacataatttgcaaacgtgacatgtacatgcaaataaactaatcatgattttaatctgaatattagagtctttgaccaaatttctattttatttgttttagtgtgaattttgggtttagggttttgattagtgttttgtatactcttggctaacaaataaagacttaagtctaataattgatggaaattaattggaaatatagatggcatctggagctgccgggcatattagagggttcgattcttataatgtcaaaagcaggaacaggaacggccatgttcaatatgggtacgtttatttatgtccatgcaagtatctttctatacgtaaagattacgtatcagtattgagataacagtgaatacatgcatatatacgcaggaatattcatggcacttcaagaaaagttgatagtatgtggaacaagcttgactgtgatgggaatggtattgaagtttattgccggaccggcggccatggccatcggctctattgtccttggcctccacggtgatgtcctccgcgtagccatcattcaggtcataaattctactttatccttttgtaccctaattctactgaagtttgtatataaaaaaaaaagtagatcattttccattcattcatccactaagatactaactttatatttttcagtttaatatatcattaatatttatatgaaatttacaggctgctttgccacaatcgattacttcgttcatttttgctaaggaatatggattacatgcagatgttctaagcacagcgtaagtccaaattttaaaaattcagtctatttaagaagaaaatggtaatatgaaattaaattaaaattttgataaatgtagggtgatatttgggatgttggtctctctacctgtgctcgtcgcctactacgcagctctggagtttattcattgattaaactaataaattcgattatatcatcaatattaccctttgttcatctttcacaagtttttttttttgttatctcttttacactttcctcctaaaggagattttgaagtatattcgagatatgaaaaccattaactgaatgaattaacctagtttatgcttaattttatactttcttaagctctctttattttcgtagtatgcataatttagtattttgttcacatatacgtatcaagaaaagataaaaactctataaatgaaaatacatcatgttcggatctaaaattgttttaatacgtacactaaatattataagccctttttttgttaacaaaaaaaaaaaaagaataaatgaaacgaaattcaggttagagatcaaataaaatcttgttattatttgattcatgatcatacatactaaccaaatcaggatttatgaaataaattattctttctcctcaaccgaatcaatatgaagataaaaggggtaatttagtcttttcgaattcgtttttcttaccgaatctctttagttttttttctttcttttgtgtggaggagagaagagaacgcaacactttcttcccaatctctctctgctttctctctctagacgtgatctctaattctctaatg

SEQ ID NO: 32557 - DNA, 3000 bp, Unknown
  misc_feature (1)..( 3000): 2750-1469P.txt file - cDNA_ID_3058577; gDNA_ID_1620312; Annot_ID_153016
atcgattgggttgagactagccgtccgataccagttatatcaaggatctacagtacaggatccaacgatggacccgctttcgttgtttcgtctggaaagagttttccagtggcccggattgatttcgggtggggctcgcctgtttttggatcgtaccatctcccacccgggagcagagctggttacgtaatgacaatgccgagtccggtggaaaacggtggctccggagattggacggtttacttgcatcttacgaaaggacagttgaggtttattgaacaagaggcttctcatgtgtttaatcctgttgacaacgactatctcaagatttaaagcattatcaaactttggttatattattatgcaaataaaggcttatataaatttggcttttatagttgtaaatttcagtttaagatcaatattttgatttaagtttaaaccaaaagaaaatgagtgtgcagattgctaatggtaatcgactaatcgtcaattcttggccttacattgtgggggtatgatcgtcattttacactccgataattctgaacctcgcgtccatcgaacccgaaaatacgtaaacatccccaaatgtcttctttcttcgttatccatttgagggtattattgacctcacggtaagaaaatctacaatatttcacggataacgaaaacaacactcgaattaaaatttggaaatcaaaagtctcccaggttcctttgaaagatcacactactgttttttggactcgagcttcttcttcaacaatgcctctctctctccgacttgctccatctccgacgtctttccgttattctccgattacatctaccggcgccggaggattttcccccgtgaagcagcactgccggatcccgaattcgggcgtcgcgacgaaaattggattctgttctggtggtggtggtgttttagattccggtagaaggattggttcctgtgtggtgaggtgtagcttagaaacagtgaatgtcactgttggccaggtgacggaggttgataaggacacgttctggccaattgttaaagccgccggtgataagattgttgtcctcgacatgtacactcagtggtaacgtttcgatcacttcttcttcttcttggtgcgaattttggaattacttgattgcaatctcttgtttggaactacttgattccgtcgcatgttcagagaattggaaaattcatgtacttagatttttgataggttttggataagtcgttggaaattagggttgattagggatttctcagttgatataacattgctaagttgtttaccagagaactttgctttagcagatcctcatgtctttaattctcaattgccaattcttgctacaacataatcatatcatggtctctaaccatatcctttgcttctcttggcctatttttagctctatgaacctcacattgtgtagcttccatagtttagggttagtatatgatcaccttgttactttcaattgtattcaaaagttacagcattgtaagtatcatatataatcttcacagtatcaggctgctgcttctctgtacacattcttttgaattcattttttggttaggaatgatatatacaaaaggatatgaagttatgaatagtgagactttcaggagaattagagcatgtacatttaataaataagcataaaaggtgttccaatttccatcatcatgaatgcttgagatgagtttactattaaatgttctgttttggtgttgagaaaaatcagtttgcctctcttttttttcaatcctcgtttggctctttgcaggtgtggtccttgcaaagtgattgctcccaaatacaaagagctatcggagaagtaccaggacatggtgtttcttaagcttgattgtaaccaagacaacaaggtttgttcttctttttccgctgaatgtgtctttatatttatgttacttatttcataactcaaaaactcttgcttgcagccattggcgaaagagctaggaattagagtggttccaacttttaaaatcttgaaagacaacaaggtagtaaaggaagtgaccggggcaaaatatgaagacttacttgcagccattgaagcagcaaggtcaggctgagtctctctctatatcactcattatgtaaagtattaggatcattctccatccatgtaattcgtttggttctatgtatgtaactctttgctgttcccttaaccggaatcggttgttcactatctatgtataaatgctggaaagttatggaatgatgagctgaatgtgtatctgtatgcatcacaagttcataaccaagtaaatatgcatgtaaactataagaaatttaaaaattaagattgattttaattttgggggacccgattgttgaaatagatgcattttgtttatagttttggcttacatgtacgatgcttgtgctttgttttcaatggatgttccaacttccagctagattgttaacaagtcatatcttcatttagttgttcaccaaatccagtctcgcctaattttaaaaatttaatacatttggcgtatgtatattaggctaatgtatttggatctattcatgtatttttttataaaaattggagacaccgacagcattttcatctttagatgcagtcggatttttttcttgctgaaaaaatgtgtttcctctaaagagtttagagaaattgtaatttcctaaacaggattttaaccctaacattttttatatttatttaaaagtaataattcatttaaattcttcaaggtaaaaaatacgatagtccacaaggattgggagtaatcgcgaatacagaacaacagatcagagtatgacacgtggcgaaatctgaaagagagttataatcaaagagaaacgcgttccgaatccgacatcttctctctctctttctgaagtgaactgttgttgttgtgctctttggtttcatcgagagagaacctaaacccgatctgaaccaataacaataagaagacgaatg

SEQ ID NO: 32558 - DNA, 3000 bp, Unknown; identical to SEQ ID NO: 727
  misc_feature (1)..( 3000): 2750-1469P.txt file - cDNA_ID_3058583; gDNA_ID_1620312; Annot_ID_153013

SEQ ID NO: 32559 - DNA, 3003 bp, Unknown
  misc_feature (1)..( 3003): 2750-1469P.txt file - cDNA_ID_3058585; gDNA_ID_1620312; Annot_ID_153007
tgagtcacagtacagagtcttttttatctttctatgattagtcaagtcgcattaaaatctcaaggatatagatgaatatagatgaaaagaggttttcttccttgttattaatggagtcacagcaaatgttttttacttcttacgattgatcagttcacattaaaatctcaaggatatagattagatgaagctatgttttaaaaaaactgtttttttatgaagtttccatgtactgcagatcatgtggttggtggatatctttagagcaaaaatcgtggatacctcagagcaatctctaacgattgaggtcagaccttttcttcagtttatatgtgctcagatcatatggtcaaaatggttccactaagtctcattttttattgtgtaggtaactggagaccctggaaaaatggttgcactaacgacaaacttagagaagtttggaataaaagaaattgcgagaacagggaaggtaatttttcactttcaaccactttttgctccaatccttcttaactgtcaacaacgtctggctctaaatgtcttcaaattacatcttctgtcttgaaaaagcttgtttgaacggttggactcacatgtatcattacttgtagccacttggagcctcttttttttttttttttttttttggtctattatgtcacacatacagacccgagttcctttggtgaatctcaggacactctaaatggcagagcacatgaaattcccagtttagctttaaatacatgttcacatcttacatgaaaactgattaaattacttaatctctaatgcggattttatcttcttttccatgtagttaatttctgcgtttcactgactataatgagtaattttaagaatcagcttttttaatcctaactgttgttgtatactactactctagattgctctgagacgggaaaagatgggagaaaccgctccgttttggagattttcagcggcatcatatccacatcttgtaaaggaatcatctcatgagactgttgcagagaaaacaaaactagcattgactggaaatggcaatgcatcatccggggtatagaaatattagctaatttattttctccctgtgtatatctaagcactagtagattgaacgagattaactgatactttattttagggtgacgtttatccagtggaaccctataacgatttcaaaccggtccttgacgctcattggggaatggtctacgatgaagatgtaagacacgtttctcggatactgcattcgttttataattttctttttgatccagtaaatccttcgaaattagaggtcaaagtgaactaaaactgtttacctttttgcagtcgagcggacttcggtcccacacattatctttacttgtggccaacgttcccggagttctcaatctaataactggagctatctctagaagaggttataacatccaggttattatgcacacacttttgcttttagcttcaccgatgtgatgcatactactcatttctctcaagagtatgtgaaagttgttgcttttattgctctagagtctagctgttggtcctgctgagaaagagggcttatctcggattacaacagttattcccggaactgatgaaaatatagataaattggttaggcagctccagaagttgattgatcttcaggaggtgagctaatgattcgaaaccgtagtgtactttggttttaattttaattttatatgtctaataacgtttccctttcattggcttttctagatccaaaatataacgcacatgccatttgcggagcgagaactgatgctcatcaaagtagctgctgatacttctgcaaggagagatgttttagatattgctcaagttttccgtgctaaagccattgatgtctctgatcatactatcacccttgaggtgctgatatcatatctccctgaactttacaacaaaaagctctcgtagctttctgatatttcaagcttgagatgagatctagtagctgatgaaatccgtcgatttgcaggttacaggggatctcagaaaaatgtctgcattacaaacgcagttagaggcctatggaatctgcgaggttaaaaaaaagtttcttgatttatctctaatctcttcacagacacggtcactgttgtgtctggcgattcttatggtttgtgttttatgaaaattgaaggtggctcggacaggaagagtggcattggtaagagaatctggagtggattcgacttatcttcgtggatactctcttcctttgtagttctagaggttagtaatctcttttataatcacagatgcatcatgcattgttgtcgttttacatcatcatcatctgtgttatatatcaaaggaaattcttgtgcagaggacttgccgcaagcttcagtgtcgttcctggaaactagtcaaaaggactgcacgttgtttcagcatctgtgattgattgcttcctcacgagtcatggcgcttcgagttgttgttataggaggagctattttatgaactaaaaataaataattatctttgttccgttaaattagttttgcatactaatcaaatgtagaacactgttactagtttgtcacttatttagtatcaaagacgtgtattagtatatactccaatcgatcttaacttaacaattaagctctaaccggaccggacttggttagatcttaacttaacaattaagctttaaccggaccggacttggttagaatccttccttgcgaaccaaattagggcaaacttgtaatattgaggaaacgtttaattcttttcgtgtttcttcttcgcagcaattgcagaaacttaaaaaaaaaaactcaaaaattagatcttaattcgaggattctacttctgaatctgaggaaaagctatcccagatccgatcagatctgttttgttgattctcttcttcttcagtcagtggaagctatgatggattgctaaaagagaatacaatacgcacgaagccacgcttgagaaaccatg

SEQ ID NO: 32560 - DNA, 588 bp, Unknown; identical to SEQ ID NO: 725
  misc_feature (1)..( 588): 2750-1469P.txt file - cDNA_ID_3058589; gDNA_ID_1620312; Annot_ID_153006

SEQ ID NO: 32561 - DNA, 3000 bp, Unknown
  misc_feature (1)..( 3000): 2750-1469P.txt file - cDNA_ID_3058606; gDNA_ID_1620313; Annot_ID_153062
tttcccgtggacggaacttttgatcctttcgttgttgggtaatttaaagttttcatctttatgttcttttttggtgattgatcgatttttggcaatgcctgtaaggtgttagatacaatatctgagtaaatctcagtcattgtctgttaaagttttgttttgttgcaagtctcaatcaaaagttctttttttggttttgttgttttctgcttagttttggtgtttgactttgtaacagactgtactacacgaaactacgattaggaactcctccaagagatttttatgtacaggttgatacaggaagtgatgttttgtgggttagttgtgcttcttgtaatggctgtcctcaaaccagtggactccaagtaaagcttttgaattctttgtcataatcttggtctagttatgatttctgtggttttggattgttaatatgatgcttctttcttttgcagattcagttgaatttctttgatccagggagctctgtaacagcatcaccgatttcatgttctgatcaaagatgcagttggggtattcagtcttctgattcaggctgttctgttcagaacaacctttgtgcttacacgtttcagtatggggatggaagtggcacttcagggttctacgtatctgatgtcttgcaatttgatatgattgtgggaagctctctggtcccaaactcaacggctccggttgtgtttgggtgagtttatttcagcgaatcctttgtttcatagtcatcaatatgggccattactcttgactttgttggttgctatgtgggattgtttttctggaaccagttgcagcacctctcagacgggagatttagtgaagtctgatagagcggttgatggaatcttcgggtttgggcagcaaggaatgtctgtcatttctcagcttgcttcacagggaatagctccaagagtgttctctcactgcttgaaaggagagaatggaggcggaggcatattggttcttggagagattgtggagccaaacatggtctttactccacttgttccctcacagtgagtgttcatttatccctcgaaaccgtttcattttaaatagttgttcaaatgttcattagagagtgactgataagcatgatcttatttaaatagttgctcaaatgttcattagagattgactgataagcatgatcttatggcgtgttaaaatgtcaggcctcattacaatgtgaatctgctgagcatctcagtaaatggccaagctttacctatcaatccatcggtcttctctacatcaaacggccagggaacaatcattgacactggtacaacattggcatacctttctgaagcagcctatgttcctttcgttgaagctgtaagtcatcagagctcacgttgctatatgcttttgatatcaccgaaccatctgtgaaatggagttactataactgtactccattgacttgatactctgcaatcttcgttcaatacttaaatgttatctgtcttatggaatttttcagattacaaatgctgtttcgcagtctgtcagacccgttgtttcgaaagggaaccaatgttacgtaataaccacaaggtctatcctctgaccacatcttcttatcccaagcatgtcttcttaattggtaaacatttgaacttttttattgtactgtgatgatcagtgtcggagacatatttcctccagttagcttgaactttgctggtggagcatctatgttcttgaatcctcaggattacctcatacagcagaacaatgtcgtaagcactttaactcgcaaccttttcataggaacctggtttcagaatctgaacctaccttgacctgaaacagtgagtttttttttttctgttcctggtataacattggcctctgcactctgctttctagggaggtactgcagtgtggtgcatcggttttcaaaggatacagaatcaagggataacgatccttggaggtaacccgaatcgaaagctgaagcctttgttatttgaaatctacatttggtaacacaaaacatctgtttttgtcatctttttttcttctgcagatttggttcttaaagacaagatctttgtctatgatctggtcggtcagagaatcggatgggcaaactacgactgtaaatctcatctctttaactcaaatgacaccctaaagcaatgaaatcttaccacacttaaaaaattcttaaccttttttatctttcttcaggttcgacgtcggtaaatgtctcagcgactagcagcagcggaagaagcgaatatgtgaacgcaggacagtttagtgagaatgctgcagcaccgcagaagttatctttggacattgttggaaacactctaatgttgttactaatggtaatcaacatgttcttatagcacacagcttttcacaactttgcctaaattgtagtttcttcgatacccttttgatgtggtcgtcggcgtgttaatttgtggtcaccggcgagtaagtttctcccaaccggcgaatcccagcaaaagaaaaattaacttgtttgttgtttgtttgtatgtttttttattcctatttcattgttatagtttttgatgtacataattccttttatacatagttgtgtctatgtgtgtgtattgttctcctgatcaagttttttagtggaaattctgcaaagttaaaaacgaaatcatactatctcacaattctattttgttcatcatacttccgtacactcttactcagacagagtcaacgaaagccctaatctttcttatctgacacaaacactaactcgtgtttcataatttatctgttattaatgttatgctcaaattaggtaatttatcaattaatctctttttttatttggtcgtcttctaaaaatctccaactttcttctcttccatagaacctcaaatttctagggttttaggggtttttcctgaattgaatttcccagatcgagattcgctgtttctcgattgggggtacttttcaactattccggcgatg

SEQ ID NO: 32562 - DNA, 3000 bp, Unknown; identical to SEQ ID NO: 738
  misc_feature (1)..( 3000): 2750-1469P.txt file - cDNA_ID_3058629; gDNA_ID_1620313; Annot_ID_153058

SEQ ID NO: 32563 - DNA, 3003 bp, Unknown
  misc_feature (1)..( 3003): 2750-1469P.txt file - cDNA_ID_3058657; gDNA_ID_1620314; Annot_ID_153113
agaaatgttacaagttataaaagagtttcttttaggttagggctatctctgtataattaagtaacgtaacgtaagtatcctatctttattttctcagtatttctctaaccctttttattaacctcatgtatatgtaatatgacgtcctttaacaacaacaaaatatgacgagctggtgattcatcattggtcgcctaaaaaagaaaataacaatttataaaattcataatttgaggttcccatttatccggtttattagatgctatttttgaaattctacacagaacacgacccggtttgatggcacttgtgctgagtagcgaaccggttctactccttagtcctaaatatggttccgtgtaagtgtttctaaactttaaacaacattcgaaggaacccactcctataagacttatggattttgcagttgaatccttgtacttaaaacattttaatttgaataccaaaacttataagaaattatgtagaacccttttaaatgatttcgtaacgatagctacatgttacatattaatttaagttgacaaaaaatatgacaattagtggttgaattgtaaatatatataacatgtagtttttttataaattatctaaagattaatggtcattgaatcattgatcgtgcatcaaagatactacaaaaagaagaaaatcaaatatataaagaaagaaggcgagtcattttatgacaacgagaaacagaacatcactaccaaacatctccagctcagtttcttcaaataaaaacagttaatctctctaaaacaattttttgttttctctctctcttaaataaccagagagttcagaatcattttgattctctttgtaatctttagttgttgtacctaacatcatggctgaagaggaaccgaagaaggtgacagagaccgtgtcggaaccaactccaacaccggaagttccggtggagaaacctgctgctgctgcagatgttgctcctcaggagaagcctgtggctccacctcccgttcttccatctccggcaccggcagaggagaagcaagaagactctaaggctattgttcccgtcgtccctagtaatttgcttactatcttgtttttcaacagaaagattattactaactcaagtttggttcaatgattattaaaaacttctgccaaaatatgtttctattaatcaactgattagcgtcgtcaaatatacctgattttcttaaagattattactgattacatttccgattaaaaacagaattttataccttttctttaatatagaaaaataaacaagtttcaaaattctgtaattatgtaagttttaaggttaaaaaagaagaactcaaagatttttgttcttctctaatgtgttgttattaatttttctttattaatacttaataaaaaatttattttgtggcagaagaagtagaggaagagaagaaagaaggatcagttaatcgaggtaattaacgtaatagattcatgactaatactaatattatctgaaagtaaaggatcatgggtgtaatataaataattagtatttttgtcataccggggaacaattaattaggtggtttgtgtgtcgtgttatcatgggatgtgtctaaaactgaaagatggtttaataatattcactaattttgggtgaaggttgttatatggacatgtgtgtttatcattgtctcttatttttcccacaaactctgattagtgattgtatttgcttaataattttgggagtgaagatgctgttctggctagagttgagacagagaagaggatgtcacttatcaaagcttgggaagaggctgagaaatgcaaagtggagaacaagtaacgtttttcatgttaacatttatccataaatgtctattaacccgatttagtaatattttgcaatgaaaccaagatattatcattaaggtcttgaagaatatattttgaaacagagctgagaagaagctttcttcaattggatcatgggagaacaacaagaaagcagctgtggaagctgagctcaagaaaatggaggtatgtttgaagttaatatttagttagagattttgaagcatttctgatttagctccgagctttttcaaaattgtggaatttttttttaacaacaggagcaattggagaagaagaaggcagagtatgtggagcagatgaagaacaaaatagctcaaattcacaaggaagcagaagagaagagagcgatgattgaagctaagcgtggagaagaaattctcaaagcagaggaattagcagccaagtaccgtgccactggaaccgctcccaaaaagcttttcggatgcatgtgatctctaatcatctcgatggggaaacaaatgaaatatggtatttgatgtaatgacgttctttagtttgcttaatgtgggtttaatatggcaacatagaaagttataaggtcaacatcttatattgattgggctgcgtttgttaatttgatttgtatttgtacatcttttcattgaaaggctttctcttagctttatgaattggtaagtacaataatacatatttgttctttatgtcgtaatttatgatcgcatcccccggcccctatcataaatgtagtagtacgtaagtggtccgatatgtaaaacgagaacaaggtcccataatttgaaatgtttgcatcataaaatgttatgctcaaccaaatcaatgtagcataagataaaatcaaatcaatgttttagctacgaacgagtcacaatagtatagcgaacaatttatccgtggatcaaagttggcccaaaagggcccaacatttcagtagccggttaataaaatgtaaatcacggcccataaaacaaaggcccaaacccaaataaagagagagatcttcgaaactagggtttcttccggagcttcactacttgagattactctcattcgctttcttttgcctctcgcattttcttcatcctttttgcctcagagctccgtggagagcagcaatcagtagccatg

SEQ ID NO: 32564 - DNA, 3003 bp, Unknown
  misc_feature (1)..( 3003): 2750-1469P.txt file - cDNA_ID_3058660; gDNA_ID_1620314; Annot_ID_153112
aacttgaaaaaacaagaaccaaccacttgtgtctgagtacttttaagtgaagagataaaaacaaaacaactttagaaaaagtaggcgaagtataagagtatagcagagctgtccattacattgaaacatacgtcacatgttctcatcctctaccaaaagccaccacaaacactaacttttgtcaattgtcaatcaatatattcaatacccttttttttgtttattcccactaaattataatttttgctttataaaaaaaaatatcaaactctatattttctcgatctcttctcttcctcttatttctccaagatcccagacgaaatggctcaggtttgtttttttctcatttgattttaaagtttgaatatgattgatctcttcctcctaaattggttttacttttatagaaagtggtgctgaaggttttaaccatgactgatgataagacgaagcagaaagccatagaagctgcagctgatatcttcggtgattatttcttcctactacttcttcttttctttaactactttttgattgaatttcaattcttgtttctgtttattattgtacttttcagatttttaggatttgaaaaaacaaaaagaaaggattaatcaagtttgctgctggtgttttcactcactaaattaccatttttagctaaagttatgtgaaacaatcggtatgaaatctagctcgattgtagtataattgcgtcagaatcttgagagcttggattatttgacctttttgacacatatagtcaacgaaatgatattctgaacattttgaaagcccgtattttatgggccggaaaaagcaggtttagtttgggcttagttaaggctgactcggtaaattcgaaaacgtattatggaatgtgttatagcaagtgttccatttgctttagatttaaaacgacgaatgtatgaccaaagatgatacaatgtagtagttcatatgctaagaggattttgttaagcaggagttgattccatagcagcggatatgaaggatcaaaaattgacggtgatcggtttgatggatgcggttgcggtggtgaagaagttgaagaaggttggtaaagtcgatttgatatcggttggaccggcaaaagaagagaagaaagaagagaagaaggaagagaagaaagaggaaaagaaagaggagaagaaggaagagcagaaagaagaagaacctaagaaataagtgactcgaattgctattaaaaccctaaatttttgtcatattgatttcacaattagaacgctgaatcattgaataatttaagatgtaaaattaattgttcaatacagattgtaataaaagcgaagtatttgaaacttttattcttgtgggaacacaaccaaactagtacaagtttactatattaagcacaaaacagcaaaacctattaagaacaacaactgcaataagtactataaagtataaacgcaaatctatatatactaaacgaaaaaacaaaaacgtgatgactattacataacgtactaccgtttgacatatgtaaaacagtaaaagagatgttccatattaaatgtgaaacttttaacaaattcatcgcaattgatgtatacataagttcgtattcacaatactcgaatctcgatcaagatttaattaaacattggattaatttcttactcataaatacatactgtgaatttctttgaagacatctccttctactgtttcgtgaaatgttaacaagattgattatatggagatgtaacttaaattataaatggatgaataatatcggagataataaaatgcaaagttatcagcatatcactcatggacggaaaaaatccaagttttaattagtaaccaaatcgtttaaatgatttttgaggaaaatggaacaacaatgacttctcaaccacaaataatagcaacaatgacattaacgattatttgtaaccttctttttttagcagtaattagtaactattagctacctttcagttatagaatatacattatattccggattgagcatatactaatatatttttgattactgtctatggattaattcactagactttgaaaatatacaaactttacggtttcgataagaaacaagattcgcgtaaagaaatgttacaagttataaaagagtttcttttaggttagggctatctctgtataattaagtaacgtaacgtaagtatcctatctttattttctcagtatttctctaaccctttttattaacctcatgtatatgtaatatgacgtcctttaacaacaacaaaatatgacgagctggtgattcatcattggtcgcctaaaaaagaaaataacaatttataaaattcataatttgaggttcccatttatccggtttattagatgctatttttgaaattctacacagaacacgacccggtttgatggcacttgtgctgagtagcgaaccggttctactccttagtcctaaatatggttccgtgtaagtgtttctaaactttaaacaacattcgaaggaacccactcctataagacttatggattttgcagttgaatccttgtacttaaaacattttaatttgaataccaaaacttataagaaattatgtagaacccttttaaatgatttcgtaacgatagctacatgttacatattaatttaagttgacaaaaaatatgacaattagtggttgaattgtaaatatatataacatgtagtttttttataaattatctaaagattaatggtcattgaatcattgatcgtgcatcaaagatactacaaaaagaagaaaatcaaatatataaagaaagaaggcgagtcattttatgacaacgagaaacagaacatcactaccaaacatctccagctcagtttcttcaaataaaaacagttaatctctctaaaacaattttttgttttctctctctcttaaataaccagagagttcagaatcattttgattctctttgtaatctttagttgttgtacctaacatcatg

SEQ ID NO: 32565 - DNA, 3000 bp, Unknown
  misc_feature (1)..( 3000): 2750-1469P.txt file - cDNA_ID_3058668; gDNA_ID_1620314; Annot_ID_153102
cttttccttttccctttttgtgttgtccaacaaataaattaaaatcttggaccgatatcgatagcgatatgaacaagcaatcgagcatgtcttttcttcgatttactggttgatattaatcaaaaataaagttttttacataggaaatgttttactagtagcccatgagcataataaaagcagagagaacagagaaatatgaggagactttcaaataattacaacaaagttggatgattatcctattttatatgattttaccaatcataaagctctacaaattaacaattaatctaggtgactaaaacaaaatgaatgctatcattctgcatggttatttcacttagccgttttttttttcatttttggtgagaacagagaaatatctcattttgttgcttccgaaactatcataaagtatacactgcaaggtataaagaaccggtccacaaatacagtgaaattgaaggtgtgctaaacattagataactggttatgcacccttacgctaacactttttcttgctaagatacaacatcaagagtcaagacatttccttgagatatataggccgactttgctagccgttaaaatgttaactttacgttcttttcaaatctgcagattttataataatacagttcttctagacggatcggtctctcccagataaaatccacgtgattgtgaatgagaaaaattggtaggtaaggtaataaaaaattgatgatgatcatactaatattttaagattctcgcttattatgtgggagattaaaatatatggatataatttttgcacttacgatcccatctacttattatgtagattataaaatagcaggcttgcataaaagcataacatgatgtaccaaacttgttagtcaaacaaaaaaaaaaaatatccaagaagctttgaagaaccatggcgatgtctcatgtccagcctgtgcttttcttcctcgcatcactcttcttcttactggctttgtgcagcgccaacgattttgaatattgcaccagtaagtatcgatttgttaagtcttcaatgttctatattttttttcgtgtgtttaattatagaaaacccctataaaaccaattagtttgacatatgaattcaaataaataagtggatttttttctttcttagaaagatgtatagatctaagtgttttttacctgcagaaaatggacatgattatggtgtcgtctcttggatcgaggtctttcgggttgggcctcaggaaaacccaaccctcactataaatgtatttggtactgcgagtaagtaatagttttgaatcttttgatgatttttccaaatttcaactctctttttattttctttatatagtttctaatatattttttgataaaattcttcgtgtgtatatacagcgaaagaaatatccgcgggaacccttgtatatgtagcctatagatctggggattttacaggccttttaaaaacttacgacctatgtgatgtgagtttggcatgtaacattgattctgagattgaagctggcgacgtgtttgacttcagtcttaaagacgttctttatgttggttttgatgaggtaactatttttaatactctttgtatatgaatttgaagtttccttaagaagtcctaggaccaatgttttctcaagtaatgcttttgggttcatgatgttctttgtttctcattaattcttctttttaacttggcagggaatcaagtattccgtatctttgcgtcaaaaaaccgcagaggaggaggatccaataataaaaatgtgtatcgacttcaaagtacctgcctcagcttctgcatttgtctctatttagtcacgttggctgatgaaaagatgtttccaactctttcattatatgactctttctcgcttgcatttttccttttttatgtgttgtccaacaaataaatcaaatccttgaaccgatatcgctatagatattgctttgttgtaattttggcctgattaatatgaaccaacatgcctttccttgaattttctggttgatattgatcaaaaataaagttttttacagaggaaatgttttacgagtagcggatacgcataataaaacgcagaatagaacggaaatatgaggagactttcaaataattacaacaaagttggatgattatgcgatttgttttggtaaccagttggatgattttactaattatatgatagctctataaattcacaacttacactttgcaattccccaatcttggtgactaagctaaaactaaatgaatgctatcattctccatggtttttcacttgatcaatttttatttttcatttttggtgatgaaatcatatttcttagcttccgaaactaatcataaactctgcaaggtataaagaaccggtggtgtgctaaacattagacaactggttaagcaaccttacgctaatactttttcttgctaagatacaacatcaagagtcaagacatctccttgagatatataggctgactttgctagccgttaaatgttaactttacgttcttttcaaatctgcagattttaaattataaaaaaaagaaaaaaaatgtgtttacaataattatcttcgagacggacgtgattgtgaatgagaaaacttggtagttaagatataataaataatcaattatgatcatactaatatttaagattctcgcttataatgtgggataaagaattgacaattgatcatacattcatactaatattttaagattctcgctcttataatgtgggataaagaattgacattgatcatgtactaatatcttaagattctcgctgataatgtgggagattaaaataatggatataatgtatacaggctatagcatcctgcactaacgatcccatctacttattctgaagattataaaatagcaggcttgcatatatagaagaataacatgtacctaactttttagtcaaacaatcaaaacaaaaaatccaagaagctttgaagaaccatg

SEQ ID NO: 32566 - DNA, 3000 bp, Unknown
  misc_feature (1)..( 3000): 2750-1469P.txt file - cDNA_ID_3058672; gDNA_ID_1620314; Annot_ID_153101
gactaagctaaaactaaatgaatgctatcattctccatggtttttcacttgatcaatttttatttttcatttttggtgatgaaatcatatttcttagcttccgaaactaatcataaactctgcaaggtataaagaaccggtggtgtgctaaacattagacaactggttaagcaaccttacgctaatactttttcttgctaagatacaacatcaagagtcaagacatctccttgagatatataggctgactttgctagccgttaaatgttaactttacgttcttttcaaatctgcagattttaaattataaaaaaaagaaaaaaaatgtgtttacaataattatcttcgagacggacgtgattgtgaatgagaaaacttggtagttaagatataataaataatcaattatgatcatactaatatttaagattctcgcttataatgtgggataaagaattgacaattgatcatacattcatactaatattttaagattctcgctcttataatgtgggataaagaattgacattgatcatgtactaatatcttaagattctcgctgataatgtgggagattaaaataatggatataatgtatacaggctatagcatcctgcactaacgatcccatctacttattctgaagattataaaatagcaggcttgcatatatagaagaataacatgtacctaactttttagtcaaacaatcaaaacaaaaaatccaagaagctttgaagaaccatggcgatgtctcatatccagcctgtgcttttcttccttgcatctctcttcttcttaccggctttgtgcagcgccatcgattttgaatattgcactagtaagtatcggtttgttaattgttaagtcttcagtgttgtatattattttcgtgtgtttaattatagaaaacacctataaatcaattcaatcattcatataggccttgatttcttagtttgacatatgaactctatatccaagggttttgtacctagtggaactcatcataagttctaactttcacgatcaatcgctacggctgctgcagaaaatggacacgattacggtagcatctctcagatctgggtctctccctctgatgggcctcaggaaaacccaaccatcactatacatttattcggttctgcaagtaagtaacagttttgatgatcttcccaaagtttcaagtctctttttttctttatatagtttctaatattttcttgataaaatctttcttatatatataggcaaagacatatccgcaggaacccttgtgtatgttacctatagatctggggattttacaggccttttaaaaacttacgacctatgtgatgtgagtgcatgtaaccctgaatatgtgattgaagctggcaccgactttgagttgactctttccgacgttctttatgttggttttgatgaggtaacatgcttttataataaatataaagaaccaaaccggatctgactttaattcacatttccatgtacgtcttttttgttaacttggcaggaaatcaagtattcggtatctttgcgcgaaaagacctcagaggagaagaatccaataataaaaatgtgtgtcgacttcaaagtacctcacccagcttttcctcctcctgcattggtctctatgtagtcaagttgacagatgaaaagatgtttccaagtctttgattatatgagtctcaacttgcatttccttttgtccctttttatatgttctccgacaaataaattaaaaccttggcttggttgatatgaaccaccatgtcttttctttgatttacttgttgatattaatcaaaaataaagttttctgtacagaggaatgttttacgagtagcagagatgcataataagagcatagtggaacagagaaatacagtatgaggagactttcaagtaattaagctttatagattgtaggatcgataactctaaaaccaacacgtctttgctttacccttattgaatgcaagcttatctattatggaaatttactttgtgttatatgcctatttcgatccagtacaagtaaggttttgatcttctaaaaatatctaaattacaaatctaaaaagttaaaaatcaaactggagccctgttttgttgcaaaccaaatatatacttgcttaaaaattaaaaattaaagttgaagtcggaccaaaataagaaaaactccaatatcaaaaacgaataataaataaataaaatccttatatttgacgagttatttacgagattggcattttttagaagagtattgtggaataaagtatttctgtctggactacaaatttaaatatttcttggtcatgtgaatagacgaatttatccttaaaaatttggagagcaaaattcaagttatttaattattattttttttaccaaaaaatcgtgttggtttacaatttagggtttagagtttagtgtttagaatttaggatttaggagagtgaaagaagggtaagatcgtcattttactgaaacaaaaaatgcttaaaactaagggactgggaagaaatacctaaactgaaagttttggattgacaaatgctatggacaagaacccctatatttcacctttggtgtgtaatatgggctagttggctagttccctactttgggctaaggccttgaataggcgtgtaactcttttttttctcccgcatgtcattcgaaagcctttattaaaagtatcaatgttgaaggtatattggtattgcaagaagtttttttggtttctaaattttcgtttagccaaggttttgtttctcttttgtgactatttgaaattaaaaccctcaagcattaccaaaaagatgaggccttaaagcaaatatgccttaactcacaagattctctgtctctctcttccctctttttcttattctttctctttctttttttgtcctctttctcctaaactctttcgaatctctttttttctttttctttctggcttctccatcaggaagattccgatg

SEQ ID NO: 32567 - DNA, 3000 bp, Unknown
  misc_feature (1)..( 3000): 2750-1469P.txt file - cDNA_ID_3058679; gDNA_ID_1620314; Annot_ID_153098
attccaaatgtatatcaaaagaaagtgtgacatatatatatatatatatatataattatatatatgtaaaatcttatttttcaacgtgagaaaacgatagctaataaagagtggtttatgttagatgatgttgcgtgacatgaggttaaaacagtgaaactcaccgcaaaaataataaatcaatatcaatctaactgaattattcagtctcatttatcaagaaaatgttttatcagaaaaaagtatgtcaagaaaataatataattctatgaaccaagaaaaaaaaggagtgtgagacatacaagcaccgagagcagcggcgtctcgaaccagtgtcatgctaacacgccgccctggttcgccggaaacaagcggaggagagaaagacacgtagacaactagaaccatagccgctgttagatcgaggagccgagtcgtcgtcttcattgttacagttttggacgcttcaatggtgaaagaaggagactgggaatgaaaacggcgtcgttgagttctatgcctgttgtatcaaaggaaaataattgatttggggatttaagagggaaatggaaaggtttatagtatttatagataataaagattttgtggaaagtaattcatttggagaagaaagggaaaggagaggtcaagttggcaaagaggtaagagaaagagagagatttatgatattgataggcacaaagaagtttttgccatcttacaatttgttttcctttctatgaaaaagattgattgttgttaccaattgttagaaatctcttatcatctttaaaaaaaaaactcatatcatatctatgcataaatatgtatgtataattcaccacatggagagactcacttatttttcatgtgtatgtgtgtaaagagagacatatctgacccaaaaaaataatctttgatttgttattgtttacattaatttatttattagaaatataaagtccacatgatattttcttccttaagaactttagctttaaaaatagatgaaatttttctgttgagctaaaagattcatttccctctatacattcagatttctattttcgtttagtaaatatttccttgtaattctactgtggtccaccattgtaaattcattgtttatgtttttgtaagaattttcaatctgtaaatgtattgaaatccaatttctgtattggtattaaaaacaaatttcagtgacagccacaggctcacaaaaacagttctacactactacttatcagtttcacacgagagctaagtttagttatgtgcagtagacagcatagggcgtagataaggccaaaaaacaaaaaacaaatgattaaaaaaaagtttttttttttgcaagaataaccatattttgatactttctttttatttatttataaaaaatgtattgtatttttagatatttttctaagtatggagatgggtcttgatgggtgggtcaccagctgatgaattagaatcgaaaatcacattcttaggtgtcttttggtttaggttcaccgaatcttcttaatctatctttaaagaaccaaaaaaaaacacacacaaacaattgtcttcaatctctctggtcatttttcttatgaaaacaagtataataattacatttatttacactctttaactaatcaacctattattacctaactacaactttcatattcatatcaagaaagaaaggtttgatagttagttatggttgttatccttagccattatgattttggtttggtcctcacgggtcctccttcaccaaatgcatatgttttttttttttttttttttttttttgtgttgcctttgaagtgaagctatcacaattttgaatcaaaatgttgtttggctttctaacgtgcatcaataaaatcaggaagaacttatcattcgtcacaatcaacataccagctacttgtttcttattgtccatcatattcctaacaaatgatatatatagttcatctcgaactattgaattattaagtattacgcaacacacctatgtcaaatgatctgaacttcgatactatatcagaattcaaatacgtttaattcaaaattaactgaaagtgaattcattcattaatatctcttatttcatagaagagatttccaacatttttttaccattgtagtgatcttttagttgcaacatttactaattagtgataagagagcacacatgtgggagaattaggcacgtgtgaagagctaaagagaagcatgagaagaataaaagagtataaatagggatattagagaggaattatagagattatcctgcgtgatcattgatgttgtgaggagaattagggcttgtgtgctatgttcttgatgataagagatgagcattgtaactccgatcttatcaatatagggttttgattcattgtaattgggatttacggataataaatacaaaggtttatgcgtaagttcttatcaacttgtaatggtcttctggttgcaccatatgctcatagatctagtgtatttggtacaactgcttaaaagtttttgatttactctagtatatttaacggagatttgcctatttttccttaagggtgtgtttaatgttttcatgttgaaacaatgaatgaagtttcatgtaattttaaatgaatgagcaatcataatgaaaccgatctactttgaagtttgaacatacaatagaattgactcatatgcttataatggactcaccatctatgtttcactgctaccacaacattttttggtaaaagattcactaatccctctttgtgttggttaaaaaatcaaggtaaagagagaaaaaatttcaaagattatatgtaccaaatgaacaatttgaaaagaaaagggttattttagaagtaaaaggaaatatatggaccggggaggttattattacagaattaaaaaaccctctttcacggtggcttcttcttctttagttcatcggagaaattttagggtttatatcggcgaacggaaaagatg

SEQ ID NO: 32568 - DNA, 2053 bp, Unknown
  misc_feature (1)..( 2053): 2750-1469P.txt file - cDNA_ID_3058701; gDNA_ID_1620315; Annot_ID_153162
cctttccttctacctcaagacaaaaaagacgtaagtataaggactcatggacgaacatttatttttatcatgatgtacggtgattggttgattaattggcaaataaatgtttttaaaacttactttttggtcttttgaattttattgaagagtgggtttttataggcggttttaagccaatagatagatggatatataactttttatgaagtatgttgtggtttaatctctcaaactgagagatgatttccttgttttattttagttagctttatcagccaagttgagattctcagccaaagactacagtgaccatatggcactcgttcgtgcctttgaagggtggaaagatgctgaaagagaaggatcggcttatgagttttgttggaggaatttcctgtcagctcagacgcttcaggcgatacattctctgaggaagcagttcaactatattttgaaagaagctggcttagttcatgatgatttagctctcaacaacaagctaagtcacaaccagtctctggttcgtgctgtcatttgctctggcctattccctggaatagcatctgttgtggtaagtctaagacccatgtctctggctaagtctcctttctcgtgtcagagatttcggtgaaataaccttgttgtcctttttctttgcacagcacagagagacttccatgtcattcaagacaatggatgatggccaagtatcactatacgcggtgagcctcttcattcgtatttcccaacatcattacttgagtctctcgatatggccatcttttttatttaaatggtttttacggtttctatgtttcagaattctgttaattcgcggttcccaacaattccatacccttggctagtctttggagagaaagtaaaggtcaatgcggtactcatacgggactccactggtgtccctgattccagtttgatcctttttggtggttcattgagcacgggagtacaggtgatttctctcattttcctctttttaacccttacactagtcagattatggaatactccggaatcgaatggattgaatgttgtgttgtttccaggtgggacatctaaaaatgcttgacgggtacattgatttcttcatggatccaaatttggctgagtcctatgtaaagctgaaggaagaactcgataagcttcttcaaaaaaaggcgagtttttttcaattttaaaaggaaaaagtgttcgtagtgcagcactttaacacctttagtatctttacgatttgcagcttgaagatccaagcatggacatccacaaagaaggcaagtacctcatgcttgcagttcaagaacttgtggctggagaccaatgcgaaggcagatttgtctttggccgtgacacaaagaggccaagccaaccgcaaataggagagaacaaacactccaaagacgggacaaacccgaagagtctccttcagacacttttgatgagagctggacactcacctccaaagtacaagacaaaacatctcaagacaaacgaattcagagcacttgtggagtttaaaggaatgcagttcgttgggaagcctcagaggaataaaacgctcgctgagaaagatgctgctgttgaggccttagcttggttgactcatacctctgataatagtactggccaacacaatgaggatgcagattctccacctgatgttactgataacatgcttaaactccttggaggacggcgcaggcgatccaagggcaagtaattgaatctctgtaggttttttcgcagacagatttggtttgtgtaactgtgctttggacgatctcaaataccaaccaaagcagatagagaaattatacttcagtagtcactatgtaactatagtgtcgtttttggggcagaacaatagtgtagggttataaacataaaatctagaaactttaggggctatgatgtattttgaacaataattggggttattatcatcttatatgccgccacgtggcatttaactctctctgagcttgctcgcttacgcaactctctctctctctctctttgagcttctgtaatg

SEQ ID NO: 32569 - DNA, 3003 bp, Unknown
  misc_feature (1)..( 3003): 2750-1469P.txt file - cDNA_ID_3058710; gDNA_ID_1620315; Annot_ID_153149
gaagctcttggaaatagttaagaaagaacgttggagtacctggacttggacaaatccatcttcttggttaagaatttgaagtgacagggttccctgcatatcaaagctactaagtccaccatctcgtctcaatgcaacattgagcttctcttcaacagttaatgtgaaaggatcagttggaggtggggcagctgctttggattggccagtaggcttaacatcttcaatgacgtcttcaccttctgctttaagggactccattaactggttctttcccgacttgccaagtttcatgccagaactcttaggaggagcagtaacagaagaccgtgatcgatctgtgaagttaagcacggtggataagaatttcaaaacaaagagattatctaatcgaaatcaagtatatatatatagaggcgcttaagaaacccgagatggaagggcattttgatttgaatacttgggattgaacggtcatttgtgaatgatccactagttaaagcacactaaccttttggtttggtattgatagggtcgacatctgaaatcatgccaaacccagaaccacttccataaccaccgccgccaccactggatatgctcaattcattgaaaccactttcaagtcttccagatcccattgaacccatggacgaaaatcctcctggcttattcttttcaatctaggaattacataagaaatattaataggagttacagaaatagaatacaacagcagggtgcgctcctgtcatgtaccttgcttttgtcaatctcattagccttacgcttcatcacgtccttagtgtcattgatcttgctctgcataaccagtttatgcaacttctcctcatgactttccatttcacaatactgcttcacctgggcaactgtcacactttccttgtgcccaagagatatgacttcatcaaatgcaaatatgagctcaaaagatgccctggaaatcccttcttcatctaaagacatggaatactcaggtacctagaaacaatcaaatgatcaaacagcacttggaacactcacttttcaaaagaactaagaaccagtacacatccagagtcaaggcaataatctcctcaaataaagtagcagaagtaaaaaaaaaagaaagaaagaaagaaagaagcatacaagtttggagagcaaagtaagggtggccaggtcttctagaatgttactctgcttagttgtaacaagaagcaggaacagagcttcaataggctgataaacatatcgcacattctccgtctcgatataggtatgctgctttcccattccaaccagcttaggaaaagctgcaagtagaccttcgattctgatacgggacatatccacatagtgtctggaaacaatcactacataaaaaagaagaaagttagaaaaaacgcaaaaatattgaaaaacgagaattcgaagacaaagtcaaagatagatgaaaataacctttcccagacttgaccacaatggcagcagcaagcacaacctataaagcacaggttccaactttagaaaacgcgccagacactcatcaaacactaaagttaacaccaaattgcgaagatgcactaaaaaggaaaaagaaaaaaaccaatcatagaacaaaagtcaataccattttgattattcaggctcgaacaatctcggcgattataagaaaggtaatgcgaatctgaaatacaaagaaccaatgttagagtaaatccagttagagcgagatcagaagaaacaaacgggatttgatcttcaggatcataaatcacgtaatagaggaagagatctcgaatacacgaatccaaacgaaactagactagcgaatcgaaaatataaaaagaattcatcgcagatccagcggatctacgagcatcagaggctcataatcgaaaaacataactgtagaatcaaaatcaacacaagcggatcaaattcatgaaacaggatcgcgaaatttagaaggaggagaaaattcttaataatggagatccacagaaatgtagccagagagaacattcattcaaaggaaaacgaaaatcatcaccatcagtgaaggcgaagagcgagagaacaagacgataccttgggagtgatcgaaggagatgaaatcaccagtttcttcttcacaagctcgccgagtaaaaaagatgaaacgagtctcagattaaatcctggtgtgtgtgttagagaaaagacgatccacaaaacaaggacaagtaatctgggccgtttcagttccttattgggctttccaacccagtaaatggaagaaaaaatgccaaaagggcaaattcgtcattggtgcagaccgacgacattcggtttagtccggttgaattttgaaaggaatgtactttcatgtattgagatttgtagcaatcaatcatcttcaaaagtcaatttcagttctagggttttaatttgatacgaggtcagcgaatccggcgacgaatatccgccactagtaactctagctcaggtaggttactctctctctcgttttctttctttatctggttttcacttcgtccacttagaagtatgctcatttgataaattggcatttgaccccagttcaggatttaggattctgattatctctcaatacttgattagtttagtgcttaagttattagtttttggtatgcccacttgcgccatgttcgtttctaaagcaatgagattattttcatttaaagatctggaaaaaagaaactaatggagacaacggcaaatgaagatggattttaagggtttttgttcttagtaaaaaaaagttatcttctttttaattttctgagactttaattgctagaaagttataggattgattcagatagtggaatcagacaactttttcttttatgggcgattactcatttttgttctttggtcttctgattgtttagtttcttagcagatgatttagtcttctcttttgtgatccttttttgctttccttggaagtgtaggtaaggatttgtgtccatg

SEQ ID NO: 32570 - DNA, 3000 bp, Unknown
  misc_feature (1)..( 3000): 2750-1469P.txt file - cDNA_ID_3058714; gDNA_ID_1620315; Annot_ID_153148
gatgagagaactttgcgacagtaattatctgtgaaccacatttctcgagttgtatcacaatttcaactacagaacaatctctcagatagacaaacaaaccaaacaaaactcgtgtccacaactcaagaccttcgacttgctaaaccggagtctcgcagctcccacgccggtttactctctctcgaaacatcggacttgattgctcgaaccaatggcttcatcaccagcaagtactgcattttcaaaccatcaaaagatgaataaatgatgcatgatgttttgatcaagccttattctgtattgttactgaatggttcagaggggcttacttggaatgcaaacattaaaggaatcagtttttttcctctttcgtttgggtttggcccttcgaccagtttcttgtcaacatgaatcgccttgttgccattaaaagagatctctgtgattttgttgaacagattgggaatccaactagtcccgcatggaagaatctgtcacaaatttggaaaatccgacttcaagattggtccaactactacaagacgcgagaaaaagagaacgtggacaaaaccaatcaactgaccttttcatcgctttcgttcttatggcatcttccgctgttctcaacaagaatgacaggaatagaaaaaccctacaataaaagatcagaggtaagtgagtctattaacttgactactatcaaggtcgttacagacatttatgtaaggaggaaaaaactatacctgcaaatcctgtttcttcagttgagcgcctgtctggataacttttagaagagcattagatcttttggagacaaagtggttataatttaacccgtctggtggagagaactgagcatgggtgagaacaagagcagacttcttccatatctctttaccaaatgcatcagttatagcaccgacaacttgcctatcaaggtcatccacccggtacacatccaaacggtctacgtatagtagcacatctatagtcatgttgaggagaaatctgttcaaattcaacatccacgaatccaaattaatacaaatgccacaaatgagccccaaattaggagagtaactccttagacctggaaacagttcatcataccgttttataatgttgatggcttgatcattcacatatcctccctcaataagaccaggagtgtcgatgatattcaatgtaaatcccgatcttgtgcgagagaccaaggtaggcctcagtccttcagactataaagagggaaaatcacacactttctatgagaaaaattaaaagaaagatagccaatagtcataaagacaagccatgagaagagcattaaacttggcacctggaaagtactaactgcagcagctttctcgcctataactgaattcacagttgatgactttccaacaccacctttccccattacaaggaccgttagcgagctcacatcctacaccagttttttttctttcttaaatctctctaagacaagaagaaacaaacagaaagcagatgaagctagaaacaagaaaggaacctcttctttatacttcccaaggatctcgagcaatttagattgagtagcaggtgggaactgctggataccgatccattcacgaagcgtttgcaaagctgccatggacacaaatccttacctacacttccaaggaaagcaaaaaaggatcacaaaagagaagactaaatcatctgctaagaaactaaacaatcagaagaccaaagaacaaaaatgagtaatcgcccataaaagaaaaagttgtctgattccactatctgaatcaatcctataactttctagcaattaaagtctcagaaaattaaaaagaagataacttttttttactaagaacaaaaacccttaaaatccatcttcatttgccgttgtctccattagtttcttttttccagatctttaaatgaaaataatctcattgctttagaaacgaacatggcgcaagtgggcataccaaaaactaataacttaagcactaaactaatcaagtattgagagataatcagaatcctaaatcctgaactggggtcaaatgccaatttatcaaatgagcatacttctaagtggacgaagtgaaaaccagataaagaaagaaaacgagagagagagtaacctacctgagctagagttactagtggcggatattcgtcgccggattcgctgacctcgtatcaaattaaaaccctagaactgaaattgacttttgaagatgattgattgctacaaatctcaatacatgaaagtacattcctttcaaaattcaaccggactaaaccgaatgtcgtcggtctgcaccaatgacgaatttgcccttttggcattttttcttccatttactgggttggaaagcccaataaggaactgaaacggcccagattacttgtccttgttttgtggatcgtcttttctctaacacacacaccaggatttaatctgagactcgtttcatcttttttactcggcgagcttgtgaagaagaaactggtgatttcatctccttcgatcactcccaaggtatcgtcttgttctctcgctcttcgccttcactgatggtgatgattttcgttttcctttgaatgaatgttctctctggctacatttctgtggatctccattattaagaattttctcctccttctaaatttcgcgatcctgtttcatgaatttgatccgcttgtgttgattttgattctacagttatgtttttcgattatgagcctctgatgctcgtagatccgctggatctgcgatgaattctttttatattttcgattcgctagtctagtttcgtttggattcgtgtattcgagatctcttcctctattacgtgatttatgatcctgaagatcaaatcccgtttgtttcttctgatctcgctctaactggatttactctaacattggttctttgtatttcagattcgcattacctttcttataatcgccgagattgttcgagcctgaataatcaaaatg

SEQ ID NO: 32571 - DNA, 3003 bp, Unknown
  misc_feature (1)..( 3003): 2750-1469P.txt file - cDNA_ID_3058741; gDNA_ID_1620316; Annot_ID_153186
gtctggatttaaggaaccatttttttatttatttcttttccattctctcattttaaaaaaaacaaaaatcttttgggcaatttttcgtaaatttgttttcgttgcgaattggtgatccaacaaaaggaaaccaaatttctgaaaattcaaatgggaacacttaaagtatagtgcaattgtattcaaactgacaaattaatcattaattgtattagaaaatgatatattgtcatcgtgactaatttgtcttttgaattcaattgtaactactaactactggttttcatttttcagattatttctcggttcttaaaaagaagaaaacacatacctaatatcgtgtgtatcaaaaagccatgtgcgagcaaccatcttcctttgtaaatttgacccttttgtgtatcatttatatcgagtgtttgtaattgttggttgattttgtgttatttgagaggctagtcatttacgcaatttctaaatttatcttttagtacgtatcaagatgttggagcaactgtgtccaacatacatgacatgtgaaattataattgttaaaacaaaaggacatgtgaaattactatctacttaaagaaaaaaaccagaaagaaaaaaaggtattaaatttggaactaaaagaaggttaaaaagttttttacagaaagtaattacacttgcagatgaaagaaaaaaggcagcatcatgatatgtaaaaaattgtcgaagaggtttagtcgtatcactttgtttgactgatcactgtcttctgattcatttttcagtttttctttttcaaattgtagctcacaacattaaagttattcactgctttaatcagatagtttaatactagtaactagctcatttaggctttaaacacctctttctgattactagcccactctttggtggttcttacatatcacacctaactatactgtgtatccttgaagtgaaaatcaaatttaccattcgtatcttacttacatacactattatttttccttttttttttcactcaaggtcctactctttgataccatagctataatttggaaataactatttacagtgtattaattatacctaaacagtttaatctggactaaatatttagatagatgttacaaatttggttcgtctaataaatgaagacaagacatgctaacaaataaaacactaccacaaagggatagtgagagaatgtgttttgcaacaagacataactttgattgcttgatgtgttaaaatgattatgtcagagacagagagcgatcataggctttctttatttctaataacgtcgattttcttcttcttttctggcgttcaataatgtcgaattttaattcttgatttttgcaactctaaatatccttaacgacattgaagcatggtgcatgtcgatcgttaataataaagttgaacaaaaatcttgttgaattaattacaagcacagcttcaatagcataactttacgagacgaccagatcttatagacgagtttcgcttttacttttttaatgattaaaactttcatcggagaacataagtcttcctcttaattaaaattactacccgtgcataacttcattttttaaaacatcaataattaatatacgattacaaccctaaaaattagtcaccctatagtacataacaatgatgatagttttttctttttggtgtaatgttaaaataaaatgttagccatattaaacgatagttcttttaacttagccattgtaagatatttcttactttagtttttccgtagaagatattcattatggtatggatagtatataccttaactgagtttaaatattggatcaataccatctaataacacatatctgatgttcaatacttaataattttgcataaatgttaagcgtgacaacttaaaaaaaaacacatcaacagagtaaaaacatatctgttaaataagaaaaatgtcatttttataacacttaaaaaaaaatgcatgaagcgtttcatagtttttttttttttcaaagtaatgtaggcgttagatatttcttacaattttttgaaaaatattttttatgttgtgattggctgatatcaggtaactaaaacttctttaaagaattgaagaaaatttgaaaagtaaatagatggattcctatattgtcatttcagaaaaacagtagggacaacttcgtaaatgatagccgtattattaaacaaataaatttaaattagaaaaaaggaaaaaaacgcaccacttttctttttcgctgatgcacagcttgtcggtttgcgtgcaaatcctctgtttcacaattttttcttcttctctttctctctcttcctcttttattcctctgttccaaagttcagcagaagcaaacacacacatcacttactatctctctctccttcttcactttctcacataaccaaactctctctttctctcttttttttgaagtctcctttgaaactataattgccctttagtgttgttcgttcagagtcttcaaaacttttgcagcttcaattgtacctgggtttcttcttcattgttcctaaggtttctgtgtccttcaattcttctgatataatgcttctttaagagagttgacatcatcactttcttggggtactcttctctgtttctccccagaaaatccaactctgtaattttgggtctttattctgtttttctctttgaagaatctttaaaattctcagatcttctgaatctctcttctttaaaactttttttaactttattttttgtactcgcttctttgccttcatttttctcgtatccacatgtcgttggtctttcgctacaagccacgaccgtagaatcttcttttgtctgaaaagaattacaatttacgtttctcttacgatacgacggactttccgaagaaattaatttaaagagaaaagaagaagaagccaaagaagaagaagaagctagaagaaacagtaaagtttgagactttttttgagggtcgagctaaaatg

SEQ ID NO: 32572 - DNA, 3000 bp, Unknown
  misc_feature (1)..( 3000): 2750-1469P.txt file - cDNA_ID_3058747; gDNA_ID_1620316; Annot_ID_153177
tatacaaatctgaacaaacattaaaactcatctctctcatcatctttggccatggcaaaagacttggatgtgaacgagagtggaccaccggcggcgagagactacaaggatccgcctcccgcaccatttttcgacatggaggagcttaggaaatggccgctttatagagcggtcatagctgagtttgtagcaacacttctgttcctctacgtctcaatcctgactgtaatcggctacaaagctcaaaccgatgcaaccgccggaggagtggattgtggcggcgtaggaatattgggtattgcgtgggctttcggtggaatgatctttgttctcgtttactgtaccgccggtatctccggtaagtatgtttatatacaaacgttcgagtcacgttacatagatttccacaaataaaaacaaacaaatattatttacgaattttaatttgagatggtgataccatactattgttgtttctttacggttcagtttgaattagtttggtccgttttatcaaaatttaaatacttctttacaatttatttttgtttatgaaggtggtcatataaatccggctgtgacggtgggactattcctggctcgtaaagtgtcattggtgcggacagtgttatacattgtggctcagtgccttggtgccatctgcggttgcggtttcgtcaaagcattccaaagttcttactacaccaggtttcatcacgtctcaaaactcctatttttttggtttcatagatatatatatatgatcatattacactgttttactaatattggtaatgatatttagatatggaggtggagccaacgagctagccgatggctacaacaaaggtaccggactcggtgccgagatcattggaacttttgtccttgtatacaccgtcttctcggcaaccgatcccaagcgaaatgctcgtgactctcacgtgccagttttggctccacttcccattggctttgccgtcttcatggttcatttagccaccattcccatcaccggaaccggtatcaacccggctcgtagctttggagctgccgttatttacaacaacgaaaaggcctgggacgaccaagtacgtcattaacctttatataaacatattttttcaaaagttatatgaattgattagtgtttaattataacattttgtttttataattgaaacagtggattttttgggttggaccgatgatcggagcagcagcagcagcgttttaccatcagtttattttaagagcggctgcgattaaagctcttggctcatttggctcctttggctcctttaggagctttgcttaatatacatttattttaaattaaaccacaagttataaatctttgatcaaaattaaaaggatgattacaaatgaattaagtggaagttacatgtgatcttctttatatgtttctgtttttttgttctctctttcatttcatggaatttcccattcgtgtaattgtaaatgtggttttaattaatgttgctttaagataaaatctcaagttcgctttatcttttcgtagagttgacgttaattttgtcttttgattgtatttctctcgggaatcaacatatgtcacgcatgttttaaatctcaactttgtatttccttccaagcatttttttaggtttatgtggattaattagggattccaatataacccaaattgtggacccgattaataaaatttccgtatccttgttttctttttccattgcggttccttcaagctaacaaactcttcatgcattctttgtcaccaatcttaccaaaaatacgaaagaagagaacaaatcgtatgaccttaatttaaaatcatttgttccacatacctatatcaaatatataataaacgagtaaattacaaagggtcataagatttttgaaaaaagagagagggtaaaaccactatatatattacgaactatttgttctgttaaggataaagtgtatcattcattaacacttgttctagaaaaggtaaattctatatagatgattgaaaacaacaaaaaatgcatgacttctcttcagtcttcactcattcaaaaacacactttattatttttcttgatattatgcaatcatacaattttgaactttaagcaacaactatctcctctatagccaatatcccatataaaacccaaaaacacacactcacactaaacaaaataagaaaacatttacaaaactggttagcgaaaaaaacaacaacatcatgacatacctaactcactctttgctcttcttcttctcttgcttatctatgcttctttgcgtctccattgcaggaagcagacctgttcacggtccagcttatacaaacccatctgctttctctccacaagcttacgatttctttcacccaaaatcatcactctctgatcacaataatccaccaaaatcctcgccttctccgctttcactttcaccttcaccttcaaaaacatctattgtagaaccagattcacaaggaagtaaagtttcatcagacgaacacacaacaagtgagagtcgacgagaagaagaaggacgtggagaaaccatcggagtagtgttaggactttctttcatcgcatttctctcattaggaatctactttgtgatcaagaaacaacgtgctaatatcatccgcactattgtcactcactctgacgcttaaatataccaaaaacatacttctttcattactcttttcaagattttgtcaaatttctattgttttgattatgtagaacgttacaatgtgtcaaagaaaacatttcggttcggtttagtttaatttgttcggtttatatatttttctggttaagacttaattatagatttatagtccctaataatttaatttgatcctaaaacgacgacgtttgatttggtaacaacgaacaatgtactagaaaagaaacaagcttgtattgtactcgtagttgttacttgttagatctcaacaaccaggtcgcacacactaaaatg

SEQ ID NO: 32573 - DNA, 3003 bp, Unknown
  misc_feature (1)..( 3003): 2750-1469P.txt file - cDNA_ID_3058751; gDNA_ID_1620316; Annot_ID_153173
tgtgataatgattgtttgtaattacaggacgggctcggtgacacaataagagtttcactgacggagccaccagaagaggagatagatccctgcaggcgattggctaacctcgggacaaaagctgccaaacttcaacaaggcgttgtatgaataattcttgttctgatccttctctggtttccaatttatgggactaatgcaacccttttttatgtattaggcaccgtttgaagaaaagcataggcattactttgattttcagcgtcggacgggtgatctacctgtacaaaaagaggtaagactgtacatttttttttaaagtttcatgatgtcgtttccaagtattaaggaaaatgaagtctttcgtcctgaaaactatagggagaagaggttgattacagaaatgtccttcaccgtgatggttctgttctgatgtcgatttctctggatcaactaaaggtgagtcttgataaatattcttcagtcttctctccttcttcttctatttctttaacccaaaatgtaaagggatcattgtctttctgctcactactttggtttcctgtctaggcacctgaactcctctacagatcactcgctacaaagcttgtcgtgggtatgccattcaaggtgagatatggttcaatatattttcatgagagacgcagtctcactgtaataaattgatattggttctcaatctgactttcctgagtgatgcttgtataggatctggcaactgttgattcaatcttattaagagagctaccgcctgtagatgatcaagtggctgtaagaatcaccctttcttctccatatcatttacatttaagatttgacatggctgagtataaatattgagttctgtttacagcgtttggctctaaaacggttgattgatgtcagtatgggagttatagcacctttatcagagcaactaacaaagccattgcccaatgccatggttcttgtcaacctcaaggaactatctggtggcgcttacaagcttctccctgaaggtgtcccaattgtttacctgaaagaattcataatatagagaacagttttctttcgttatttcttagcttcggttatttcaggtacacgcttggttgtctctctacgaggcgatgagccttacgaggagcttgaaatactcaaaaacattgatgctactatgattctccatgatgtacctttcactgaagacaaagttagcagagtacatgcagctcggaggtaataattgaatattctcaatagctaatcttttactgagttcaaaattgtcacttttaagcgctaagtggtttttttttcctggacttgtaggctattcgagttcttatccgagaattcagttaactttcctgttattcatcacataaacttcccaaccggaatccacaggtagataacgacttcaagctttatgcagtgaatggaaaatccagttttgaccatgtgatgttttctttcttcttgcgcacaatgcagagacgaattggtgattcatgcagggacatatgctggaggccttcttgtggatggactaggtgatggcgtaatgctcgaagcacctgaccaagattttgattttcttaggaatacttccttcaacttattacaaggatgcagaatgcgtaacactaagacggtaaaagcacaaagaatcagtatttctgcattttctttctaaaaagagagaagcaataacttgcaaaatcatcgcaggaatatgtatcgtgcccgtcttgtggaagaacgcttttcgacttgcaagaaatcagcgccgagatccgagaaaagacttcccatttacctggcgtttcggttaaaactcaagactttcatacatgtttttcaagaaaaagttttcttctgtttttgaatgtaaacaaattgaataatggcgcagatcgcaatcatgggatgcattgtgaatggaccaggagaaatggcagatgctgatttcggatatgtaggtggttctcccggaaaaatcgacctttatgtcggaaaggtaacacctttattcttgagcttcgttgtgaatgtgtttatatacaactcggagcttccgggtgacaaaagaatctgattttgatatgttgtggacagacggtggtgaagcgtgggatagctatgacggaggcaacagatgctctgatcggtctgatcaaagaacatggtcgttgggtcgacccgcccgtggctgatgagtagatttcaaaacggagaaagatgggtgggccattctttgaaaactgtgagagaagatatatatatttgtgtgtgtatatcatctgtttgttgtgtattgcatcatcattttgaacaaatgtccaaatctcttaagttgataaaagttcttaggccaaataaaatttaatatgaaacttgaacaagaaatttgacattaattaatcaacttatgaactcctcctaatataaaatagaatattattacaaatacgtaaaacgtcgtcgttcatttatctgaatattatatatatatatatatatatatatatatatatatatatatatatttaccctttaagaaagaaaaaaaatcgaacttcagagaaaacctaatgtccaaaacaatccagcgattcattgtcttcacttttacgtttctgtaagcaaattcgtcctgtgtttcttggtttcttacacttttttgttgttgatttcttttgtaatggatcttgtttaggtttcatttcgtgttccatcatcgtcactctcctagggtttcggttttgcttactgttttttttaaaaaaattcttagcctttcctggaaattattcttattattctaggttattaatagttgggttgtgatttgtattctgatttggttctctgaaattgatggaattctgttgagtttatgatcttgtttgattggcttcagacaaattctgagagtcttgacgagttttcttgtttctttttcaggcaatagaatcttgggtttggttaagagagatg

SEQ ID NO: 32574 - DNA, 2651 bp, Unknown; identical to SEQ ID NO: 746
  misc_feature (1)..( 2651): 2750-1469P.txt file - cDNA_ID_3058753; gDNA_ID_1620316; Annot_ID_153172

SEQ ID NO: 32575 - DNA, 1369 bp, Unknown
  misc_feature (1)..( 1369): 2750-1469P.txt file - cDNA_ID_3058761; gDNA_ID_1620317; Annot_ID_153225
caatctcattacgcatataacattttatttatgtgaaagttgcagatatagatataaaatgaaaaagtcatatataaatgacatgacaatgcaaacaaattatttattagaaaaagaaaagagaaaaaataaattttatagtgccgacagttttctttttccccttgaatggttgtaggctaatatatctatttatgtcaaactattagatcttcttttttcttttctacacgtccatgacaaaatgttagatcattgccaaatttaagacatatctatttagcgaaagctaaaatttggatagtacgtacactacacctaatttgttaacaccatttacggatagaagaagcctacacctaagtcggtggattcttggatttgtacaagtaggtctttaacacgaaaatatagttaaactggaactacacttagattatactaggtcttgccatcttcatatatatgctaatatgcccacatttggtgcttactaggttttaacccgcggtttaccgcgggcaatcggtttatttggttcttatactaaatatttgaataaatttgatatcctaaacatataaatataaatttctagtgattagtgaagaatattgatattattgattattgatttcatgattgaatagagtgtttttagggatggaatgtgatcatcttttgatttcaaaaacgacatagattccttatttttgttgaacggtttagattgaaggaaaataatattattaaacggtttagattgaactgaatcatataaagtttaggagattgttaagaccaaattacccttaatgattttgaatagcaaagaacaaaatccaaaattgaaatcaaaattgaggttaaattagacaaaatttcaatttgtacttcccttttaataataaagggataatctttcggtatatagtttttttttgcatttactaaatttgtttaaattgcttgatattctacattataaattaaattacatacattacaaaaaaaaacaaaaatcagaaacaaacaaacactactcactgaaatacaaatcttaattacacattttaaactttcactgaaatcatttaaaaatgtttcactaaatattcactaaaatacaaatattcgtaaaaagttaattgtccaatgaaacttttattgtttgtttaattcgattcgacagtccactttttacgaatatttgtattatagtgaatatttatagtaaataagtagtgaaagatatttagatagtttcagtgaacgtttaacatatgccttattaagatgctgatatttccataaggtaagtacaactatatgagagcttgcatcaatctaatccaaccaaagaataatg

SEQ ID NO: 32576 - DNA, 3003 bp, Unknown
  misc_feature (1)..( 3003): 2750-1469P.txt file - cDNA_ID_3058792; gDNA_ID_1620317; Annot_ID_153216
aactgaagaatatttcatgagcataaagaggtgatgattgtgaatcatgatattcgataaagccaatattagcttaatcattttcatttgtttacaagttaatagcggtacgaaataactagtctatttttgtttttctccttttggcactatgaatctatatttcagtttttgtcttttccaacttgtacaaatagcattacatttgttttgctttcctacttaaactcatcatataaatatgaataagacatagaaaacagtaataaaagtgtgttcttttgattggaaccaataaacccacaatcgttttattggaaccagtctcaaaaaattaacaccacaatttttaagcttcaaagatgacattgaaaactcccaacaaccatcatcatcactgaactgttgttatataagattaggatttattattactaataatgttttacatatttattgagctttaacaactaggataaggaatattacaaacttctaaaactttgcgagcaactggagagctaacaaacgtactgtataagggattgttaatgtaaccacataaacattccttttgctcaatcagtttgtcgcaacaatctttagttggttgtcctcctgtggtcattgccggtaagcatggcatgagttctgttggaatacatgacgatgacacttctgatttgatcaaaataggagatgacatgacgactatcacaactgtgatgaccattagtttcatgaacttcatgtcttgaaactttgatgatttctttttgctttcaattgtttttaaaacttataaatttgagattttggtttgtaggttcttagttcttacgatggcaaaactctatataaatataacagacaagtcagattgatctatccttgttaagaaaaactcatccatttggcaatcatgcaaaataaagtgaaaaccatgactaatgtacatgttccacaagtgcttaagcatgtgttgagttgtgagaattttttgtccatttggccatatgtaaaataaagtgaaggttataactcatattccaccacaagtgttcaaacatgtgtcgagtgtataagttgcatagtaatatatccgttaaagtatatagataattttctatatgaaaaccattgtgactcataaaagaaaaactaccatataaaccaaaataatgttgataagattttatttgtaaactaccgaaattatctctattaacatttatattgtgagataaaaagattctcttccttttctcctttattcattattgttttttcaaatgtcatttgtcttttggtttgactatatttttcttaaaatatgacctcatctcattatctaaagttttccccccctcatttgttaaatttatatggtttgtttaaatgattgtaaagtttatttaactagaaagccttatgtacattaaatgcaacatttttcttaagttatttgaattttttttataaattttttttttcaaaaaatagagaagagaattggacttttcttgatctaaaccaaataatcacaaccattgccggtcctaagaaagatgtggtccaatacaaaacaaatattttttgatgggttttatagataaaaatttaaaaaggtcatcacatttgggatacaatgacatataatattatattattttgtaagtttgtttagtgttatgaaaaatattagtatgtaaatagggtggccgtttggttttgtttcagttcggtctttcagattttacgtttttttggttttgtaaacattgaaaactatatagaaaccctatgtaatttagtttggttacggttttccgattttacataaaatggaaaggatataaaagtataaaactatatgtattttggttctctttggtttcggtttggttccggactttttaagttatgctatgtttttacaaaacaaaatataaatttgaataagaataaaatatcaataattatatatcactaagagatcaataattataagcccaataaacaaaaaaattagatagtaattctactaattacaatataaactggacaatattattatatatagttatccttaagtttaatcaaaaaccaaaaaactattccgttgtacggttttaaacaaaccaaacctatccaaaaacttaataaaaataacaactaaatgaatttttattctaaaccataatcaaaccaaaccatttattttggtttgctttggttcgttttttttttgcccacccttatgtaatattgtatgagatattattttttacgaactaatcttgttaggatattatttatttgatatgacatttaaatgaatatttttttacgagtaaagaattttattaaattgttttagttgcaaacgtatatatatgttaacttaaatgaaaacattttattatttcgatttttgtctttggcacgagctaagacgctctgtaaaagtgaatgttggacatgggcttcgccccaccaacacgtttaaaagcccaacacattaaaattagtaaaaaagaaggaaggaaggaagaccggcccgttaaaagaaaaagagctcagcatcagacgaggcccgcctcaaggaagctgttggtcaagagaaagtcccacatcgagaagaaacctgaacgatagactgtcctttcagtactataaatactgacaaaggaatgtcagaaaaaggaagaggaaaaagtgggagagaaaagcaatagaaacttctaattaaacttctaattaatattaagtctagttttgacttgtgaagtctgtattaaataagtttaagctcggctgtggaaacattttgtaaacagccgaacttcaaggatattaataaagatcttccttaaggctcggcatttcattcttcggtttggaagtttggttttatactccaacaattggcgcgccaagtaggggtctaccacaagaaaaggagaagagaaagccgaggaagatctacgagaaggaaggatg

SEQ ID NO: 32577 - DNA, 3000 bp, Unknown
  misc_feature (1)..( 3000): 2750-1469P.txt file - cDNA_ID_3058800; gDNA_ID_1620317; Annot_ID_153213
aaaactgtcacactacgggtgattcaaaagttaaggaaagagttcatcaactcgacttctctcatatctttccttaaaaaatttatgatttcgatttcaattatttttacgttttgctaattttagctcacacttctcaaccgctccaccaccatactgagctacaccgaactcatatattgtgtttttttttctcttctaaatgagaaaatcaacatgaatcataagaatcacgtttataacatagatatagacaataatacatgtagaacaatgaagagtttttggaatccagaactgtgtatggaactacatatgcgatttaaaataggaaccctatgttccacactagaaacctaaagaaacttaaaagtgatgcaattgtggactcatgtgaaacaatgggtttaggttaaatcttaaaaggagtatgcatgcggatacgttacttctggcaacgtttttttcaaagaatttgttttaatttgttttatacttttttacaattaggtacgaagctggcatgaggtatgaagaaagtctataaaaatagcttatgtggatgttttgagaagcctgtaaggctacatttaggtatggagttgatatgtattgggcaaagatcattcaaataaacaaaacttattactccaagtctcaacaaaaggaaaatgaatgactttggacttcctcaacattgggctgcccaatttgggcatttattttatttggacttctactagaacatacatcatttttggttcaatttaactttttaagtgtatgggtcttgttcgaataatgggggtctaagagcatcttgtatggtctgtcataaatttcaatacaattatacaaaagtgggttgcatgactagtaatctgggtaccaaaattcgattttgaaacatctgaccctcttgttaataataataatacttaataaacgcagacaagaaaaaaattagaaaaaaagaggagacttgagagtttgagaccttcttgttgaacgatcattaatttgaccagtccagaaaaataataatataatcttaaattcaattttgacggaaacgcagacacaatattgcatgggtccttcacatgccttgtttattattttttaaggaaatcaagagtatatggtcaatatggagagaaaatcctttgtatggtccaagatcaatgctttatgtattttatatttgataaatattatatcttaaggcctactattaaacaaatctaaatttttttatttttaattaaaaaaaaaaaaaaaaaggaaaattgtatttgatcaatactaagaaacaacgaaatcttacatatactacataaaaaaaaattatatgtaaaatttattgatcaatgctaaagaaaacattaaaattcgtaataatttttcaaatcctacataaacataaatagttattcaaacttttctcgttgatatttattgattgaaaacaaaatttctgtaaaacttattttgattttatatcaatgaaacaaactagtactgtatgttgctagtcaaagaatgaaaacaagttagagattttacgaatcaatgtaattttcctccaaatcagtttagtttttttttttttttttgtcgaaatcagtttagttttaattttgaatagtgatgtattatgtatttaatatcaatgagatggttgttaaataatagacatagatgtatcgttttgataggccattcaatcatgctactttcatttttgtacaaaactaattatatgatagtgaacttcatgagagtgaattcgagatacaaagacagaggtcaattagagtcaagaatttcttgtttggccatgaatttttctattggtgagtttatgattatgagtatagacttgatagtaaataaatcttacgcaaatagtgctacgtcagctatgacgaggaccatagaacgagccttcccaccacacgtgtcctaaagcttatgttgactcaaaatattgatacactgtacaaatttatagctgtattttcttgaaaagaaattatactttcgttaacaataaaattagcaaaattcttctatataaatttaaaatctatatacaattatttgtaatcagttacagttttcttttataatttttataggtctaaatatatcttattttaagttgtatgaacaataatttttatttttggtaccacctagaaagctattttcattatatttttttaagagtatatatttttgttttaaaataatttgggacttataattctctttaatggcataagcattattcagaaacacacatgaatatgtggcaaccttatcaagaattcactcgtattcgtttctatcaaatgcatataaagtaaataatttttaatttccttttccaaatgattatatcaaattaacaaaaaagttacatatttatatccaaaaaaaaaattaagcagaaaataattaactactaaagtgggccagagaaaattaattacataccactcaaaaaatttagatttgatctgaggaagttgttaaccagacacaacgtatatgaattcgattcatttcctcatttaactcttttcattttaaaattcaccaaaaatctttacccaaaaacaaaaatagttttattaattataatatatatctttatccattctaattccagtatagtcagcaacttaataagacctgtccccttctgtattccttcaaagcaacaactaaaaaaaaaaaaaccgtaatttataattttaaattaggaaaaatagtcagaaaataaaataaaataaacaacgaaaatccaagtcggctttagcctctctttggtcactataaattcgccttttgcttctctctatctctatcacgagaactctctctgttaacgtttcacgtcaccatcaaatctaacaaacacacataaactattttttttgttatttgctttttcattttctaggtacaaatcaaatgggaacaatagatatg

SEQ ID NO: 32578 - DNA, 3000 bp, Unknown
  misc_feature (1)..( 3000): 2750-1469P.txt file - cDNA_ID_3058804; gDNA_ID_1620317; Annot_ID_153212
acatgcatggtgggttttgattacttgaaaacggatatcgttaggcccggctcacgggattttggcccaccaggccaccacaacaaccttagtgatgtcctactattttgacccacaatgtttttatcaaagatgaattattattgtatcttttgctaactttgttcttttgtgtgtagtcgaacacggcgctaagcgcagagcaagagatgaggctgaaggagatgggagcgacggtgaggaacggaggatcatatatgaaaaagttgaaagtggacgaggataagcagaggatggcgaggaacatgatgaaaaagatgaacatagagcaactctcagagcttatggcgttttatcatttgatgggtaatatatgtggagaggttttggaccgaaagcttcaaggcaatgtcaatgaatgcttgagggacctatgagtttcatgtgaatgaatcgcatgcagaggatgctttaaggaaaagcgactttgtaaatttgctttttatattttttggtcagaggatggaaaaaatggtaacgtgtgtgtggtcagtttaacagtcataggttatatgatgattttaccaacaagtttttttattacaaatattttcatgatttgctttagccaatattgctgatgtagatccaacaatgatttcaatgttttgtgaaactagcacatttgttataaattatggaataaatactatctggtataataatggtgtacaaaattaaaatgaataaatttaattttatataataataaaaaaatagataaattggcacgaaatatttgtatccaacaacatagtatcacttatctaaacattactcaatcaaataaagttgttgacaaagcaaaaatcttatgaaaaaatgaaggattctctccattttaatcgtctcttcgtcttgcatgtttaatcgataagacgataacgattagagtgacgttaatttcacttatacatgagtctccaagagaaagagatgctatattaaatcaagcagctcttgttctgatggggcaaagaggcctcgaccggcatattccagtttaagctaggagccttgattattctataggcaggtgataggaaaaaagattgttaggtatatatcaagtataatattgtatttctaggtacatatcgtacatggcaggccctgaaattttgggggcctaaaatttttaagaagtttgttgtagtttctaaaattgggggccaatttataggaaaaatcaattgggggcctttttgtaaagaaaaaataactaaaattttggggactacagtcaattgtttcttcttgctctgcttagttacgacactatatgtatgactatatgtattaactatacgatgtaatgtgttttataccatagacatacaattccggtacgctatttgactagcttcgacgttaaccaacattgaccaacaaaaatatttaagaaattattttatttactttttaatattaaaaagaaaatatatttttttgttgggtgttgtataataaaaaacacattctatattcaatatcaatatattttgtatatatatttttaatgcattagaacctataatagttaaaaaaaattaatttcaaaactaaactaaaagtgtaataaaaacattattaaaatttcaaaatattaaaatttaaattaaaaacaaaaaatcttattagaatcaatcaatatattctatatacttcacataactttcgtgaagaatgtgattatcgaagtcattgttgttcatgtgtgtattgcgattcaccatgcattactaaaatcatggatcccacttattttgtttgcgggtagtgcccttagcaccgttgttttgactttcatagattgtgtcttcaagaaaatataaactggaaatacgcattattattaaaaaatttattacaatttccttacataattgattctaagaagattatgaaatcattaataaagttattttttgtataatatcttgtttactttgtaaaaaaaattattaaaaacattctcgtaataacacataaataaccaaaaaatttgcagtgtttccttttaatatagaaaagatagaatcattagctttaatttgacttttaatattttaaaattttaaaaatatttttatttcgcttttagtttagttttgaaatgaaaaaaaaaactaactattgtaagagttaatgatttaaatgtatacatataaaatatatttatgttacagaaagaatgtatttttattatacaataccaaataaaactattttttctaatattaatataaataataaaaatttgttggtcaatgtcggtcagcgttagaatcaatcaatcggtgtaccaaaattgtatttctatagtattaaccatatgatgttggataatttatatatatgatcatgcaatatatttactttgtgtagttgaaaacacaatattatacttatatgtgtgaacatgcattcttatatatttatttcgtctagctatcaatttttttctttaattttatataattagctgcaatttttttttttaactccaattttatacttcaatgacgtataatattttatagttgttggcctatctttgtataacctaacgtaaaatgctatttcaatataacaaaccttacaaattacaattacgaaccctattttatcacttttcttcctaagaaagatttttctgaactctgaaatagtttttcttatacgttaacaagattttccacagtgaatgacttacaaataaaacgagaaaagtcttccaaagtcaactaaccaaagacgtgtcatttagttctccaagtctatgagtatctgtccttctcaatattgacttagtcgtggttcgaccattccactagctcttttctgtctccacttggtttttttttgtttaatcatttatcatctactctactttaaacacaaaccaaaaaagaaactactttccagatatcaatcatg

SEQ ID NO: 32579 - DNA, 3000 bp, Unknown
  misc_feature (1)..( 3000): 2750-1469P.txt file - cDNA_ID_3058808; gDNA_ID_1620317; Annot_ID_153210
gcataaaattatgacgtgtggttttgtttttttctttctcaggtttgtgtatgtattttctaatagaaacagatcaaactcaaaagtcttgatttcatatttggttgtaactttgtcatggtacaaaacttgtaatcactgacaagtttgattttagtttggacttgcttttctcgaaactaaaaacgcatatacagtaaaacctctataaattaataatgttgggagcgagaaaatttattaatttaaagaggtattaatttatcgataaattaataattattaatttatagagagattttacaaattttgtattttttttttttacaaaacttcgatagaaaagtagtttttctttataattaataattttttctaaaactaattacaaggaaaaaacaatgattaagtttaaaaaataatacaaaattttttcgacgtaataaaaatattagaattaaactctacaaataattaatagaaattgaagaaaaaataatattagagtcatatttcaataaatattttacatataatattgatatatatatatatgtgtatatatttgtaaatttatataattattaatttataatattgatgggaccatatatttatataagattttcgaaaaagttattatcttattaatttatcgatttatatcaatttttacattggtcataactcgggacgggaataatttattaatttatagaggttattaatttatcgagtattaatttatggaggttatactgtagtttatgactatttaagaaattaattatgtaattagcatatagttttccattaaaaagcgcatacaataaatctccaaatcaactaaaaaatattaacaaaaaataaatcagctgccggactttgaaccgggaatgagcaaggatcaaacagatcattggagcttaaatagcttttgtgctacagcggattctttgatactacatgaatttatattgtacatatatattaatgtgtggttttcattataaacttaatattttgttaacaaattttagggcaactttacatatatattttttattttttaagaactcaattatgtaattagtatatagttttccattaaaaagcggatacaataaatctccaaataaactaaaaaacattaacaaaaaataaatctgttgctgggctttgaacacggaatgagcaaggatcaaacagatcattggagcttaaatagcctttgtgctacagcggattctttaacactacatgaatttatattgtacaatagattaatgtgtggttttcattatagacctaatattttgtttgataaattttagggcaacttcgcatatatatatatttaattttttaagaaatcaatatgaaattagcatatagttttccattaaaaagcgcatacaagaaatctccaaataaactaaaaaataatcccgctgccggtatttaaactcggaatgagcaaggataaaacagatcattagagcttaaatagcctttgtgctacagcgaattctttgatactacgtgaatttatattatacatatggattaatgtgtggtttttattataaacttgatattttgtttaacaaattttagggcacctttacatatatatttttgattttttaagaaatcaaatatgttattagcatatagttttccattaaaaggcgcatacaataaatctacaaataaactaaaaaacattaacaaaaaataatttcgctgccaggctttgaacccataatgagcaaggatcaaacatatcattggagcttaaataacctttgtgctacagcagattctttgatattacatgaatttatattttacatatagactaatgtgtggtttttattatagacttgatattttgtttaacaaattttagggcaactttgcatatatattttttattttttaagaattcaattatgtaattggcatatagtttttcattaaaaagcgaatacaaataatctccaaataaattacaaaaatattaacaaaaaataattccattgctaggttttgaatctggaatgagcaaagatcaaacagatcattagagcttttagattcagatttgaaaagtttacattacgttgtgttatcactatgttaatattaattattctatatatatatatatatagatgttagcatcttgtatcaaacacagcaatattatagaacaactcaaattatattctataatatttattaccatttagtgcccacaagcgaaacagtaaggtttattgtcgtcaactcattgtgatattttgacccgtttcaaatttttcgcttattcattggtaattctagggtttatcgctaggtctatgtattttttttgctagtctaggttttggctttcatgaatctgaaaccggataaagtcgttagtacaccccaagtcaagaacccaccgcaggctcaggaaatgagtaaaccacaaggcaaaagatgatcaaagaaagaagggatcacctcaggtcaaacgggtttaatggacaaggatggaggcgacagcgtaaatgagagagagacagagatagattaggaaagtattcatttcattaggttttccgaaatggcaaagtgccttacaaatacttagctaaaccggcagtaaaccgattaaatgtttcagtaccacaaaccggtacaataaaccataaagacataattaaaccaggatgaattacaatcatgctgtagcagaatctatgtttagtttggtctgcgtagaagtaattttttaatctgctccgatagaataatgtgctatagactccggatggtcttgccgtgttgggggttatgtagcttctttgtttctatatgtatcttgggtttagattttggaacccttgtttatggagaaactaaagtttcatagttttaattttgatcttttggattcggtgatcgaagtttgatttcagcatggttatatgtcttaacatatttatg

SEQ ID NO: 32580 - DNA, 3003 bp, Unknown
  misc_feature (1)..( 3003): 2750-1469P.txt file - cDNA_ID_3058812; gDNA_ID_1620317; Annot_ID_153209
tatgtgtgaccctcgtcgccatttctttgggaatttcacatgtccagtgaaaggtcttggctctgtggttcagaactctacgtatcgtaaactttgtgataaaagttttagcgtcacagttcctacgagttatgttccagaggaagaagctctgaatttgacacatttggaaagtgttttgaggaaagggttagaggtgaagctgaagataagtgagatgtctggtcaagaatgtgtaaccactgatggaaactctggcttcacacggttttgctgcacgaacgtatcaggaccagaaatcagttgccttacttcaataactactatgaataatggttatcacttgatcttgaatttcatctaatccatagatcataagcatcactaattttacattctcaatgttagaatccatcattttttggatgcaatcttgctcaaaaagacattaaattttgcaggaacttacagcgataatcgccctttcctggtaacaattggaacaggttagagttactgcttcaacttcagcttgtattgaacttttgcgggactgaaactaaggttgttttcaatttttttagttctagggtcaatactatgtgtatgtgtggtgctgtttctagcattttatcttaacgagagaagaatagcaaaggctgcgagaattcagcacctcgaggcgcttggaaccctgagagggtacaattataaacaaatcaagaaaattacaaaatcatttacagaagtagttggacgaggaggatttggaactgtatatagagggagattacgcgatggtcgaaaggttgccgtgaaggtcttgaaagattcaaagggaaactgtgaagatttcatcaacgaagtcgcaagcatgagccaaacatctcatgttaacattgtaactctgcttggtttctgctatgaaggatccaaaagggcgatcatatatgaatttctagagaatggatctctggatcagtcgttgaatcttgatgtgagtacactttatggaatcgcgctaggcgtggcacggggacttgagtacctgcactatggctgcaaaaccaggattgtgcattttgacattaaacctcagaatgtactgttagatgaaaatctcagacccaaagttgctgattttggactcgctaagctctgtgagaagcaagaaagcatcttatcattgcttgataccagaggaacaataggatacattgctccagagttgttttcaagaatgtacggaagcgtgtctcacaagtcagatgtgtacagctatgggatgttggttcttgagatgatcggagcaaggaacaaagaaagagtccaaaatgctgatccgaacaatagctcggcttactttccggattggatctacaaggatcttgaaaattttgataacacaaggcttcttggcgatggactaacccgagaggaagaaaaaaatgcgaaaaagatgatcttggtgggtctatggtgtattcagttccgtccatcagaccgtccatcaatgaacaaagttgtagagatgatggaaggaagtttggattctcttgatccccctcctaagcctcttttgcatatgccaatgcaaaacaataatgcagaatcatctcagctatcagtggaaagctcaatttactccgaagtatgattccatgacttgggaatatatgtaaaaccaatcatatttcacatttataggtcaattttgcattggaaaatatattaaacagtaacgtgtgtctcaaactgcgtttatcaagaaagatcatgtaaaaatgctagggaatcgtaataaatcaagaaatatataatgtaaaattgttgtgcttatgaattggcaatctctgttttcatacaagatatttgtttgtgatttaagattataacttgagatcgtttgtgttgttggcaaattaggtatgattggaacttgaactgagattgtttgtgtcgttggcgaattaggcatttaggtgtagaaaggagatgatgattgattgaatttaataatttgtctcttacaaaaccaaatattaaacaaatttacttttcaaatttgtaaactgaaacttaaaattaaagtcattacaagataactaaaaaagtttgcagagatggaacctgctagtttttttcctttcttttatcttttctgcttacactgttggtactagttggcatttaaaattcgagtttaaacgagcatgcttaattcgggtttggtcgggataaagttttaactgacgactacagctctacttgtgacttgtaagtggccggccctgaaattttgggggcctaaaaattttctaagggtaaatattaaacaaatttacttttcaaaatttataaactgaaacttaaatgaaagtcattactaaaaaagtttgggtacccacatgccacatgcagatctagacttccctttttgattttcctttagttcgatttttttctctcgaaagcttctgtgatttagttaataacaaaaaaaaaagactcttgataataacttcttcttacttgctcttaagaacttataatgagatattgtgtgtcggtcgttttgacttcaagagacttgtggattttggtatatgtgttccatttctaacctatagagaaatcagatcagaggatgtttatgcaattaggatctttccaagcaccatgtgtataaccttttgtttgtggattaccaaattactttatgaatagggatgtactcttggatgaattaaaatcatttttaattaaagatggtagaaacgacaagaaggtaaagaaacaggagttccaaatatcataatgattgagagacaaagtgtgaacagaagaaacaaagatatggtcaagatccatacacctgttgtaagaaaagtctctcccccttataaagtctcccatttctctgtagccttatcaaacaagtgttctaaatatttgttcacagaaaacttattctcacacgtcatggattatttgtcctccatg

SEQ ID NO: 32581 - DNA, 3003 bp, Unknown
  misc_feature (1)..( 3003): 2750-1469P.txt file - cDNA_ID_3058815; gDNA_ID_1620317; Annot_ID_153208
ctattatcccttttggtcacctgaccgagaagagtgcggtcacccggttttcaaggtcaactgcagcggagatttcgcagagtttactatatccacggttaagttccacgtcctcgagatgaactatgagtctcgtataataagacttgtaagaacagagtatctcaacaatctttgtccttggcatccagagaacagatcaatcaaccaagaagtccttccatttcttcaagacaccgagctaggaaccttttattacaactgctctggtccaacggtagacgaacttgccaatggttacatcagacagcttgggtgtgatgaagaagttggtgggaaaagttactttgtctcgtccccttcacatcctgggaatagagctatcttagatgggttaagtgcatcgtgtgaaagaaacgtcgatatccctgtttctcgatctgccatggagacaacagcgacaaatcagagtctcgaggctataaagaaggttcttgatgtgggtttcgaacttggctttaacagtgattgttccctatgcgtagcatcaaaaggtgcttgtggctttaatcagagctcaaaagcattcgtctgttattgtaaagatgagcctcacgagcatacatgtggaaagatgggtataggtttgtgagtttcaagtgttttttttaagtacgcttctaagttctgtcttgcgtttgaactgaaatgtttctcatggtatttattcatgcaggggtctccaaaaaagcaaaaataggtatatgtttaatccttttccttccaagattcaatgaaaataatctttgtggaacagacctaattattaacagcataaacttatgaaggtcttgtcttattgtttgtttctaggcattggacttggctgtggatttttgggtgccactcttattaccgtatgtttgctctgtttctttttccaaaagagacgaacttcacatcatctaagaccaagagacaataacctaaaggggctagtacaactgaaacagtacagttatgccgaagtgaggaaaattacaaaattattttctcacacgcttgggaaaggaggatttggaactgtctatgggggaaacctttgcgatggtcgtaaggttgcagtgaaaatattgaaagattttaagagtaatggtgaagacttcatcaatgaagtcgcaagcatgagccaaacatctcatgttaacattgtttctttgcttggtttttgctatgaagggtccaaaagagctattgtgtatgagtttctagagaatgggtcgctggatcaattcctctctgaaaagaagtcactgaatctagatgtaagtacgctatacagaatcgctctaggtgttgcccggggacttgattacttgcaccatggctgcaaaacaaggattgttcatttcgacatcaaacctcagaatatactattagatgacacattctgccctaaagtctcagactttggccttgctaagctctgcgaaaaaagagaaagcattttgtccttgctagacgcaagaggaacaataggttacattgcacctgaggtgttttcaggaatgtatggaagagtctctcacaagtcagatgtttacagctatggaatgttagtcctcgagatgatcggagcaaagaacaaagaaatagaggaaactgctgcttctaactctagttcagcttattttccagattggatctataaaaatcttgaaaatggagaggatacatggaaatttggtgatgagataagtagagaggataaagaggttgcaaagaagatgaccttggtgggtctctggtgtatacaaccatctccattaaatcgtccaccgatgaacagaattgttgagatgatggaaggaagtttggatgttcttgaagtccctcctaagccttctatacattattctgcagagcctcttccgcaactgtcttctttctcagaagagaattcaatctacactgaggtatttataggatccacaagttgaaaacttatttggacactccatatctgtaaacatcttaggtatttataggttcacagactccatcatataccttgtggcttatgtaatcgtgcaacaaaatattattgaagaagaattttgcctgacaagtgtaaagagtgttgagtttattgtctatttggtgaacatcatatgagacgttggggaatgttaaagaggttttgtttgaaactctgtcacagctaagcttcagatatggatgaccacaaggataaccacgatctgctcccagaaacggaagtttgctgtgatgtttccacactcgaaaacagagtcatgtgagaagagggatgggcaggttacttagagtacaaggaaggaacatggacaatatcaacaaaaaaaaaacctaagagtgttgcaggatccatcaatttttgaaacgtaagaatttttttgtgtagcacgaagagatattaaaagaagaaaagaatcagaaatttaagtcagtaagcaggaaactgctccatacgccaagtcctctgtttctgttctgttagttgactgggtctaacagtgggattgcatatccacttactcacgttgcgttactttgtttcttttattttggtgtatttaaacatcagctaagacttgaaaaattgacaaaacatagtttatctctttaggtacttagtcttgtgttacacataaacacatctcttagctatgaggagggatcacctatcacacaacttggtcagaccgacgatgagttaaacaagcgttctaaatagaccgaacagaagaaacaaaatatggaaaaatcactgaaggaatcaatttagatccatgcacttgtcgtaagaaaagtcacttaagtcgagtctttatggctctccatcatttgtcaaagtcaactaagtctcccctttctctatagctttaatcactctctctcttttttcggtttctaatcagagcagtagtattcacacacctcatggattctttatcatccatg

SEQ ID NO: 32582 - DNA, 3000 bp, Unknown; identical to SEQ ID NO: 759
  misc_feature (1)..( 3000): 2750-1469P.txt file - cDNA_ID_3058843; gDNA_ID_1620318; Annot_ID_153238

SEQ ID NO: 32583 - DNA, 3000 bp, Unknown; identical to SEQ ID NO: 14905
  misc_feature (1)..( 3000): 2750-1469P.txt file - cDNA_ID_3058863; gDNA_ID_1620319; Annot_ID_153276

SEQ ID NO: 32584 - DNA, 3003 bp, Unknown
  misc_feature (1)..( 3003): 2750-1469P.txt file - cDNA_ID_3058891; gDNA_ID_1620320; Annot_ID_153307
gccaggaaatgaacgacctgagtgaacatgtactcgatcttgaagtcagagtaactaaatcagggaaattggaagaagaagttaactatttgagggaggagttgtgttcgtcgaaatctgagcagctattgttgttgcaagaactggagagcacagaaactgagctacagttttctttgttttctgttgagaagctggaggagtcggtctcatccttaacattggagtctcagtgtgagatagaaagcataaaacttgatatagtagcgttggagcaggcgctctttgatgctcagaaatttcaaggtgaaagcatccaagaaaacgataagttaagagaaatagtcaaggagctacggttgaactctcgagaggcagaagagaatgctgagtgtttagagaagcaaaacaaggagctgatggagagatgtgtagcctctgaaaggaatatcaaagacttacgtcaaagctttagaggaaggttggaaagtgaaagtgaagcgcctgtaaatccagattgtttccatgacatcatcaagaaattagaggttttccaggatgggaaactgagagacaaaatggaagatatggcaagacagatacttcaatacaaagatcttgtaaagcagctcaaggtattagttaccaaacaaaacagtagaatcaaaaatttggtgcctttttgcagcgtcacacatattctaactagttaaaccattattttgttatgcctaaggatgagttgaaagaagagaaactaaaggccaaggaagaagcagaggacttaacacaagaaatggctgaattaagatatgaaatgacatgtttattggaggaagaatgcaagcggcgtgcatgcatcgaacaagcatcattacaaagaatagccaatctagaagcacaggtacttgcttctttatatcttccaatttttttattttttttgagccatcagatattgttgaaggaacctaacaaatatccattttcttgttaagatcaagagagagaagaacaagtcctcaacttgcttagttcctcttcctgctgtataaaccagctaaggttcgagttaaacttgaaatcacagttaatgcctcaaataagcctttaagctataaggtttgaattcttatgtatttaaagtgtacataatccaatttgattggaaattggaatatagatttcatccctgtgattatgtttatatatggaaattgagttttacaagagtgaaactgcttcttcatgtgcctaccaaaaaaaaaaactgcttcttcatgtggcttctaagtgtttaattacgccttcagcaacatgtagagatcttgagaaattgacatgagtctctagagaatgttgaaagctgtggtcgttgaccaagaagattcttactatttgactctatttgataggcctgtaatgagcctaggtcaataaggctgagtttatttgatggcccgtttttctctcttttattgttcttctttttcttgtgaaaataaagaaatctggaagcgttgttgtatcatcatgtatgtgcagagtctagtaaccttgttgttgatgcaaagggataaatgaatgggtcaaggaaaagaacctgttgtctttattgttaatcaagacacttgtagatttgttgtctaacctaatccaacttgactttaagcaaaaacatattccaacttgttcttcaccaaaatgatatgttgaaatatcgtatctactaggacatcaagattttgttgtagtcgttatcaatgtaaccggtaacaaataaaaattaatgagataaattaggcatgatcatatccatagatattgtcaaacaattttctatcttcaagtagtttttggttttgggcgaaaatatgttctctttgacaaattcaacaaagaccattctttttggatgacaaaattgacaacttacccattctttttgggctcatacaatttatcaactaaaccatcagtacaaaaaaagaagcagaaattagaaaaatataagaaaatgactctttctctgtaagaaaaaatccaactacgtttattatatccacaattacgtcctatatacaattaaaaagatctaaattgctctattttcgttagaaagtagttactttttacttttttagaagtttgatctagaaaaaaaaagaattatatatatgaccgttttagatttgaattaaatgattttgttttatttattaattgatccacgttcctttctacaatttgttttttttttaatctccttgataaattttcgtcaacacatacccaaagacctccttgttgtactctcaaattcttgggtcgttctgagtcgtctccgcgttaaatcttttccctttttgatcctttcttcctttcttcttcttcttcgcattgatttggtcctccttcctcttctattctattcattaagaacctaatcttcatcttctccatcttcttcttcacggactccacttcgctcatccaggtaaccacaatctgctctctatcttttgcttcaaaattctcagttcctttcttctcaatttccgtctgctagatcctgggctttcgatttgttccgttcctcttctgcgattgtttcgttccagagagaattatcgaaataattaagcgaattttgtgtgtggttttcatagtcttgggttctttagccgctacatatactcaattatgcccaaaattaggtttaaaattgattaactaaaacttatactttttggtctcgtcttatgttatcgtttaaattgttcttagaagtgaaatcattcgatgctacgtttttgacttgttgctttactttatctatacctttgatttgatcaacttttctcttagcttacaagttagaatcaaagcatcaatcctgattactgttttggtttctgcaggaaggtttattagtagtaaccaatccaagtgttccttttgtttgaagcaacaagctttgtgatattatcctgagagacaatg

SEQ ID NO: 32585 - DNA, 3003 bp, Unknown
  misc_feature (1)..( 3003): 2750-1469P.txt file - cDNA_ID_3058895; gDNA_ID_1620320; Annot_ID_153305
cttcaaaatcaaagtgtagaaacagagattaccaataactaattgtgaacgtttcaaagtttttaaaatttcttgtaaacggaggtaaccattaaaaaacgaattacatttattattttgtaatattcaaaacaaaatcaaaatcttgagaatcgaaaccgttacgtatactacaatttatatgatcacattttaaatttcgaaaattgagggacatttcaaattcaagaaaacatatactccactaatttagggtgtctccgttagtttctaaaactcgttgccccttttaattccagttcaaaagctcacgcctcatacacaatctctaaaccctgacctcccatttcagtttctctgtttgagaacacttgatttcttttaaaaatggcggctacagtagcagagtacgcaactgctaaatcattggcgttgctggacacagagaaccgcgaggttctcaatagttttgatgccatttttactcatggcaacaccgatcaagtcgctcctcttgatgagcctctggtctttaaccgctttggactcagtcacatctcggccaaagacacccatcaaccaaaaacggacgtagatgaatcagcgaaggcggatttcgctggtgcaaaaacgtcagtttggtgggacattgagaactgcgaggttccaaagggttgtgaccctcatggggttgctcagagcattagatcagttctgtcgaaaagtaacttctgtggtccgctcactatttatgcctatggtgacacaaatcaaatcccttcctctgtacaacaagctctctcttccaccggcgtatctctcaatcacgtccctgccggttaatctctcttcttgaaacacctgattagctataaattaaagtatgaatattttggagttagtgagaccagtctttgctttgtagtctctaatggcttaattattctctatgttcttgatgatggtgagcatttaacaggagtaaaagacgggagtgacaagaagctccttgtagatatcatgttgtgggcaatggacaaccaagctcctgctaacataatgctcatctctggtgataaagacttctcttatcttcttcacaaactaggtatgaagaggtataacattcttttggctcgacctgagaaagcttcaacgccactcatcgctgctgcaaagaccgtatggttatggacaagcatttttaatggcgattgtcctaacatacctattgatctcactactagacgtcatcatcatgattctgcctatgaggtatcaagacatttgggtcctaaacaagctcaagggaccaagaggggccggagtttttgtgaattatgcaatgtttcttgctcaaaccatgatttaaccgctcacctctctggtagaaggcacagagctaacgtaagctatacatttctttttcttaatgtgtgcttgaatattgtcctctctttaagcctaatcttgagttcactctacgggcattagatgtgaggcacatatatatatatgttttatgttgatatagtcttgacaattgttgttgtacattttctcaacttgtgtaggttgagctagtagcccgtggacgccctcttgtcagtaattcaaccgaaccaaagtatgcatggtgccgagtttgccgtttgcgtttccgcagccaagcaagttatgaaacacacatcttagggaaaagccaccaagaaaaacttgaagaccaaaacgagcattccaaaaagcgcatctgcaggaccccctaatcgtttcatataagattttggagggaagacataatgcgattagagtttgttaattcccaaacttgtcttttgagtctcatctttagttgttggttgaacaacttttggtttcggttttcatttagtctcgtctgtgtttttggataaaagccgagagctgagcccacgttgataacttttttttttttcaaaaattgggaacctagtagatgatgatgtgaagtgataattacttaaacgtgattatatatatatatatatatgtgggaaataatgttttactggaatgttgatataatagttttgacagttttttgtactctttagctgaaaccattttcttaattgatttttgttgtcagtgtgctaatgtcattggtgtaatcaaacccgaagcaaaatcgaaaaccttccgctgtaagctttgccaggtcgattgctcgaacgaagctatgtataatgcaagtcatatttcagggcggaaacacaaaaacaaacttaaaagtcaagctaatctgtttctttaattaaatttagagtaatagatataatgatctttgaggtctatggatttttggtaaggaataatttgagccaaatttgagcaattttgattatcgatcgtacaagttgtagttttgttgctccggaagatttcagattttgatgtaaatttaatcccacaagttataatcatttttgtagtttatggaattgaaattctaaacataattgttctgacaaaacttgtatttttaatacaattttgaaactctgcacatccaattattttctttaacgtgcatgcaccgatttatttagtagccttaattttttcttattaagaaaagatcctttactaattatgacacttattttcgctaattaccgatggggagatacagcccccaaaagttacaacggctattttcaaatgctgattggtgccttttcaaatgctgacgtggcttaaataataattgtcgaaaaagtagaatactgtatttaacttgatcgtactacagaggacaaaataaaaaagcagactttgcgaaaagcgaaaggtttcttcgtcaacatggaaagaacttagtggaaacttcttaaaacttagattgtcagattagcataactcaccttagcaagctccgatcttcgacgagatagtgagaggagtaaagagtaacttttggttcagaaacaagtgtctcttctctctctagtatctccggtgatg

SEQ ID NO: 32586 - DNA, 3003 bp, Unknown
  misc_feature (1)..( 3003): 2750-1469P.txt file - cDNA_ID_3058903; gDNA_ID_1620320; Annot_ID_153300
atatactaacattaaaaaataaattgtttccgcggtgtaccgcgggttaaaatctagtatatatgtataaatgtaacgaataaaatgagtatataattttatatgattagtgttgaatgttttgacttaacataaagttgcatcaaaatgtataactaatgctatatacttctctttttgaaaaaaaaaattgagtcttggtatattaaccggagacgagataatgtaattatatattaagattttttttcactggcatcaaatctaccagaacagtcaaagaggtaattaagagtaactgcaagagctgaaatcttcttacaaacaaaaacataacatagacccataacacagagacagagattaccactaaactagaccaaaatgtcctcgaaacgataactaagtgcacccacagaaccagagaccattaacatccttagagcatcaggaaagagcagaatccactcgaagcgatcaagagaaggcagatgaacaatttgcttgagttcttgagagcaaacgcgctgctgtctgtcgtgtaatccgggttaatccctgtcccagtggtgcctcctgtgctatttcccccaaaaactccattggttgggttccctgaataaggactgttggtaccactaccaggaagtgtggtggtcgttgggctgccttttggattggttgtgccaggtgtcacagttgtgctgccgctagagccactggaagaaaataagagttatatcagacaatgaagttccaaaaccagaccaagtcttgatgaaagagattgatctaaaggaaagtcttcaaagcaaattcatattctatactcaaaaaacgctaacaaaaagaagagtctcagtttctattaactaaaagggtctttgatgggtccaaaagattaaagatttagagtactattgcttaatacggccatatcagtcaagaacatgatcatgcgttcaaactgtaatccaataaagcatttgattttgattatagatatgaccaaaagtttggttaaagaaataaagaaaattgagtacttttaggttcacgttgaacacttacaattaacagtgtcttaaaataagactgttcacaacagagtcaaaaaatttcattacttactctatttcctttagtctatttaagtaatactaatgatgctgttttctattttaatttaagctgaatgatgatatctctttcacaacaaaagtaaacaagaacaaaaaaagttgtaatttgggacccaaaccaaactttaatctactttttctctttgccacaaacatagaaaacaaattcttggttttggttccataaaatgcaaaacgtttctttcaatttcttgataaggccatttgaatcagaagcatacctggcactagtaggaaaggcacaacctgtataacctgtaaaaaacaaacacagaaaatgttaagccattggttattgtccacaaatttgaaaactagaaatatagtctttattatgcatttggcgtatccattttgtctcagaatcttgaataccaaagtcattcactagtgacaaaaataaaaaccttcaactttctgtaactatcaataattagacaccacatgaatcctaacaagcactccaaaaagagcaagtttctttagcattggcctaatgtaatatcaaagagcagaacaaatgagaatagtttagagagactaactgggatcggagttagtgggagtggcagttccatcgaaattacaagagccaggagattgacccttcttttggaagaagctattgactgcatagttgcaatgagacctaacattgtcagggttgaagcaagattgttttggtttagtaggattacaatctgctccatttccacaagcatagtctagggttgcctgtagcactgtatcactcagccctgtcttacacacacaccatgaggcacctacaaagaccacaagaaagccaaaattagaaaatagatagctgcatcttccttgttctataatgtgagaagccaacaagatttgggtaaatcttggaatcacctttaaaaggcaagatttacaaatattagggtaaaaaaagtaagtaggaagttgagagacaacaagcaaatcagaagaagaaaaaaatcagtaaagttttctagaaatttgtgaactatgccaagaaaaaacactttaagaacagaaaacaattttttattttttcattcttcaaaggaacagaacctttttcagacaagagctaactaagagtgaaagagataagaagactaagctaagaaatctgaagaagagtgaaagttcttactagaatgtccagccaaggatagaaggagaagtgaaagcaccagagcagccatagatgcgttcagacaaaatgtcactgttgtctttctagaaacagagagagaaaagaatggagatagagagatctctagagcaagaagaagaagaagaagaagaagaagagaaagtggagagacacagagagagatagagagcaagtagagagaaagaggggtggtgagatgagagagtggctacttgttctgtgtcttcttgtctcttctcaaaacccttttgaatgcttttttacatcattaaagaacttagctcgtgtagactttttttgtacgtatatttttagatttaaattaaagacacatcgtattattggtacttcaaaataatttaaaatgacttattgtaaaaggcaatttttttattttttgtgttgcaggatgagatgtgaaaaagctgattcagaaaatcttgttcatgcttgggtcagatttgaataatttgttttgcaaaaaaaagaaataacaataatttgtttactgtgtattggccattctaaattttataaaatcgacataattacagtaaaaaaaaaagtataatattttgtgtattttatttttaattgtcttgttattaattcaaaaaaattctctaccaataataataaaaaaagaataatttagtcatg

SEQ ID NO: 32587 - DNA, 3000 bp, Unknown
  misc_feature (1)..( 3000): 2750-1469P.txt file - cDNA_ID_3058907; gDNA_ID_1620320; Annot_ID_153299
atttgtgcagtaggggttggcgggataaacacttcctcatatccttttaagtgcttccttacagtaccttggggaagggcaagtgcaagagaattcgcttctccagacccaatcagatcctcaaatgcagtcttcttttcacttgcctcaagtaaagaagaaaaattggcctctgatatttcactctctaaaccaagatcagcatttcgtttatttttcttttcctccttacgccgaagtttttcaatttgctttgcagactctgtttgaacagtaacctgaaaggtggctgagtgcaatcattactgtggctatagaaaaggaatggtgcccaaaatcagaagggaaggcctcaggcaaatagatgtacctgtgttccataggtaggcatccgagattgggtgtttgaagctgctttgtcagacttgagaatcatttggccatgatggatagcatcaacaatttctttccgatgctgaaaaaggaatatacaagacaccattcacatttctaagagactagaaagaagaatataattttaatatagaccttagtaacaactcttttactatatataggcacacccatacaccataaagtcggcttaaaagatggtgatttcatccaaaaacataaaaacacagttgtgcatgccacttaaacgtaatggtaactaatgagaaaggcatactatactgtagaatctaacggaaatcaggtaccaagtatcaccacaggtccgtagacttcagaaaaaagagcaatatcaaatttaggccttaccataataaggtcttgaacagtctcaaatgcaccatccccaacaagatccagcagatccccagctatctgcagaacaaatatttaaaatctcatctactttcacttgcaaatatgatgctctaggaacaggtatagtaggttcgaaaataacatacctcctcaccgggtttatccgaatccagaaatctgcatatagccatagccaattcttcacgggaaagttgtgaattggtttctctaaccatccgaccacatgcatctcttagccaacttaaattgaattttcctgcactgagattatttttcgtgtcgctaacaccactccatccttcagaaaacgatgtatgagcatcattgctttctacatccacaaacccagtttcgtcaagagatgcttccaccaaaaaacgagctggtagattgaaaacaaggtcggcaccaaactcagctcccccattaacttcatcagcatatgtctcagactgatgagtaggctgtattgagtaaagtgcctgagcaaaggaggccacgttttttacattagcatctgagacagcatgcccgacaagattttgcaactctaacctgttgaatataagaaagcctcaattatctctgaacaccataaagaagtgcaaaaatctcggccactttcataatcttcaacaatcttgcatcagcatggttgataaataaacgaatatacataaaatgaaaaaacagaattaacagtacttacttcttcccggaaatgcttatattatcattgatatcactatcatcttcctccactggattgttaaacagacgataagcggaaaaagcaacctcgcgaaactcatctgatggaacttcccgatcaatcaattccactacagctccaataaactgcttgtatgcttgtcgcacttcgagagaagctgtcacaccaattccaatcaatatacacacaacaccatcttttatagagaaattgggaaaaaatagatatcatcataaaatcacctccttcccattgatgaactatcctcttagcaaggtcagattcatcaaggcgattaccggagctgaaatggcaaacacaagtaacacaatagtccaattcaattcaagtatttccaaatgctttccaaattctacttagacattgtgatcaccagactatacaactatcaaattcgatatagcaccaaacagatgctatagaactcgctgaaaacttagtaaacgagtggaatcagttcggaaagaaaaaaacggacctgcgaggcttattaagagtttggagtatagttttgcggcgaaggtaagcctgatcgatgtcgaaaggctctctaagagagcttgtcaagcgaggaagctgaactaacatgacaaaatccctgtacttgtgtcgtttaggattcttctcctctgtggtgttttcacctctggtcggctctccgaggaagaaggcgatcgcttgcgttctaaaacggcgtcggttagatacttgaacaaataggcccgtacaccgacccgctaagatacgggtccacgaaatcgacgtcgttttatgtttattacatggggagttgtggaccatgactaaattattctttttttattattattggtagagaatttttttgaattaataacaagacaattaaaaataaaatacacaaaatattatacttttttttttactgtaattatgtcgattttataaaatttagaatggccaatacacagtaaacaaattattgttatttcttttttttgcaaaacaaattattcaaatctgacccaagcatgaacaagattttctgaatcagctttttcacatctcatcctgcaacacaaaaaataaaaaaattgccttttacaataagtcattttaaattattttgaagtaccaataatacgatgtgtctttaatttaaatctaaaaatatacgtacaaaaaaagtctacacgagctaagttctttaatgatgtaaaaaagcattcaaaagggttttgagaagagacaagaagacacagaacaagtagccactctctcatctcaccacccctctttctctctacttgctctctatctctctctgtgtctctccactttctcttcttcttcttcttcttcttcttcttgctctagagatctctctatctccattcttttctctctctgtttctagaaagacaacagtgacattttgtctgaacgcatctatg

SEQ ID NO: 32588 - DNA, 3000 bp, Unknown; identical to SEQ ID NO: 778
  misc_feature (1)..( 3000): 2750-1469P.txt file - cDNA_ID_3058919; gDNA_ID_1620320; Annot_ID_153288

SEQ ID NO: 32589 - DNA, 3000 bp, Unknown; identical to SEQ ID NO: 792
  misc_feature (1)..( 3000): 2750-1469P.txt file - cDNA_ID_3058947; gDNA_ID_1620321; Annot_ID_153334

SEQ ID NO: 32590 - DNA, 3000 bp, Unknown; identical to SEQ ID NO: 796
  misc_feature (1)..( 3000): 2750-1469P.txt file - cDNA_ID_3058958; gDNA_ID_1620321; Annot_ID_153326

SEQ ID NO: 32591 - DNA, 3003 bp, Unknown
  misc_feature (1)..( 3003): 2750-1469P.txt file - cDNA_ID_3058962; gDNA_ID_1620321; Annot_ID_153323
aaatactgtctctacgagggtgagaacaatctccagacacaaagacattcctttgcccatccacttctagccagctacatcccgctggctttttcatttcctttttcttcattaggtttctcaactccatcacgccttcccatttagcatctgcagcatacatattcgatattagaacgtggtttccggtgtcgtcagattcagcttgcaagagatgatttgcaactgagtgccccagatccatcctattataggttgtacacgcccttaacagtgttccccatatatttgcattaggttcaactggcatctgtgtgacaaaagaatatgcatcatcaagtcgaccccctcgagcaattagatctacagcacaagcatattgttccattgtaggtttcataccgtgaactgtccttattgagtcatatatttgcaatccatcctgtattaaccctgcatgacagcatgcagtcaacatagtagttatgaaaacatgatcgggctttatgtttgattcagtcatatgagagtagatcataagtgcttccttgcccctaccatgtacagcatacccagctaccatagcagtgaacataaccagatctctacgagcatctgactggaagacagaatatgcatgcttcaagctgccacatttagcatatacatctagtagagtccccttcaggcggatatcaccaagtccgcctctaataatatatccatgacattgtcttactagatgcagagaggctagctgcgcacaaacaggaaggagattcatgatagtcacagtgttaggcctcattcctcgagcttgaatctcacggaaaacaccaatggcttcattagggcaacaactttcagcatagatacgaaccatcaaactccaagtggtgagatcagtagtagacatctcagtgaagagcatctgagcatcatcatgacttccactattaacatatcctgataacaatgagttataggaaaccaaagttctcctctctgataaacccagaaaaatcttatgagcgtattcaacattaccacatttggcatatgcatcaagcaatgcattgccaagcttgggttcctcttcatcgtgtaaaagaccagccttaactgagtacccatgaacttcttttactttaccaattccctgtacatttatgcaaaactttagtaggcttaaaatagtaacagagtcaagagtgattgcttcattaagtaagtggtgcaagagattcaaaaattgaaactgctttggactgtctgcaaaggcatcaagtatagcattccaagatattatatccttcgtggacatcagtgaaaaggcccaatatgctgcacttgtgtcaccaaatcttgcatagaaactaatgagagcattcccaactgatgtatcctccaaaaggtaagaatggcgcaatatataactgtggatctctttcccagaggccaagtcagttaattgcgcacagacaggaaggatactgataatagttaccgaatcaggagaaacatcccccttatgcaccaagttgtgaaataactgaaatgctttaaaccactcacaatttgatgcataaccagctatgacaacattccatgaaactagatctttagaacccatcctggtaaacaatgaggctgcttcttctatccttccgactctcaaatagaaactaacaagtgaattacatacaaaaacatgggtttgcagccaagacctctgcacaacataactgtgaatctgtctaccacttcgacatgcaatgttcttgtccatagaagcgcaaacaggcaaaacatttgcaattgttgcataatttggctctgtaggttccttcagcattagacaaaacgatctaaatgcatcagccatcatattattctcagaaaacccagcaataatcgcattccaagagacaacatctttatcagctataccatcaaatgcagtataagcatcgggaaaaataaaaccaaatttggcatacatggaaaccaaagcattccccacaagtgtatctttctccaaaccggctttaataatataagaatgcatactcttcccattgtatgaatccccaaggcgaacacacaaaggaagaacaatcgcaaaggtaacagagctcggcttaggttcatctgcaaagtgcattgctttgaaaaacctcatcgtttcacgaccgcaagaaacagaaagtccagtcagaacaatattccaaacaacaggatcaagactgtccatttgcctaaacatcttctggcaatcatccattctcctgcatttcgcatacatgttaagaactgacttcgaaacctcagagcaggctatatgaccaagcttgaacacgcaaccgtgcagagccctccctgatgtgagatcagacactgaagcacaagctttgacaacatccagaaaaaccctgtgatcagttccaaaaccagacaaaagtctgaaattctgaacaaattgccgtaaagggcccatctttcccctgaatatcccaacaacggccctttattagcaaaaaatctacgttacattgggtcagacattttcacaaacacctgatatgcaagaacagtttctctagatataagcgttgtcgagatgtaacagacatagagaaactgaaaaagcaatatctttatcaagctcctcaatttatcaagcaatgaaggtgtctctcagtctccatctcctccacatacaagcgacagtttttgtcttgagtgaattgaaaattatgaatatatatggactattccgatttaattaaaactgaagggctaaaaaagaatatattaatttacttaggtccttacatgaaaatttactatttctattcttattcgaataattagaagaaaaaaaacaaattccataaatatatatatctttcgtcgactctgcttttacacatctctcacacggtaaagttacaataatctcagcttgaatcacactgacgaaggcatcttcctgcgattatg

SEQ ID NO: 32592 - DNA, 3003 bp, Unknown
  misc_feature (1)..( 3003): 2750-1469P.txt file - cDNA_ID_3058970; gDNA_ID_1620321; Annot_ID_153320
tatttgcttcttgtcacagaccgtcgtgctcttacaagtctccacaatttaggttttatttattgccgttatgccctcatacttattcaatctctcactttttccataaaactttctattaattgaattgttcataggatatagattttgtcgtttttaattttttttatacagtacaataaaaagtcaacggaaaacagagctcattaaattcactgagacgaaataaaataataaataaataaatcgaaggaaggagtcatatcaccttggtatttatatatctcaagcgaccatgcatgatagtgaaatattcaagtttaaagacatgatgatgatgtcttgcacagttcaaacattagtacttgttccatggtttctagtagtatttgtactcgccggtggagaagactcatccgagacgacggcaatgtttccggcgatgtttgtgttcggagactctttggtggataacggaaacaataaccacttgaactcactggctaggtccaactatctcccttacggcatcgatttcgctggaaatcaaccaaccggtcgcttctctaacggcaaaactatcgtcgatttcattggtacatattttacatatcggtctctacatgcatttggttttgaaatcagtgcatgcataaatttaatttgcacaagagattcacccttttactttttttttttgttttgttaattttttagtttgttttgggttagcaattaattaattaacatgatcatggggatggatgtggatggttgcaggagagttgctagggctgccggagataccggcgtttatggacacggttgacggaggagtggatattctccatggtgtgaactatgcctcagctgccggaggaatcttagaggaaaccggtcgccatctggtacttcttcttttttttctttctaaatgtctatttttattgttcaaaacattttttggttatataggatatgtttctttttttttaccatgttagttcatatcaaaaactttgtttaacgaaattggtctaatcgattgcttatgttcatataaagaatccaagttcgaaatatccaaaactgaaaccgaaaattgaattgtactatgcttttttgttaataagcatacggttttcgatattgaaaattgaaagttatctttcgctaagtaaaaaaaataaaaaaataaaaaagtgaatttggggtgcataaagtccgccggaacagtcgtcctttaaccaatagaagtagccacatttgaatcacgggaggttatttaatgtcgagtgactttgatagggtgcatgaaaaacttttgcctacgagacatgagtatttaataaccccaaaaaaaagactataataaatggggttgcattcttgcatgcatgcatggatgaagggagagagatttagcatgggaagacaagtggagaacttcgagaagacattaatggagataagtaggagcatgaggaaagagtcagtgaaggaatatatggcaaagtcattggtggtggtgtcattgggtaacaatgactacattaacaattatctgaaaccaaggctattcctctcaagctctatttacgaccctacttctttcgccgacctccttctctccaacttcaccactcatctccttgtaagtcttatttacgaatcactatcagtaatatcattaaccatatatgtgtgtgtgtgtgaagtcatcgagtgcctaaaatccgtatagataattacgaatttttattttataacaataatactcatgtcaaactaaaattcgagtgttgtacaaaattttgttaggaattgtatggaaaggggtttaggaaatttgtaatagccggtgtgggtccattgggttgcataccagaccaactagccgcccaagcggctctgccaggtgaatgtgtcgaggctgtaaacgagatggctgaacttttcaacaaccgtcttgtatcgctggtggatcgtctcaattccgataacaaaaccgctagtgaagccatctttgtttacggtaatacctatggagccgccgtggatattctcaccaacccatttaattacggttaagtatctaacttatcccttgttttacattttttttaatcaaatgtttcgttttagcttagttgagagcatttttaacttgaaatggtttgattttgttttcttttattgtttgtaggattcgaagtgacggatagagggtgttgtggagtagggagaaatagaggagaaataacgtgtctgccattagcggtaccatgcgctttcagagaccgacatgtgttctgggatgcatttcatccaacacaagcttttaatctcataattgctctcagagcctttaatggttccaaatccgattgttaccccattaatctttctcaactttctcgtctctaaaccctcaacaaatccttctctttttgtttatgtatttttgttactttaattttgtagacttgtagtagtactattgcatatttcttcgcattatctttttggttgtgatttggttccaatttgaatgtggacctctaatgattacattatcgttaactgcaaacatatacgtagaaaatgagtcgatcgagaaattgtagaatctttttctattattcttggtttcacaaattaatggtagagactttcatgcatagtgatgacataagatgttgcatattgatatggcggattgttcatagtttttttttgtttttttttatgacataaaatgttgcatgttggcatgttgcggactaattcatagattattattagtccatagatgtattatgtactgtatatacatcatttctcttttttgttacatgtttgaacttaaacaaaaataagtaactaactataggtttaaaaggcccaattaggaaattagacaggcccaaatataattattgaagcccaaaatgaggctagcaattcgaacaaaaaagataagcttaggaaattgtaccaatg

SEQ ID NO: 32593 - DNA, 1000 bp, Unknown
  misc_feature (1)..( 1000): 2750-1469P.txt file - cDNA_ID_3058989; gDNA_ID_1620322; Annot_ID_153383
cttttcgagaatcgttgtttcggcttcgtttttaaattaagattttgagagcaatcgaagatttaaggagaacaaatggattttaagaattttaggagtaaaagtgactaaaaggacgtcgttttagtctcaacgaaataaaaaaaatttgtaaatacccataacccaatcactgttatgtgatatgttgtttacgcgattaaaatttaaactaatttttttttggtggaaaaaaaattaaattagttttattacatagttattttacttattatagtatgaaaccggtacacgaagacaagtttaaagtatacgagataagtataaagtattaatttatacgaaataacatgtgaaacgaagtacttttttttgcagaatcaaaatctaaacgtaattaatcaataaatatttaaacaagtttaaccgtttaagccttaaaacttaaaagtagattttaggtttaacaatattgtttctgagaaaatgggctaaacaccaaatctaaacaaaagttagggactttcttcatattatattattgttaactatatataaccgaaagagatcaatcaaagtaaaaatctcttttaacacatcgccgtcatctctctctctctctctactctgcatcagacaatcacaaatctttctctttctctttctctctctaacacaatttagaacaaaagtttcttctttcttctctcccgagaggcctctcgctgttcattgaagttctcttagaattttctatcaccttgtatgtatgttcatcgcttgaattgataatccaattaacgaattttcaaattgaatcataaaaatcgtttctttcagttttttcttatccacccaattctcaaatttctctcttttttttttagggttcctctcagatttctctatcgatagaatacattgcttctgcttttgatcaattgtacttcttttgtctctctgttttagggttgtgtaatttgcaaaacagacaacaatg

SEQ ID NO: 32594 - DNA, 3000 bp, Unknown
  misc_feature (1)..( 3000): 2750-1469P.txt file - cDNA_ID_3058995; gDNA_ID_1620322; Annot_ID_153377
gaatcttcttctcttctttagtttctagattcttttggtttatagtttgagaaccaaaatgtcattagtcaatactagtagactagtaccattctataacaagggagatataagtcaccagtcaccaccaatgaccggttctgattttttttttttaataacatatagtcatatgtgttatatattttcatttattttagatgatttatgcattattttctgttataaatagctcatatagttttaattatacatatttcccttaaaaaaaattgttaatcaccaacgatccaatttgtttttttacaactattattatctatacttgtgtttatttccagttaatactttaattgacgtacgtatatgaaggttagtaaacacacattaaataatgggttttcaacaaaacaaatcttccaaatagttgtttttattttattctaccttctatcttcaaaaaattcagattaattatacgaaatagaaaataaaaggtaatataagttaactcttataagtatcttctaaacgtttttacagatacatacattatatttttaagaattaaaatgttgatcacgaatgcttttatttgatatacaccattttttcgttactaatctattttttacgaaaaaatttgtttcaaaaagatgtttttaaaaaaagttatctatgaattacacaataacacaaatttcaacaatcactattggtttattgtccgttctcttttcctgttttgtttcttaaaataacatacaacgacttgaagcccaacattcatttgtttgggccaaaagtagaaattaaattactattgtacccctaactaaacattgtaatttacatttgttgccacgcttaaaccttcccttgtttcatcctcctccgcctcgatccctcactctctctcgcgtcagtcgttactgctgcaacaaatctgtatttgatttctccattaacaacgaatctgtaagtttgaatttttattcaatctatctctctcaatataagcccttttctcctcttttatgtaattatttgcattaagatggaaaattttcaattgcagaaatggccgctgcttttgcttccagattaacccgaggtaagagactaccttattcctcttccttcgatctcatcttgtgtattgaatccataaatcctatgttttagactgtgatgggttttggttattgatgggtttgtttaaaaatcacatctttgtgaagttaaagattcccatttttcaacatattatcagcttcaaaattgttgaactttgtaattgatttagcaaagttagagccaaaattttaaaatctgttgtctttgttgtttatggttatagtatctgatttgattcatacacaaatcatgagcaggaggacgttcattgcttggaggtcttaacaatggtggttcgatgaattcttctaatggaatgatgaatgaaagtatcctctctcaggtcagaaaccaaccaatgaaagtattcttctaatggttttagtgtcttaagcttattcttttttgttgatgttggttgaagcagcagcagcagagaaggacatttattcagatggggactgttctcaaagtcgtggacaattcaggtgcgaagaaagtgatgtgtattcaagctctaaaggggaaaaaaggagctagacttggagatactatagttgcttcagtgaaagaagcgatgccaaacggtaaagtgaagaaaggagcggttgtgtatggtgtggttgttcgtgctgcgatgcagagaggtcgtgttgatggaagtgaagttaggtttgatgataacgcggttgttcttgttgatagtaaagataagaatactaaaactgatcgccagccgattggtactagagtgtttggtcctgttcctcatgagcttcgcaagaagaaacatctcaagattcttgctttggctcaacacgttgcgtgagatgcaacaaaaccgtaaacctcgtactgtctttttttatgtaaactctagttacccgcatgttttttttttgtgtgttcttaacggaatttagaggcttcaaactttaaaaagtccccacacttttaaagtctctctctattactctcttccctacatttctatctcctttattatacaagtggtatacagactcagatgaagaaccacaaaagagggaggagtgaggcggcacattaaagtccccaatttcgaagacgatctcttctcgagagcctgtctcggagtattacccagagaccagagtataataaaggcatgctttggaatgcgctgcgagaaccaaaccactttgtgccaagagttaggtgttgaagaagggtttagcatacactgatttgaagaacagaactgagagggtatagttcagtgatggagttacgccataagaagaagtctggatcataaggttaatctgaagtgggctgcgttgcttcttgttttttctgatatcgacatatataaattagtatatgtaaatatgtatttttaaaacttttaaatcatactttgtataataaaattattattcattattagaagaatcaatagtttatctagtttattgactattcattattatatttaattacaacattatctatgtttttgtttatttgtgactgaccttaaactttagtttattacatatataccctataagtagttaggtaaagctttcaattttagtcctcagtttctgacatttttggttattttctcctttttttatagttcaaactttttttttcctttcaactttttcatgttcatatacttttaattttactgaagagagattaatttacaaattcaaaaaaaaatcttagatcaggtggaatctaccagagagcacgcgattctagatcgatccaccggtgagagacgccggagtttttatccccgcggcggagtaaaccatttcttcttcccgatgtatcagtgaagttaagtagtcgagagaggggataatg

SEQ ID NO: 32595 - DNA, 3000 bp, Unknown; identical to SEQ ID NO: 804
  misc_feature (1)..( 3000): 2750-1469P.txt file - cDNA_ID_3059016; gDNA_ID_1620322; Annot_ID_153364

SEQ ID NO: 32596 - DNA, 3003 bp, Unknown
  misc_feature (1)..( 3003): 2750-1469P.txt file - cDNA_ID_3059039; gDNA_ID_1620323; Annot_ID_153417
ctttgacggataaccaaactatagtgtgcacgtgcattaagcatggaataccttccactgtcctaaaagtgtcatcggacatacaatcaggttaccaccattttgaagtacacttttttgttcaagaagcctcttatcaaagcctagaaatttggttgccttcaccgggggactagtgagatcatctacagaactgctgatcactttgtctccttcatagttggggcatagaaacccagttgatgcagctttccaagaatgggcaagcaaaagggatatggtcattacagtctttccaagacccattgcgtctgctaatatctacaaaagttttaggatataatattattacaaaacagctatataataaagtgacaaaatctaaacaataaatgaaagaaatttttataggtggggtattgagatcatactcctcctcttgccatttgaagtgtgctagggaagtgtattgtagcatcaccagtaaaagaattcaggtagacaaccagttccctcctattgacataaaacagatagtaaatatcttatctgactcgcactaaagttcgaaggcaatagaaatatcactcacttgtctgctaaacagtatgcttcccaacacgggtgaagcattgttgctgcctcatcagtgcaatttcctttctccagttgggtcatccaatgaagtgcctgcttttggtatggacgaagctcacacagaagtgtatgtggagtttccatttcctgttgcaaaaattttcatgcaattttccaaaggaaatttccagtgttggatataagtaagcaagaagtcttgaaaatgagaatacctttaatccagaactgtccccaacaccaacaatgttatcaagatcaccatcgctgatacactgctcattttcatctccgtttgcatcttgattcatattcttgaccttgtttaattgaagcaacgaagtaggaatagcagaaccatcctatttccatagggcagagagcaaatgacaaattttacaggcaagaagtcaaattttaagatgctaatataataagtaatatttaccttggaactcaaaggtcgcttcttagagtaaaaatcctctggagtaaactctgcctaaatatgatgaagaatggaaaaatttcttcgtcatctcaagattattcagtcacatcatatgagaagtatatgggaactacaaactgcaatctataaaagaatccgcatatcaagttataggcaaggaataaccattaccttcttaaaggggatcaaaccgagtaaccgaaagagatttgggagaggatggaacattgattcctctgccgtattactagctgtcttaaatgaagtcgcactatgcttttgaaacatggaactattaatgtacacgctgtttcaaaaacaaactcacaccacttcaaacactaatgcatctatcctgaaattgtaaacgggaacacaaaagttttgtatgcataccttacagacagaagaattgtatccatgatgctcaaagcttcaggcgccgacttgcaactgccttctatcctaattttcttgtctctcacaagtggtagaagacaccgagcccactcgtttggtattctaccaatctaccacaagagcccatcatagttagttaacaattcccatctaacaaacttaacatagcaaataaaaaagatgtgaaacacacctctcctgaatcctttgtagagaacctaacgatatcagaagcaccacgcaaagctggccttccccgcccaaaaccgcgcttcccaggcgtagtctcaggctttaatcctttactatgcggaaacgtgaacaccaattcatcaccagacttcaatttccttcctttacatgtcgataacccagccaattcagaacaaccaacaaaccaccactcattccctgaaacactctcttctcctccaccattaacactctcattttcttcctccacgcgatgattcgctccaacacttccgctgtcaccaaaagtacagccctttaatccactatcaactcgcttccctccattagagccgctcggggtaggagtggctacatcaggtttggcgaaacttggagtgtcgaagattatattgatagcagccgttggatcatgattcgccatgtgtaaagccctgattatatccatatctgagtaatcggaacccacgactgatctgacggtggaaacaagatcgtctgagactttcgttcccatttccaaaaccctaatcctacaattttccagggaaattttgaaactttactgaaaattcagtgagcttgtggctaaagaacgccggaaaaagaaaaccccaatgtagtacagtggcgaattatagaaattgaagtagatcgacgacgacggcgtacgaaatctgccggacccgagaaacgcgcgtaaattagcgacgagtctctcaaattcccgccattatattgttttttttattcaagtgatgaaaatagaaaggtaaattcaaaaacggtgacgttttaaaatccctaacgggtctagatccgggtaacccgcatcccgagttgaactcagtttaacaattagaccacaaaaatctgccattaactcagaagtgagaagtgtagtagaaccattcgacacgattgaaaaagctcatcttttttatttctatgtctctctcttttggttacgtaagctctctgtccatatgcttcattgatggtggtggttatcaaaatctagcaaggttttagcttcaattctgtccatatgtttatccatttccaagctcagacgtgaaaagatttcagatttatcgctggatcacggctttgatttcttttgcttcagctttgaatttgatttcttttgcttcagatttatcggtggatcttagattttgatgtgggtatatggttcgattttataaaaagaagttagatttttggaatcatagaaagggataaacgagaattgaaatctggggattgatttggatctgatg

SEQ ID NO: 32597 - DNA, 3000 bp, Unknown; identical to SEQ ID NO: 808
  misc_feature (1)..( 3000): 2750-1469P.txt file - cDNA_ID_3059043; gDNA_ID_1620323; Annot_ID_153416

SEQ ID NO: 32598 - DNA, 3000 bp, Unknown; identical to SEQ ID NO: 812
  misc_feature (1)..( 3000): 2750-1469P.txt file - cDNA_ID_3059047; gDNA_ID_1620323; Annot_ID_153413

SEQ ID NO: 32599 - DNA, 3000 bp, Unknown; identical to SEQ ID NO: 811
  misc_feature (1)..( 3000): 2750-1469P.txt file - cDNA_ID_3059051; gDNA_ID_1620323; Annot_ID_153412

SEQ ID NO: 32600 - DNA, 3000 bp, Unknown; identical to SEQ ID NO: 810
  misc_feature (1)..( 3000): 2750-1469P.txt file - cDNA_ID_3059055; gDNA_ID_1620323; Annot_ID_153411

SEQ ID NO: 32601 - DNA, 3000 bp, Unknown; identical to SEQ ID NO: 809
  misc_feature (1)..( 3000): 2750-1469P.txt file - cDNA_ID_3059061; gDNA_ID_1620323; Annot_ID_153401

SEQ ID NO: 32602 - DNA, 3003 bp, Unknown
  misc_feature (1)..( 3003): 2750-1469P.txt file - cDNA_ID_3059084; gDNA_ID_1620324; Annot_ID_153431
aattgcatgggattcaacgcatagcaaaatccatggagaattgtcttatcacagctccatttcatgtgtatgacaattgaaactaaacaaatctgtatttataaaaagagataaaagaggaaataaaagaagagtcaataaatatggagaggaaagtaatggttgtggtaggaactctgtgaaatcaatgtaaagggaaaaacaaatcaaaaggtcccccacataaaatcaaaaggtaaagaaagaaaaggacagtttacacgaagagtcacactgtactctggcctcacatgaaaccctaattacttaactttattcactttttttcactcaatgtcctttattattttaccacctgacctgactctctctctctctctctctctctctctctctctctctcaagccctagactgtcacacctattatagatagcttataccagctatattccatatcccacgcttcttccgaatctatttactggatcctgctctttatatgatcccaactaaagcacgtcttaatcaatacattttcaaatgttatagacttattatagtacaaaactagctaatctcaatacattataatggtatacggtatcaaaccactgtttttcttcacagtgattgatcctacttagactgttcaatatggcatgtatgccacgttcaaactcaaacaaatgtctttttcttttttttcagttcaatattatcatacatgtgatgtgaattcatagattattgtgtaacctagatatgcacataagattacgtacgttaccataagttttgatccaatacagttaacttagtccatgaatctatatgattcatgcacatgatttatatgccttataaatcatattcactttaaatgttaatcatactcactttaaatttgcttttgagtattatttgacttgtaaaatgatttgttttcgtatctccgaaaaagtggtgtacaagtgttgttggagtagagatcttcacctagtggacgtctacttgtacggctaaacataactacctagttcaaggaaacgattcctccaacaaagttggtttctgagcttctcaatctcaatcatcatcccaatagattccaaatgcttgcttagcttattcgactaagagaatacatagtctctagtttttagctatcatcaattctttactgtttatgtcacattgtatagtcacaattcaaaagatttgattgaaagccacagaaaaatcgaaaggtcacacttgaccattgcacaaaacacacattttatcaacattgatctccaattcacattggttttacattacacattgaatcaaatctacacttaaaaaaaaatcatcgcctaattgtttttgggagacgacgccgtttcagcttgagaaaggcttcgccagaaaccaccactgtaaaatctgctccacatctccttctccaacgcaatcacagcctcatcttcttcttcttcttcttcttcctcatctctgctctctaacgggtgaacagcgaattgagaactccctcctctaccaaactctcttccactctctacaaactcctttttcgctaatcgtttccgtcgtatacggcggattgcgcggcggcagagtccacgagggagcttgtatacagcgagtacgacgagattcacgacgctacaaggagcgcatagacataaggctgcacaactcgccgtcgtaccaccgcaacactcagccgtcgtagatcctccgccacatagagacggcgttgatagacttcgacggagactcggttgtttattcatattcagattttttttattaaccgaatctgagaatttcgagtcaaaaaaaacaaatgcagatagatttcacaaatcaatcaatcaaaaccataaaatctatcgatcctcctcgtctttgatcgccaagaaaatctcagaagaatctccgatgaaaaaatgaaagaaattgagaatccgaaaggatttgtttgaaatggagagtgagctattattaatgtttgtggtgtttaggcttttagtcttcttcttcactgtttgaggttaaaaagtcatagaaacgatttttgggtatctgttacggttacgttggctagtgtatagatgccgacgaccaccatggatcatatttatacatacaatttacctatgtggataaataaactattaagcattatttagtttctttgtgttacttctttaaaaaagatgataatattacacgtacaattgttcttgtttattcatttgtgtttgttgatatctagaactcaatcttgaataatattatcttatctttatgttttgactaatcattaactttcgtataaagataatatcaataccactagataattatcacaccagcattcttactagcactttatatctactactacttttggataatgcaaatacattttataaaaaaaataaaggctgtgtgatttggttaaccagttactaatcttataaaattatgtagatcctatggtaaattattggaaattttcataaattagacaaatttattaccaaatctcatacaacactatttaaaacattgataaaatataaaaaaaactttgaatattgactattgaccaataaactttattatttgactattaaatttgtgcaataaattaaatttaactttttacccacatcaaaacataacagtaaaagagaatgtggatttagacctttataagtcccatgaaaaagggcccattttataggtatccaaaacaggcccaattttctggaaaaaaaaaagaagaaacgatgccacgcgtttcacacctgtccctgtctctttctctcgcttttaatttttacttaacgacaaaggaaagaaagcatggagattgaaaacggaagccatttctagcaaaacaattctctcttttgtcttgaagataagtttcacaaaaaggtctgcttcgcctcttctacgacgttgcagaaactaagaagagatg

SEQ ID NO: 32603 - DNA, 3003 bp, Unknown
  misc_feature (1)..( 3003): 2750-1469P.txt file - cDNA_ID_3059090; gDNA_ID_1620324; Annot_ID_153447
tagagtgaaaccttttaacttcaagcaaatatgtacttcccttcattatatctctggccagcttataaaagttctcaactacctcttaaatctcttctaatatattgaaatctctaaagtaaaaggtcgagagtcgagacagcaagcaaaacactcgtgaaacatgatgaatgtagtagctgataaactaacaatgaaattcatatggaaaattcattttaataagcctggcccatataataatttagaaaccatgcgcgtattgtgtcttaatcatatccagtatctcctagtgcatcatattagttggaaacttaattctagccatccaccatatctaaagcctaaatgaataggtaattccaagattcatcaatcgaaactgttaagtcgatgaatgcttctaatcatgcatctttactaggggaaaaacaatgtacctgtaaaaatggactaaacacctgttaccagcagctgatcaagctcggtttctagctccgttaactcaacctgattttcatttctgcattgtagcaactgcctccttagatctcggaccagctcgtttaacttctgaattttcttttcttgaaatagaattttctgccacaaatagacattcatatcatcattagatcatacaatgaagcgtatccttaggcaatcaaattgcttagtaaagttaactaatagggcaagatttcagattaggtatgctttttgtttctgcgaatgcatcacttggaagaatcaaagtgatgggatgaaattagaaactagcttcttttgctttcctaagactatactcaacaatacacaaaactgaacacgttttcagcaacaatcatttcacaaaggttttgacaagaaacatgaagaagcaatcagatttagagtgctaagtgagggactttgttttaacatctaaagaaactaagcaagtcactaaaaacggaatgcgtcacagaaaaagcattggacaagtaagtgtcagtttaagaacccaactccttccttaggttcatatacacaacaattttaattccaccaaaatcaataaaaaacaaacctttacttgtacagattctttgccttgagggatatgttgttgctctttatctgaaagaatcagaggacgactactagtctcactttcattctcaacttgttcattccactcaaactgagaagtcaacacaatgaacataagaacaaacaaaagcacccacgatctcgtcattttgcaggtaaagtggtcttttatttgatctgctacataacaaaacaccaaataccacaactcaaaatcacaaactaacaagtgtagaaaaggatccaaatcacaaagtaatctttgaacattctatttacaagaagtgtaggaaaggattaaactttcacattccaaaaccttattttttatttatgagtcaagccaagaagattcctgaagatttctgcttccatggttccaaattaataacaaatccagaagaacaattcagtgctccaaattaaacatgacaaacgagcttagcaacaaagtcataaaacagagcaggacaaataaaaatcaccaaaaaaattcagaccagaactatagattcgataagaacaaagacgattagcaaaaattaaggtttatacatattttagcactcaccagtcgaaatctgaaagcatgaatctagtttttgcctagaaggagacgaaaagtaaataataacatagctagcaacatgtatactatttcacatttttttgagtttctaagccaatcagaaggctctatttcgtacccactcgcacaaagagcgctttgagcgagtgagagcgattctgtgggtaaacccctttccaattcatgcctttttttatcaacgcacttctctccaaaatctccatcgcgtgacttttttttttccacaaaacaaatgaaaccgaaccgaaaccagtttttatttcaaaaccaatgcaaaccgaaccgaatcagcaaatagggtgaagcaacaattctgggcagtaattttctgcactttccatgacttttcaacatcctaccaacgagaaaaagagaaaacaccacaactcaaaatcacaaactatggagtatagaaaaatatccaaaaatcatagtaatctttgaccattacaagaagtataggaaaggattaaacttttaaattccaaaaatctcagaatcaaagctaagaagaatcctgaagatttctacttccatggcatccaatagaggaagaaggacaatttactgcttcaattaaacatgaaaaacgactgaaagagcttaagctttactagttttagtaaaatttctcggcaacaaagtcaaaacagacatagacacataaaaaatgataccaaaaaagaactgtatattcgacaagaacaaggacgatttgcaataagtaaggtttatacagattagactcactagttgaaatctgaaagcatgaatcttgaatcttgaatcttgttgtgagctcttcgtgtttgcctccttttattatctttcttattttctgttctttgtgtggattcaactcgcaacttttatatttcactctgctgcttcgagatccacccattaaaaagtatttaaaccgaaatgaagattagtgagccttcatgggccttcgtgggctttgacctgggtttagtgtttaaagcccatttcctctttatggtcgtgtacttgagaagaaatcttttcttcttctctgtaaacaatccatcgaaagatcatcaaaaaaatcatcttcttcctcaatttcttctgattcctcctctctttcttctacttctcaccaaatttctgttagttctctgataagtacatttcgtgcttatcaaatacttatattttaaggggttgaagttgtaattttgaagaagttgaagatcaatcaaaaataatagaagaacagagacgacgaaacgaaaccagccggagaactgagcagagaaaaacccccggcgagaatg

SEQ ID NO: 32604 - DNA, 3000 bp, Unknown
  misc_feature (1)..( 3000): 2750-1469P.txt file - cDNA_ID_3059096; gDNA_ID_1620324; Annot_ID_153438
tacagtcttaaacttattgttcgcataaagaagtagacattgttagaattaatattacattgttacagatatgagttctaacctggaattgatgagataatcagtctcacaataagcgacaacagttctccaactaatgttcaatatattttcaactaacatcagtattcagtgcacatatttagttcttgtaatctgttaaatgtagtttgtttgactgctttaatcaaatcaggattcagtttattttagtttctaagcaatgataagcagaacattcgttttgggcttttaattgggcctttatcttgtctttattttttcgtctgaaaacatcgggcctatatcttcacgtctaaattttaaatacagggaaactgtagcttacaatgatgataaatttttagtttggtgatccatttttctcacctatatataattgaagaaaaaaagtatatgcatatacaataattcaggtagagtttgacccgaaacggttacaacggtttggcataataaacaaaaaacaaattcggcatcccaaggaatgcaacgttcactgaggctttctctaaaagatagtactaaattataaaagaagcgtctttttgaagcaatctcaaactaaaccttttgcttctcttctctcccatttcctgtaatcatttctccgatttaactatctctctttctctcatttgcagttttcctgaaacttttcagaaacctaatttggtttctcttatatatgctcttaatgaaccagtttatccggatttcgggtttgattcaagactctaaccctaaagtctgttagttgatgcaaagatgctcggagatttcatcacaagaatcataatgttagaccctctttctctctcgtctttccttcatctggttttatatttaggcattttcgttcttctttctcttagattttctggaaaatttgcagattgcttgtgggttacgcgtaccctgcatatggatgctacaaaagcgtggaaaagaaaaagcttgagattcacgaacttagatactggtgccaatattggtaaagcttactaattgttaataaagaagattccttttttggataagggtatcttattctcataaccatcttatcaaaaatccgaatttgatttgtaggatcttggtggctcttcttactgttttcgaaaggataggagacatcattgtatcatggttagtacttatatgtcaaacttcaaatctccatcatatgcttctttattgtatgaaaccttctgattcatctcatctatccgcaggttaccactctacggagagatcaaaatcgctcttctcatctacttatgttacccgaaatcacaggtactaactacagtacaatgcaataaaaatctaatgagaattcattctcattcttagattcacaaaacgaccaatcttcttctcttggtttctaacagggacttagctatgtctacgagaagctactatgtccatacatgtcaaaacatgaatctgacatcgatcaaggaatctctgtcttaaagataagaggacatttagtaattgctcaactactgcaatgtatcttccactggagcctccaaatcttcaagcaattgcaacaacaattcaccatctataaggtattcaaaacaaacatatacatcctcaagctttactgcatcagagcactctcaccaaatccatcacttcctttgtctacagaataaaaaccaatcaaagtcaaaagatcaacaacaaacaagaacttctttaatgtttctccgttagaaggtgcctgctatactactctaagccacaatctcaataaccgggtttttaaaccgccggttaaccggagtttcacatgacttcaaattgaccacagacgaacaaaaaaaaaaagatttttcctttgatatgttttgaatattgtaacactttattgtatacaattcaattcatgaaaaatccaattttctcaccaaatcaaagtttatttgacaatcaaaggaacacgaaacgattgaaaaatccaatcaaacacacgtcgcaagaactgaaacccggcggataagtgaagccaaacgcggcggaagaattgagaaccagcagaatcatctgacgaagtaagcaccgttggttgaagataagacaaagcagcttgcttaacgagacggttacgaatcgagatatctccggcggcggtggatataacaggagagcagctaccgttgatcgacggtaaattgagtgaagagttaatcggagaagagatgatatctctgagagaagtgtaagctacgaaagaggatggttttacggagatgagctcgtaatcgaacgaagacggcggcgttgaagctatgtcgaaaggaacttctggaggagttagagtcgtcatgttggatatggattttgtacggcggagttgagtcgccggagattgtgacggcggaatctccatagtctttcttcttctttttttttgtttggtttgtttgtgagtttgtggctgattgggttttgcgagtgtttaaagtaaggaaggaggtccaattattgatctctatgatatgtacatttgtcactatcttgtgttgtattaattagtaaagagatacgtttactttatttgtattttcttaattattatgattggaatggaagatagtaggcaaattacaaaatttaaggattgattactatttttgatgtgaagattagatggaaatatattcggaaatccaaccagcctaaaaatagattttgatttaattatcaaagtatgatcatcaacacggtgtcgttccggttcatcgaacattccacttctttcttcttgtctgaaaaatctagaagagcagctatttggtttctctatccgattcgtctctctcacgccctcacgtttatccacctcatcctcaaaccaaaccacaagacctcttttttaagtaaccaatcacagagagatagagagagagaacagagtcaatg

SEQ ID NO: 32605 - DNA, 3000 bp, Unknown
  misc_feature (1)..( 3000): 2750-1469P.txt file - cDNA_ID_3059103; gDNA_ID_1620324; Annot_ID_153432
ggtactgtaagtataatgttttggtaatgaattattacgaatacttatgggtgtgattggtaaagatattagagtaatatggagtaattaatgttggagtaactatttttttttttggtaactaatatcataagatcaaaaatgatataatttgtgataatggttgtatttgatttgtttctgtattaagtattaactcgttgtgatattatatatattgatttgccgttaaattttatgttgcattatcatgaaaaagtgactttttaagtattgcgaagatcagaacatttataaatttaagcattttttagtaatgtatgagttcattttatttccttaagttacttttggaatatattatttgcaagtgtcaatcatttaaattctacgttttcttgttataattaattgggcttttatttgggacaatagctcaatggccttttgggttacgagttaagggagaaatgggcccaatacaagcattcacgttgacttctcttttttttatcgtagttttgaccctagggatctgaaacgatatcgtttaatgtctaagcgggtaagggtagtgtcgtaataatatattttatcactagtgagaaaattgaaaccaatcaccgattgttctgagccggacgaaggagaggcagccgcctaagaagttgccgtcgtgcgccatggccgtgaaggcttctggattcattgggaaatcagcaatctctgttcatctagatttctcttcgtttcctgtgaaattttcatgcttgaaacagttttctgtatcttcaccaaagccactggtcgttttatccgttgccttatcgtcgccggcaagaacagttgagtctccgcctgttggttaccggaagaatgttgggatttgtctcgttagcccatgtagaaaggtaacttctttcttcttctccttcctctctcatcgctttatgtgatttggaagaatttgtccacttgatttggatttgaaatggttttggttttgcagatttttacggcgtcaaagattcacattccggatacatggcagatgcctcaggtgaatctctcataagctctattttattacaaaatgggtttattatataggctttcggtgtctaagtagttttgattgctttggagagcttagttctcacttctcaccaaaacaacagctcctttgtagtgtattgagtgatatcgtttttacctttgttgctaaagaggtgttgaattgcatagtttagggaattgttcatttgaaattacaaagtaaaaaccaaatgcattgacaatcctgagaagtagcttaggctgtagattcaccagtttatgatcctttagggtatcaattttggccataggtttttattaaatctgcttttacagggtggtgctgatgagggagaagatttgaggaacgctgcctttagagaactgagagaagaaacaggggttacttcggcagaattcattgcggaggcacgcttttgacatctctctctcatagtaaattatatttcaataagattcctttcatcatttccatggtttttggattagagtttgaattgctctgtgtatcaccaaactgagcttttgactattttaaacgtctctagataccaaactggctgacctatgattttccccgagaagtaaaggacaaactaaaccggaaatggcgaacaagttacaaaggccaagctcagaagtggtaacaactaagcatacagtctcatatatctgtgaaaagtatcttaaagctgcaaatttaaggatctaaataattcttcatgatgattatctaatacaggtttctctttaagttcacgggcaaggaagaagagataaatctccttggagacggtactgcaaaaccagagtttaaggtgtggtcgtggatgctaccggaacaagttattgaacatgtgagtgataggttttggctttaaattattattgtgtttgtgtgtgcttgaaatttgttggccttctcattcattcattctttttctgacaggctgtatatttcaagagacctgtttatgagcatgtcataaagcaattcaacccttattttgtggatgaagaaaaggattccatgaactcgtctaaggattgaatgtgcacaaagattcaccaagtgaatactgattagaagcaaatcaatcaattcattatactggtttctcttgaatctcatcaaaaataaaaattcatgaatctcagacattgatcttgtagtttgatgctatatataaatcctcacgaattaaattcacgaactaaattaccacattaataaataattaatttacccataaattacaacattatgctgatactgatagttcgagaggactcctttgaaataagcgttcggaaaaaaattaattatcacctagttctaaatcatcaatctgaaaattttagatgcaattttttggataaatcaaaaactttgcacaccatctgtttattcaaatgaccttaaatcctatgtggctttacacatttagcaaaaaattcttccaatggttaagagtccactgattcttagaaaaaaaaagagcatttttaagagagtattttttttcttctttttgttcattttggaccaatgagcattcaagacgtagtggtatcttagcttaaatcctatgtggttttgctttttcctctcttaaaaattaaaatctgttgccggttcctttttttcctcagcaccaccacaaaatggcgtcgttttgccgatttgatttaaagcatctaaaccggtttaatccaactccgtattgattgagtttatacttcagcgagattgtttccgttcttccgccacctcctgtgtctccgttattaggtatttgtgagaatcttcttgattgagtttatacttcagcgagattgtttatctctaagctccaggagaagctaatttgaattgcttctgggtttttagtacgtagctctctataagatatataacaaatg

SEQ ID NO: 32606 - DNA, 3000 bp, Unknown
  misc_feature (1)..( 3000): 2750-1469P.txt file - cDNA_ID_3059111; gDNA_ID_1620324; Annot_ID_153424
caggtgggaagatctatctctctgcgcctcttgatcacataacttcactcttctttgtttctttctttttataaattacagacagaacaaatatagtcataaataggaaggtgatgctattacagttgaaacctgaatatctttgggggtcctcttgtcttaaatttggcatctctccttcattattaaattagtgtctctcttacactttggtgagcttaaacaggagtataatttgtaagtgttggaatgagtggaatattcaatttattccattcaacttaaatggttatatttgattccaccaaattttatctttctaattacacacatccatttgcactcttgttcttagcaaaacaaaattgttctaatctttagccaaaaccagacctaaatcaaaccagcacaaaatctcagttatatcagaaaaagcagaaccaacatatagtttgtttcatacacaatgtcgaacgttaaagaatctgaaactgttcactttttgtttagtgattgttgattgtcacatcaaacaacttacaaaggatcactttgattcaggtacaaagtcatttccatcaaaagaaccaaaaaaaaaaagaagcaatcacagagataagtagtaaatcactcatcggacaattgatcccaaacattgacgatgagccacccttcaatggctgcagcctcaagttgttcttcaggacctgccttctcccatttggcctcaatcgaatccagctggcccaaatcagaccacaatactctgtgcgctaattctcttgtcccaagaaactcaagcaccagagttccacgagcttccgcagccaatttcccaacgttaatcgcgtttcttatcacgagaccgtggttttctctaagcaagtccaggtcttcctcgatctgcactccaacaaaagtgacaaacttggaagcaaagaaacggtacagatccttgagattgtcatgaaaaggtttaggaagtcgaaggaagagacataagtttctagtgctcagcttcaccgatgacagactccaccctgacgttttggttttggtttcagtttcaggaaaccccacatcccagtacacatcgaagatcaccgctcggtttccattcaagatagaatcttctcttataagtgaaaggtatggagagatatctgttgatgatccaacatcaatggtcttagtctgaacataggagccatcagtcatcttgaactttggcccatcaaaggaggccatgtgatgaaaaaacactaaagaatattcacaaatcaaattagattcaacgataactgacaaagttgtagctaaacttatctcaatactaatagaagtggaaagtaagatagtgaatccaatcatcactcatataacttgagcaccaataaggtttcctcttttttataaaaaactacaagtattcatgagttggaaacttggagaaattgggtgaagaaaggaccacacattgaataaacaatgatctagcatcgaattgatcaaagtagaggtaaacaaactttttttttagttttggctacaaataccattgatcactccccctagttctaggtttcatgacctttctgtgcatcaaaagataacaagaaagaagcgaaactttttgttctatatctcttagactaattaactaatggagaaacaaaaacatttgattctatcttagttcttgtaacccaaaacgatcgatccgagagataaaatcccctaactatcatctgaaattggaatcatactagtcaaattcaacttaaaagagacattaactgatgagaagttaagaggaggacgaaccttgaaatttcgcgtccggttagggatcgtagtaagcgaggaacagttcttctggtttctgctggaagagagaagactaaatccccgcgagggaagaagaaatcacgaaatggagacacatttcctcagcttgcttaaccaaccatacgttagtaatttaagctgaccaatccggttcaaccgaaattctatgtcttttgaatgtttttcttgacttttttttttaaggggtccttgtcaatctttgttaccaacgccaattcacacaagaaatataatgtgagacatttttcatcgttatcatacaaccgtgaatatacttgtcaagcaatgttggtcaaattctcaagatacaagagttttttttcacgctaatgtagtcacactacaaatccattaatattatttttttcgtttagaaatcacacataaaacatagattgtgtttgttggtataagtgatagagagagcatccccatatcattttccaaacacaaatgctcacaccaaaatggttgagttcataaggtacatttccacacattatgcttaagtttcactcttattacacttctttgaaatgtctattaatctttaggaattagcaagtacgacacacattcaaatatccaacaactactctctctttatcaatcaacaaataaaaaacaaaacttgattgattaacaatttcaaagtttaaattcaatcacacctaacctgaattaaaatttggtctattgcatactcaaatccggttcaatgttacaagaccaaaaccagatatttatcttaaactggtccacttgaaaaaacgaaaaaacttaccacacaacacaggctgattctgaattcagcacaaatagtttcaaagcccaacaatcatcgcccaatttttgttatataccgccgcttctttctacacaacctacaaagccaaaagcttagtatactctctctttctactttaacaacaaattcgccgcttatcgcctccgatcttctctcaaaggtacggtttcgttttcatttcctccgattctcgtttcttcttcagattccttcatcgattagctctaggaaccttctcatcggaattcatttattgtctttgtttgttattcgaagcttcttctgtttatttgatacatattctctttcagttactctatatg

SEQ ID NO: 32607 - DNA, 3003 bp, Unknown
  misc_feature (1)..( 3003): 2750-1469P.txt file - cDNA_ID_3059127; gDNA_ID_1620325; Annot_ID_153463
tattcacatctcttgatgatataataaatgttcatttttctttttctttctttgggaatttggtgaataaacaaaattggtaaagcaattacgaatatagctatgtaatgtagaaaacaaaagcaaataatgatttgcatttttctttgtcagtcgtcacgtcgatggcgtcatacactgatacaagagtacgtgaccatagaaaagatagaactccatacaaggaagaaagttatatccacttagccatgtttctttcatcatttatcattttcattcagacgatccacttacataattcatttgaatgatgtttctttcattatttgcaatttaatctaaataatgcatttaaataaatctttatttgtttgattattttgtaattcatctacattctcatttagataaaaatgattaaaatacccatgctttcattttgacaaatgacaaatattcaaaatcattacctatcatcaatacaaaacatattggcaggaaacatgattttacggttttgacggaaaagcgtttttggcgggaaaaacatgattttgcggttttgacgtaaaaataagatttttgcggttttggcgggaaaatatgatttttgcggttttagtggaaaatataatttttggcgaaaaatataattttatagttttggcgggaaaacatgattttgcggttatagtgggaaaatatgattttgcaattttggcgggaaaacataattttgcagttttggcgggaaacataatattgccaatggcgagaaaatataatttagtggtttcggcgtaaaaatatagttttatgattttaggtggaatagcggtttttggcaaaaaaaacgcaattccatgattttacgattttgacagaaaataataatccatgatttcatgattttagaatttttttttgtttcaatatgtaatttgaaaaatataaaataagaaatctataaaaaataatattatttaaaatatgattataaatgaggatatatttgtcttttgactgaaccatatccatctaaatggttcaatcaaattcatccaaataagttttataaatttgtctaaatttaaaaaatcattcagatgtattatccagatgaaccatccaaatatttgttaaatttaacaaacatcatttttcatttccatttggatggatcatttggatgaagaaacaaacagaactacttcctaaaaatctctcgctatcatacagacccttctagaaaacatgcatgcaccggactttgtgttgcaacttgcaatgataatacatattatttttgaatagatttctaatgataatttatatatccttctacaaaaagcaaaaccatatattttttcctctccttttgtaagtcgaattcattgtccacttggaaaaaattattaaaatcatattatgcaaaccaacccttgtggtcccataatgagacgtgcacatctctcgtatttactatgaataacaaaaaacaaaaatagaagaaaatcaaatcagtaatggagtttattgatttatattggttcagtaatttaaagcaaaattatgttttattagatcattgatttaaaaattttgtcaaaataatgtattatccattaattgatttctaaataccagttcaaatcatgatttaatgctggatttcaaaatctacattagatattaaaaggagaaaatagagtgatttaatttatggataaaccatgttatcttaaaatcaatatgtctaatttcaaaattaataaaaattcacaaatcaataggatttttttattattattaataggaattttaaaaactcagtattttggataaggataagagaaagttgtgttcctgggttatctacgaccgggggactttcattggttgtaaaatattatcatttatcaaacataattatcatatgaaatcttaacttgaattttatttatagccaaaattatttttactctttgttcataaaattttaatactaacttatactattgaatattataaaaggacaaacgttcatttgaaatgtgctatcgtaaatgtttcgaagaattggttaggagtgcactgaaacttgaaagtaagatatttttacagttttatattttaatttatcataacgtacggacactcatgtcaaatacgaaacaagatatttgaataatcctttctactaatacggttaataaatttacgtaaaacaaaattaattttaataattttatttacaaaccaaaccaatatcatcaatattatgtcttttattgagttgttgactacttgacatataaggtcttctaagaaaattccacaatttgaaacttcctcacaccttcctcaaaccaaaactagtattacctatttatgacatcacttttatgcttacacgatagctactcagatatataagtgtgtactctatttcttgtttgatggaaatacctttctagagtactcatcagacccagttacatgcgattatgatcgaacttcaagaatccagaccatgaaaaaggtacgtatgatcccattaaattcaattttactttaaatttttgggtactattttaaaacttcatctactctacatattctattattttaaaatatgttgttttaaagttttttcttttcttttcccagctatgtttgaagttagagaacattaaaagtaatgtcattcacggtagcaaaactaccaaaaatgctacaaaacataaatctttccaaatgtgtcataatggtggacaacaattttgtctaccaaaatttttttatgtcgtttcgaatttttgtccaccaaaaatctgttgtttcaaaagtggacaagtttttttcatcccattttttcgtttcaaaagtaatctttattaattacatcccaattttttcgtatgtaatgcggcaggtgattacaattcttacatataagcgataagaagaattgaagacgaaaattggaaggaggagctgatg

SEQ ID NO: 32608 - DNA, 3000 bp, Unknown; identical to SEQ ID NO: 816
  misc_feature (1)..( 3000): 2750-1469P.txt file - cDNA_ID_3059133; gDNA_ID_1620325; Annot_ID_153476

SEQ ID NO: 32609 - DNA, 3000 bp, Unknown; identical to SEQ ID NO: 821
  misc_feature (1)..( 3000): 2750-1469P.txt file - cDNA_ID_3059137; gDNA_ID_1620325; Annot_ID_153470

SEQ ID NO: 32610 - DNA, 3003 bp, Unknown
  misc_feature (1)..( 3003): 2750-1469P.txt file - cDNA_ID_3059167; gDNA_ID_1620326; Annot_ID_153505
aatttaaacaattaaataattttttttattgaaaatttaattattttttaattaccctttaattaggtaggtgcagctactttttttcttttccttctttttctctgtgaagctactcgttgattgtactaaaaagtgtaaaataatactctgtttagtcggtgcaagaaatagaaatgtaactgcttcagacgaccgttggatttctttattcatcagttttttgattaagcgttggcttatttttaacaactccacgtgcaattctcttataaacaaatggttatccaaacgcaaattccttgaccaaatctttttggtcggtttgtttattacaaaaaaagaaatagacaagatcaagggaattagatagtacgtggcataatcccccgttggtcctttgaatgttcttacttagctctggagtgacaattcaaatcctttgcataagtcacctcactaacatctctggtcacatgaacgaactcttatttacaaagcagggtctctctcatcatttttttttaaatgacaatgcatatgtggtctctgttcggtcgattacatttgaccaagtgagtgttcatctttgtaatcatgttggcattcaatcccgagtctcttccatcatcataaactatatcaaacaaactaacaatgatcaagcattattttttctctcttttttctgggtttatattgatattgaaacacaattactaaaagtattatatattaaaaagattttttgtatttatcagttaaactaaaaacctaaaatgctcatttctttagttgaaatagtgtttaccagttgcaataaaaatataaaattaaaccaaagtttcaaggttttattttttaatgagttaatctttcgagattctataaattaatatttattagtttgtagatatatttacgcaaaatacagtactatgttatttttagattttttttttattaaaacttttttaggttttgttctttgcatatttagttatgttttttttacttctttaatttctttttctccaacatattatgttaacgtagatacgaggcttaattcaatttttctttacataaatctaagcaatgacttttcatctacaaagttttttaaaatcaactataactgatcaaatacgtaaagagttatgtgaatacaaaagaaatcatatcaattgtactcaaaaggagttataattgttgattgaacagaagttatatacaaaatttagtcacacaatctgaaacagactcaagcgatcagctgaatatctatcataaatgatgaaataaaaaaaattagagattaacttcaaaaaaattcaaacttaaaaaaaaaacaaataacattataatactaaatttttttaaaaatatatgtttaagatttatgattattaatttatgatattattaggagcatatttttatatagagatttcaaaaaaaaaattatcttattatctgatcgattttggttaatttttatatttacacagaaccgataaaatttattaatttatagaatattaatttagagtttctattgtataatactaaatattggaaaatctaaacctaaatctaaggcatttccttaaattaaatataacatgaaaatagccctagtagcatttataaatccaccgagaatcggcataatttttttgtacaatgaagttagttgagttaatgaacaaatttattatgaccaaaaaatggaaataaaatatcataattggttcaatttttttaattggttcaaaattcaatatataaaaattaaaatcttaattaaatcccagaatctcataaataattttgggtccgactagtgacctataaaggaatacaaggaatgaaaagaaacataactaaaaaggaacaaacaagaaaataaaaaaatgataaaataagaatgaagaggaatgggtgtggaagaaaaatagaacaaatgttactgtaaatgataaccaaaacatagaacaaatagtaacaaaaattaataaataaataatttattttctaaattaaatattaaatataagacgaaaataatttaatttttaattaataaatgtttaatttgtttttttgtctgtttctcatcaaatttgggaaggaataattttcttgtacgattcctcaaaaaataaggaatgattaggaatagtgtggggtacacatattacaatttagaaaaaaattattgctgaatggtgaaaaaagaaaaaaaacaataaggaacgtgttgttcctacccattcttttcttaaaaaatgttcaccaattggaccctttattttctctgaagaggaatctgacgatataagccaatcatcatctaatgcctaaaacgtttcaaaacattaaccatccgaatcaattaaattttcagacaataaagttatcttttccaaatatattatggatatatatacccatcgtcacatttcttttctctaatttccatatcaaaactaaaatgaatataacaagttgagtgaggatatttttaaattaataaggaatgattttcattggtcaatccgtggaaattacattgtcggtaggtcaattaaaggcgcaattatgatgcaatatataaaaatttagaaatattaagagccatgtgactagaaccatgtatacaatattttatttcccttcgtattaaatcaccaacgaccaaatctaaaggtagcaaatcaaacagccccacaaatatatcaaaatatataaagaagtaattaaattaacaaaaacgaagaaagtataggtttcactctcttactcattccttacatgtcgaccaataattctataagtatctaatgacatttcctatctttctttcaatccataatcttatcatataatcaaattcgggaaagtttttaagtttcataaactctataaattactctctaccatcttaacctaaaaaacattctcaatcctttgtccaaaatcttgcatatcggcaaaatg

SEQ ID NO: 32611 - DNA, 3003 bp, Unknown
  misc_feature (1)..( 3003): 2750-1469P.txt file - cDNA_ID_3059173; gDNA_ID_1620326; Annot_ID_153500
ttttgtaattgtacgtttgtcccatatctccaaactgcatagctgattttctggcaaaaactattctctaaacattgtttaaatgatataagatatggattgacaaaaaataagtataaaaaaaaaaaaaaaaaaaaaaaaaaaaaagatataagtatcaaattaattaggctgtgatagaaatcaatctttcagattatatgtttcgtcatgtaagcatttttgaactttttatgtttctaaatttccacatatatatagtaatattttgagagattgacacgaataacaccaaaacaattttacttacaagatatcatatgatcatgtgttaataaaaaaacttatcatatgattttttccaatgtaaacttaaaactaaaatgaatctacgtgaacaaactttaaatcaaatatcaaatatagcaaacgtagcccggaattgaccttagtaaaaatattaatttcgatcagtctttagtcttagttgttggttttgttcattgttttttttttgtaaggccttagttatgacccaaacattgtttccatttagttcttagttaatgaaaccattttataaacatttaccacatactattaaaaaaattgaaacgaagttacaacttacaaatagtttaagacgtccatgcaaacactaaaaatcaatttgatcaattagtttttccttagtagatttatatccttaacgtgtggtgtagagttcttaagctaaatgttcgttcaagaaaaactatttgtggttgggtccattgatttgttgtactagaaaaacgaagtaatttgtgatggaatttaatgttgcaacgagacttatcagtactttggtgtggcctaaagccgtaggtctaaagaattaataaattcttggccctaattaactttttaaaacagatttaaatactattctatgttgattatgaaactgtaggatattttatattatgaaactttaatagatacacattataagtcataaataacactagaacaacaaaaaaaagaaaaagaaacaaaaaacaacttaggttgattaagtcttattgttttcaatatttgtgtctcaaacctctagacaacatttatatatttgactccaaaaatcatatgtaacgttgtattccgatcatccgatgagtacgaatcgagtcagtaattgaggcgatgattattgaatttagctgcacccaacctaaccttaccccaccttcttaacgagttagccaccgacgcataaattaggaccgcccatttattgatttctgatcaggacacttttgtatttgaaatattatgctatggtttattgattaatagttcatacacaactcgtaacaatgtttttttaaaaatagaatcttaataacaactttaagaaaaaaacaaaaaataataatctgtaaatggattttttccctgaaattttccatgatccaaaaaaaccattacaaatttcgttctcaatacaattaaatcagtatgaatgtctgaagtatgatctcacactaattttgtagtcaatactattactcttacaactgtacacgttttcacatcgccttaactccaggattctctatcatgatccatcatccatgtctctatcgtttatctgtatccattcgtttagatcacatcatcaattaattcattcaaatagatgtttttttttacttaaaagagtgattatatgcattcaaattgtgaagctctatatattacgctatagcaagaaacgaaacgtactgttttcccctattggtgaccgctctgtttttttctggatcaacgtaatctcttctttctttttatccgttggaacttaattagttaaatatttgatgctgggtcataattcgtccaatctatttcgccacaacgatgaaaactttacaaatgaaaaaaaaaaaaaaattaaccaaggtaaaattttgatattcatttcataatccacttttttttttagttaatatcttagaatgaatagtagttttgtaattaattaatcaagaattaaaaaaagttctatcaaaatctaaatatatagtcttttgtttgtaatatgttctgctttttacaaatatggacttttggtatcaatcatattcacttgttcagtattattcgaatttcttgaatcatataaaaacgaattatgtaataaaacgatataacaaatactgtggccggtcctaatgtcaattgtcatataactatatagtatatatatataaacctttctgcaaatacaatcctatatttaaataccaacatccacaagataagtaaaaacagaaaaaaaaactttaaaaaatgcgttgcctcacaaaaacaagatcgtttcattatgtcatcattttttattccttcttctttttaccgttcttgtcgtcctcctccgacgatcaaagaaccaccgtctccggtcttttctgtggcggacgtagcaaatcctccgcagatccaaactacatcccaactttcgtcgaagatatgcattcactatctctaaaactaactacacgccgtttcgcaactgaatcattaaactccactacatctatctacgctctgatccaatgccacgacgatctctcaccgtccgattgtcagctctgttacgcgattgcacgcacccgcatccctcgttgtctcccttcttcctccgcaagaatcttcctcgacggttgtttcctccgttacgaaacttacgagttttacgatgaatcagtctccgatgcgtcggatagtttttcttgtagcaacgacaccgttttggatcctcggttcgggtttcaagtttcggaaactgcggcgagagtcgcggttagaaaaggagggtttggagtcgccggagagaatggagtacacgctcttgctcagtgttgggagagtttggggaaagaagattgtagggtttgtttggagaaagctgttaaagaagtgaaacgctgcgtttcgaggagagaaggaagagctatg

SEQ ID NO: 32612 - DNA, 3000 bp, Unknown; identical to SEQ ID NO: 828
  misc_feature (1)..( 3000): 2750-1469P.txt file - cDNA_ID_3059181; gDNA_ID_1620326; Annot_ID_153498

SEQ ID NO: 32613 - DNA, 3000 bp, Unknown; identical to SEQ ID NO: 832
  misc_feature (1)..( 3000): 2750-1469P.txt file - cDNA_ID_3059186; gDNA_ID_1620326; Annot_ID_153493

SEQ ID NO: 32614 - DNA, 3003 bp, Unknown
  misc_feature (1)..( 3003): 2750-1469P.txt file - cDNA_ID_3059207; gDNA_ID_1620327; Annot_ID_153533
tagccattctaaaaataagatgttcaggctcagagtctgtgaaccgaaccggaccggaaccgtccataaagaatttgacaacaacaaaaaaaaaaagagagacgaaaatacggataatttttttttaattacaacaacaactttcttattatatttttgacatcacatgtgacgaaaatggcttgtttgtttaaattttttaataagaccaaacataattggacaaccaattataaaagtgacaaaacacgattaatttttaaattttttatttacaaaaacaactattttcttattaaattttatttttgacatcatatgtgacgaaatggcttatctgtttgtttttcaattaaatccaaaattggtaacactttggttttatttgttttgtcaactgaatttatgaatttgattaatcgtatgttttcggacttcggagtagttaacatgacatctatctaataaatccattgttaatcaaatgatttctaattaatatataatgaaaatctttgaagcaaataagatcatgtatttatattcatccctacactaaccagaaagccaatcccgtcgctcacacatggataaaggacagacaaagtcaagagacccgtcaattattatgaacgaaagttaatatttattctaaatttgtcaagaagagttgtaattaacgaaatggtcctaaatatgtataaatgacaaataattttcagtacttacattaaaaaaaaaaattggaattgaagtattgaaaaagcaattcatggttgccgattgtgtggatccagactgatcaagaactgtatgagttgtgaatgcaatcacttggatttggtacaagatacatatatcttaaagtcgcaccatatatgtaatgttaaacaaatcaaaatatattagaacgtgggaaatgttcttaaggatgtaatgtaaacgaatgaggactaggttaacaatacacatgagttcagccattcacatataaaataatgttaatgtttacaaacaaaattcggtcaataatttaagaacttgcaagacatatctatatatacatgattaatatttgttcaaatctgtaatctcttcgtcttaatctgttaccaacaaaaaaaatgatttctgttagacaaattctaataattattatttcgatccgagatactcatatatattacaatttgaaataaagtatatacaaaatggaacatagatcaaagattgtaaactttgattttgcataccatatattatttatttattttttccaaatatttattattattatctcacaagagcgaatgtgtaagtattaactgtagatagctctaccaagttttaaaagtttcaaaagataattactaattgattcatgataaatcttacgatttttagtcttttgagactaattattcttatatcgagaatcgaagaatatgaatgatatcaaaagctgaaaattgtgttttagagaagaaaatatatttaaacatgtagagaaagttggctagtccaaatgtgtatccattatttttagaaggtctatgcaatctaaaagattttgatttctgaaaaaaatgatgatttatgtggaaacacataatataattgatttccttatctatgtcattaaaatatatttattttcctctaatgtatccaaaaaaaaatctacagttgaacacgttttagctgaaacgaagtatgaccaaccaaaatcgccaagagagagcagtcattcatcgcgacctccaaaccctctttatacatgttgaagcgatggaatccatacatactgatcttccagaaagtcgaatagtttcataggtcttctcaaaagagatgattttaacaaaataattgtaatagttgtgtgaaaatgacttctaacaatcattattcaaatgacattaggaattagttgtgttaaccctagaaattctacaagttttttaggcccaaagactaatcatacgaagctttgtatttgtgtatacactcgaaaatattctaaatttaaagtgcggctaagtggataagaagacgactcgaatccaagactctgtactggagaattaccacaggaccaaggtaattaacttgattaatcgatttacactaatccatcaaccttttaacatctttttggttgtacatacacatacatatacatagatatgtatatagttatacttatttatatctttttttaatagaattgatcatatccggagtataaattagctaagaatacatttattcagacagccaacacagctgattatattaaatagcatgagctggaatggatgtttctcaacttatttctccaagttgcctatttcacatcaagacatggtgcccactttcctccaactctagatttattgtatatctatgtgaaaatgtgctgtcgttcacattcatccccaaagtattttaatgtatattgtatttgatcacatgaacatgacaaaatttatctgtaaatgtcttataataattgaactaaaaatgttatatttttaatctttttgtttgtttctattggataaaatgcaaataattatttggtagctatagacaaaactaacgtcgtgcaacaaaagttaaaaccatctttaacaaaagaaaaaaattgatgacaagatatgtataacaatatcaatgtctaatgacattctatctttaaatgtaagaaacaaaactagtattttggagaaaatattttaaaccttactttgtgtttttgttgacatttcacaaattatttaaggtgatttgttaattaacaatatcaaaaaaatcttcctaaaaaaaattaacccatacatgtgatgctatagttagtagtactagaactaaacccatccagtagtaaatctaataaacttcatttttttttgtattttgttgacttgcacttcgacatactctatataaacacaaccatattagagatcagatcccaacaccactaataaactcaacatg

SEQ ID NO: 32615 - DNA, 3003 bp, Unknown
  misc_feature (1)..( 3003): 2750-1469P.txt file - cDNA_ID_3059226; gDNA_ID_1620327; Annot_ID_153540
ttgaccaaattgaacccagattcaaccatttttttgttatgttattattacttattttgaagatgaacaaaaatgattaatgcgtaatgattttagattacttaacctgttgaatcaatcttagatccgtgttaattcaacaatatgaatctcctgatctgggaagcaaatagagtgaagatcagtccctttgtatactttgattcttgcaagaacttattaatatgatctctgttttgagtttgtaaaaattttacctttattttgagatgattatcagaagttactggaaatgctaattataccgatcatttttgaagacactaatttacttgaattcttaaacaggaattaagagcctgagtttttagatgtagtatatcatctgatgatgatgatgccctttacttgactaatttttttttttttttctatttttagaattgaattcgtgtgttttgctggttctataaagtttcttaatcacaggaaaagttcaaaggacaatacttgaatacttgggtaattcagaacatggttctatgatctcattgtggtttgttcgttggattttgtagttagcagtggacaaaaaaaatggtgattatgttttcgattcttcagttcaatttaaataagaatctatctatatcaacatttgtgaagctctttgttgtttcttggtgatacagaatctttgactcccaagcatcacggcattgaggttaactgcattaaccagtcaggtcgaatatttgttatccattgaccatttgtttgattatgggtcaatggagtttcaatgactcttcagcttcaattgttgcttataacttacattagttttctaatagtattatcttttgatctgtttccttatcactcttatgacttatcttatgctcttacttttccatttcgaactcaagcttctcatgtttattgaacgtttttgttggtgattactgtgtacatatgtagggaatctgagaacctcttgaatttaagtacatttctcatgggttggtgagttctttaattcttcatattttatttttgctcatctttaattttttgaaattttgatcgaagcagaacagctgcaaatttgaaaatctcagacatatctaaagcaatgtgacccacattggttggaatagagggtctctcagtacaaccaactgggtatccatatatgtaatgtctatacacaatctagttttacttcatattggtagtatattaaatatatatactataagaattattaaagttagttgtaaattgtaatgaattagagcatcgtaagtaaataatctttttttttcttttaccacaataattgttatgcctttacagaaatcaaagaatacatgaagggagcgaaacaagaaaacactaatacaaagggaaaacatgaacaaggccttgaaatcaaagagcagaacaataaagctcaaaaccatatcagtctaaaaccaacaaagtcttgtaggggaagaaatatcaccttcacgattaatcaaattcctcttgcttttgagttttgataattatcttgtcctataaccaacaagaccctttcactagcgatataagatctttcgtgatgcttttggaaatctcaattgtagtcccattgcaaggttctagtgtacattctactttccattcgatgaatttcaagaatcaactatcaattgacaaaacaggggaaaccaacgtggatgctcaatcgcctctaccagttggtgagaagaaagttcaaaatgatctgttttgtcttaggttactacggcgttcagtagcccacaagaaactcatcaaatccgtttgaaaagattatgtactttgaggatgatcatcttcaaaatgatggttgaaagtgtattgttccaataatataccctcaatttctagaagaatttgtattttggataataacaaatggcgtaaaaaacaacaaacatactcattgaatatatacttacaatgtcatgtacgaaccacataaaactaacttttcacttaacttttcaaattcctaacaacataaaacttatatttatcatattatgtagtataacttttttgcttctcctttttcaactctcaatgttttggtcatagtattttttttttctatttccataattttctcagaacaaggctactgttatttaggccttgtaatatttttgatgaataacattgcaataacagtgaaaataacaaattacagtcaatttggattgtaatattgtcaattaggctaaaacatataattcaaaagttggatagctcgtaacacttgcaaaatctctaaaaaaaatccgaaacttccaataaatagtactacataattccaagttggattgtaatttgggaaccaaatggttattctacataattgatgattgattgagacgtttacgctacaaataaaccaaagtcctctgaccataccggttcaagaagtcttccctctctcgcgccaactttgaccaaagactaacggtgaccacacgtcgtcaatcctttagtcatccaaactccaaaaccaaacaaaaccgaatattttgttaacctactagttcataaaattctacaacaaaaaccaaatttcaataaccgaaattaaaataatccccttaaaatttcgtaataatggtctcattttcagaaattgtattaattcacattaaatgtagtgtacaagtaataccaaccaaaccgaagcaacccaaaccggatgattttgacgaggtcaacactaacggcttttcacattagagttgaccaagagagagcattgacctgagagagttcaaataattgagtgagtctgtatattaaatacgcaaatcatcatcttcccaatttcgaatctcacacaccgaaagttattttcgaatccactaacgaatcttccacagcaaacacttttgtgttcctctgtaatttctcagtatatatagataccaaaacaagcagtgaaaaatg

SEQ ID NO: 32616 - DNA, 3000 bp, Unknown
  misc_feature (1)..( 3000): 2750-1469P.txt file - cDNA_ID_3059233; gDNA_ID_1620327; Annot_ID_153528
tacgtcatgtaacaagaaagcaattacgcgtggggtcttccttttaggcataatcttgtcattttggtatatgctttgtatcaatccatgtcatgatctatcctaaaacgtcgtcgtttatgccatggacggtgtagactggtagacactcatatctcactttaaccgaatgtttccgaagaatttcagacaaaaaaaactgatgaaaaaaatgagtttgcatcagataatgctttttgataaaggggtttcaaaagtggaattcttattattttttcgccaatagtgggattaatttagtcgttgagatttttgcttcaccgttggtttattggttctaataaaagttgtatttgattctccacccaaagttgggacgggtttatgacccataaattaggcttgtgatgtggagctgacactaactaaattttcaaacatatcttgaaaatttatattcattcattagaaatttatattcattcattataaagactaaatctcaataaatgggagtgttaatttgacatatgaactatgaaacgtatcattttactatattttgtattaaccatttggtaatgtattgatgtcctatcttaagtcatgtcatagtgtagctcttttaaaaccttttgtaggtcgtttataaacttgctagatgtacgccatgattttgcctatagatgatttcatttagccactacaacatagagttaatgtgcaaatatgtcacgaggtagtttatttaagtggtaatagatgatgaaatagattgaattgttttttataatattaactttttcatactagtgtattagacaaacaaaaaagaagtggatatatggtgatgaatgacgcactttggataattctttggcatatgaatcatgaatcactctactatatttctttttgtattgaaatatgttaatctactgatgatttatctactaactcatgtcattatgttggtcgtttaaacccatcttttttttttgttaaaagggtcgtttaaaatcttgctaaaacaccatgatttgcctattaatgatttcatttagccactaaaacatagaagtttatgtgcaaatacgtcacgaggtagttcactaaagtggtaatagatgaaatagattgaattacttttataatgtttaattacttagctttttcatatttgtatattaggcaaacaaaaaaaatggatatatggtggtgagtgatgctctttcgactattctttgactatacacttttagtccacgaatgataaatccacacgttgcaaatcccatagcctccctctctatctctcactttctatcaaatttagctctttaaatgttcctcacattctttgcttctttgttacttcttacacattttctcactctcacaaatctcacacacacagagtaaactaactctaaaagctatgaacaaacaaagtttgaagagacttcagttccggagatggggaaagcgaatcggaagctcgacgacggcttcagcaacgctaggaaacaccgaggaaagaacgattgtggcgtttgcgttctcatgttgtggaaaaccacgtgttctcgtgaagcagtttgtttggaggcttaaatcgcgcttaaggtggtctcggaagagtgatcataataatattcagtgtagttatgatctccggagctatcatctgaatttcgacgacggttggtctcgccgacggtgattttaattacatagacgttgctattattgtctatatatggagccttttcttttcatattttgtagtaaattaaattctcaatctgaaaagatgattttttttgtttcgtgttttcttgcatacaaaattgcaagatcttgatatttctattcataggctttaacttttgatccaaatacaaatacttgtcatagaaaacaacatttgtatgagcctaatttatcttagctttgtagtcttcattttttcttgcaacactattaactcgttgtgtttttcgttgatgatatatatgatgttgatgaattggtaaacccatagatgacataataaatataattgatgtggaagaaaaagatatcggaccagttaagattttctgaaaattgaaaaatgagaatgtattcataaaaagtatttttaaaatttttatgttttgcagatgaaatgttaaaatcaaagtaaaataattgctgtcattttattattaatgaagcaatcaattcagtcatctaacattaacatatgtccccacagtgtttctaattaccactcaatacacaatttttggatagggaaacctcataattgtttttttttttgttttggggtgggcacaaaacaagtcttaaattcaacaatctgaatctaaaccaaatttcatataaacaaatttgggcaaacaagttattttgataaaagtaaccattacactccaaaagaggatgaatttaaagaagacaatgcactatttgctaaaagatatcgagaaacataattaaaagatagcaagataaaccggagccggagaagagtaatgtcgtagaaaattctcctaagctcaacagtagattcttcatcattaaaagaggccagtgaacaagagtctgagaattagagaacacatgtaaactaagagcattttcaatggtaagagcccctcagctgctttcaccattttttaataataaatttttgaattttgtgagatgagaatttatgttatttttaaaatttattttatttcacagaactgaaaaactattataattcataacattgatttataaattagtgaaacactctatatactctatatccactctattttataattttataattaaaatgtttggaaacattttaattagtgaaacacttatatccacttgggcctagaataaacgtagttgggcctgctttcaaatggatacaaaacatatcgttttacgtctttcgtctctcttctctcgccgaaggaaaaaaattcagccatg

SEQ ID NO: 32617 - DNA, 3003 bp, Unknown
  misc_feature (1)..( 3003): 2750-1469P.txt file - cDNA_ID_3059237; gDNA_ID_1620327; Annot_ID_153525
gcaaattcctaacgtacactgatttgaactcaactgaaacaaggcacaccagaaagaaatgaatatatgacaaataactccaaatagcatatcctagtgcgagtttgagcatatgagaaatttcaaaacttttaatggtccaagaaacttacagtcttcaaaaccggagccatcttctgcctctgctccatagtcggaaacatatgtggatgagtttgattgctgaataggggcaagaggcgcagccagctgaggggaaggagtccgcattggttgatcccactcattaatatcttgagagctcttgttatatgatggttgtgtagcagctacaggtacagttgctgcttcctttgcaacttttaactgagaaaaagagaatcagcacatctccaattaaaaagataattttctatatctcaaatgagacaatactaaagttaggtacaaatgacaagaccagatcatggttattcgtcatggtacgagatagtaatccccaattcacagcattatcttttcaaaggaagtatacagtcaactattgactgactaccatgacacacatatatatgaagtatgaactatgaacactgtaagatatgtgcttccaggtcgtttttttcaatagatatgttgttttgttactatgctgaacaactaaacaagaccaaagagagtgtgcacttacaatggaagcataactcatctttgatttttcaccaactggttcctctactggtgcagcccgatgttcatgtaccacatcaactgcaacttcttccctaggtgtttcctcaatcgcaacttcatcttcatagtcttcatgctgaggttgatgttggtcctcttgcagactgtacttatcaacaagatcatctttgatttggactgcgttcacataatcgcttgcctcttcctccagcacatagtcagaaactgaaaagtcaaaaccagtgatatcaattttaagttttaacaaattcatcacactgaatcagtcgaaacaaaacatgacaaagttgacaaacaaaccttggggatctggatgacgggtaggaggattaagctgagcctcatgcttgatttcagataaataagaaggctgatgatagtaaacagtaccctcatcaacaaacagaaatacatcactgagaacaaaataacccttttcctgaggagcgagaaaaaaggtctgcacaaaactccttctgttgctaaattccttggttttcacagatcctgaaaccaccacaagaacaccaccttcccacgactcgactgaattaatcgtcttcacttcaatcgcagtgaaattcagtgacataaccatgttatgaatatgctgcaatcacatagaaattgaaaaatcaaaaactttcactaattaagtaaagcacaaacctttatcaacttaagttccactaatccactagaacctaatgaattctagaaaaatactggatcttgagaaatgggattagtagaaacagaaggagagagtcgtgtaccagcaaagaattagcagtctcggtggaatcaccatcgatacgaatagctctactaggctcagaataaaactgatgaataagatctggctgctgctgcaacacttgataatactgccccacaaagtacgaacccacctgcaacacatagtatgacaccgattcaatcacttagccaataataatagcttaagaatccataaatcaatttacgaaatgaaaactcgcctgcgtcgctccaggataaggagtcgccattatttaacaaaacccaagatctggatttaaacaaaaccctaagatccgatgaagatcgagtaaaagcttccaagaaactcaaattaatcagaagaacttcgcacagaaggaactggatagagaaaaagaagaagaagagagtatctctcaattgaatttgaataagaagagatctgaggaaggattgatgaagaagaaggaagtgagatttataaagggtttacagagaagaagggaaatggagagtgatagatctacacgagagagagattaaaagggtttttgtgaacactatagatagggtatggcaattaagaggaggcgctctttattccctttttatctacaaatgtatcttttctttccttttccctttgatttgccccataagttttgaatgcgtagaaaataaccctgaattcttataataacaatatgggtcctttatcttctttttattcatgattttaaccccaaaggttttgacattaccaaaataaaccataataacaaactgaatatttatattctcatgattttaaaccccaaaggttttaagattatcaaaccctttatattgccattacttactttttgttttctcgttttttttcaacatctagctttgattaatatgaaaagtagtcctgatgtttacaatggaacttgaaatgtaaaagtatgatacaaagtttgtttgatcaatgagagtttcttttaccaaacgatctgcagctttgttgttgtgccttcttgtccaaacaaagtcaacactggagaatttttgcctccaatatttgatctctctgatccaattgtggactttaaagttttgtgtttctcccttgactagcttcaagactatacgattatccccttcaaataacactttcttgtgtccttgtatccatgtgtgttgtattgccattaccaagctttgaattcctcgcttatagtattgcctccggagacatcttttgcatattgcattggttattaagttctgattctgatctagagcccttgatataagtattatgcagtgattataattgggcttttatggcccaatcattgagctgattaatatattggactttaatggcccaaatcatggtaaacaaaactcatcctactgatagaagaaaccctcgttactatcctctcactctccgaagcgattcagaaagttttaacccaaaaaagcaaaaaaaaaaaaacttttgttcactcgatg

SEQ ID NO: 32618 - DNA, 3003 bp, Unknown
  misc_feature (1)..( 3003): 2750-1469P.txt file - cDNA_ID_3059242; gDNA_ID_1620327; Annot_ID_153519
atcaccaatattatatatcaagttgagatcaaaattcatttatacgtttcatgagcacctttttctttgtccattagttgagaaagtaagatatgggttcaatattttataagaccaagacccaaaaccatttttctaatacttttttttctttgttaaaagttcattactgaagtaccatatttcaaatacttatgctttttcgtttccaattatttaatatgaaatttatttattttcatctaacatttttgctttttttctgaatcttctaataatattttcgtttaaatagaatctaaaaaataatatttgaaatcctctatatattaaaagagggatggttaatatttcattctatattattaggctactatttggactcttttgtattgtttctttttttattggtgccaacttaattctaccactaaaagtcgattttctatttatttatttttcgtcattcttgttactctagccatggaaatggaaacaaacggaaactagacagagaaaattattattgttactaataataaatgaattcgtcgccgtcgaatatcaactcaatgtttgttttttgggatgtgtaatcctcaaatatgcctcacggctacatcaaagaagagatactgtgtagccttagtgtattttaagcaccaatggatttcacagagttgtagcaattatttggtggtctgaactcgacattacacaaggcttccaatacatatacagaattccctttccacgatagattttttaaatactacttatatgcttttttcgttttcagttattaaattagctcaaggtgtttgagtattttggttggttccattaaggaaccaaaatacattttttattcaaatttcattcggttcaggtaggtttaagaaactgactcaataactaagtaggatttgaaagttttctaagtatttttcggtttagctttaagatatctgaaaaaccaaactattttgggatatatgtattaggattttctgttttttatttgagtaatttttgtaaattctgttcaattactcgaatatctttcgattatccaggtatctggaatattcaactcgaaaattttggttcacatattttaccaaaagctagagctaatttaaatcagctttactatatatatgttttttttgttttttctttgattagtatgagagttaatgttaataagaagtattcttagtttttccctctcttttctttgtttaaagtgagagttatagttacagtaaaactttttttttaaaatggtcccatcaaatactataaattaatgattgtataaatatatcaaaatatatttttacaaaaatccattgtagtttttgttagaattcattgctaatattttcaccatatcaatttattttttatcatctgttagacatgataaatgattgattatttttagttgattttagaagtatattgattataacgaaaaactctctttcaaaattacaaaataaggcaaatctctatatagattaataattaatatctttgttaattaataaaatattttagtctcaacattattaatctatagaggttttactaatatgcttataaaatcagaccgaaaacatactaagatacatacaggacatttataatgatagagcttctcagtgcaataactgttcttcgtggacagataaaaaatatctactatttgacaaaaaataatattgacaaaaaaatatatgtatatatatttatctagaaaaatatcgagtcattgatgtataacctgtttcgattttccaagttattatgtttaaagttttggagattttttagtttttatataacatgaaaaatattaagctataatctttataatcagttaaattttagtataaaattcaataaaccatcttttatttataaaaaaagaatgcataataataattaatatttatttcgactttagtttatgttttcattttttctccaaattcgaattaaatgatttattaacttttaatttaaatcaggaaaatttttcatattacaaatataaaaatgtagtttttaattaaaagagaaaaatgatatttttcaaacaaaactcataaataggatcgttttcaaagttgcccaatataatttcgtattcttaaatatagaaaatcacagatatcaaatataggactaacaatttaatgaattttatccaaagacgaaaaaaaaaattctaatatatgactaaccgtataaccttaacgatagggattagcgataggacttaacgatataaacacatatgtatatggttttcgacctctcttctccaaaaccatcacagagagagtcgccgaaataaattgaaatccggtgagaagattttggattcactccttccttctttcttcttctttatcatcatttgagctggttttggtatctctcctgacgaatttgaatctctcagccattttctcttctcgcatctgtgttttcgtgcttggagctgtacacgtttctttaatttgaatagtgattttgcgttcgttaattagccttctcgtacgagtgggctattttgggaatgatttaggtggttttaagttactgggtagtagtcactgctgagcgatttctgtttctcctgttgaatgattgattcagaaatttgaaattcacatcgaaaccaaatcttaaatcatattggtagctttttttttgttttgtgattagatactgtttttttatagtattaaattcgttttggtgtgagtgatttagtgtttgggaaattatttaatttagtggttattttctgatttagtgatgatttgagaattttgtgttgtttatattcttggtagcgggaaatttgtactttcctttgtggacctttcaactattgaatgtggaagatttgctgagaatcttagaaagtcatcatcatccatacgtaagagaacttttttttagcttgagagtgattttcagatg

SEQ ID NO: 32619 - DNA, 3000 bp, Unknown; identical to SEQ ID NO: 854
  misc_feature (1)..( 3000): 2750-1469P.txt file - cDNA_ID_3059258; gDNA_ID_1620328; Annot_ID_153572

SEQ ID NO: 32620 - DNA, 3003 bp, Unknown
  misc_feature (1)..( 3003): 2750-1469P.txt file - cDNA_ID_3059262; gDNA_ID_1620328; Annot_ID_153571
aattctgtaacatggttcaaattgtttacttgctcaacaaatgctacggctgactgtagaaatgcctgccacccatatagatccacgataacattaaagtcgattctatgacgccttaccaagttaaatgcatctttgaaccgttgctgagctaacgcattcgtaatggaagagaggaccagctttctgggatatatgcattcgagattcccccgcatagtttgtaatatcacagcagcttcatctccattgaggactcctatcacttttgcacctctttcccaaatattaacatagctcatattttcctcgtctcgccttctaccatcaataacaaagaacacatttccaagtgccacatctccattcagtacatccttggtatcgacaataaagagaaaatcctgtttggtcaaaataatcagatgggtaactacttcattggccaactctgaataaaatgagaaactgctacagttattacataggttcttcccgttgatggacagtctacccatatcatcaagcccacatatcaagggtttatgcaccccactagcatcaacctgtgccaccctcacccaaggacaagtcgatggaaaacatacactatcatcactactacgagtttccataatttctgaccttgacgcatatccaagcactttcccaccctcaaactccacaaaggctgaatcacgcttactaggattccaggcaagagccaggaccggtgattcgagaagtgtctggaaagtaatgctagccttaaagccagagcaagtcacttgatcaggaacatgatcctcatgacagactacttcaacttcttgtaaataagaaccatgaagctctgtgtcataccctcccgaagagagacacttgttgtggctagaaccataagcggagacacacagaagtgagtggacatccaaccatagaagatgtacaaaagagcccagtgctgttttacagtctgaaatttccacactgaagtctttgccttcgagatcttcccaagtattaggtgcagggaactcaacaaaagacaggtttccatctgacaaaaacacagccagacaattcttagaattccttgagtaatatgctatatctctgacagcagaagaaaaactaaggctgaacaaatacataggaggtggcatcaaggacaaagatagtggtgtcacgagtatcttggagttatctatgacaaaggctgttgagtcctccatgaccgctgttacccacataaagtggcgaacagacacctgccctgacagagtccaacatattaactgcagtggctttgttggatcccacatgactgttaccccagcttcccttggatacctaatctcctgtttcaggtaccagtggttgttgctaaagaaccacaccctaatggcatcatatgttttacaactaacaacccctgcaagaagatctgatgcagaattccatttcagattttcacatgattccgtagcatcttctggttcaccaattctaaacgagcttctctcaagtccattcctctcaaagaaagcaatcgatggactgctatcatctgacttcctcttataaacagctgcgattttagcaccactcggcatccattcaagaatcccctgcgtaaattcttttgtttctgaagaagactgcaaagcaccggaatcactttcccatatcttaatcttcttagacatacaaccagactcataaacctcacccatagtcgcaaaatactttccatcacccctccaggaaatggaaatacccccacaatttacagacaaatcattcgtttcacctaaaacagtatttaattcagatggttagcaaataaacaaaagctgttcacgataagtttcaactcaaacccataaatttaacccttatgcagtcaatatgacaagaaggtaaggggtccttacgtacgtaaccaccttcaggaacctctccaagcgccttctcgtacatcaaagcccaatcataagtcattacaagcaactgcccaagaccagtaatcaatccaagtagatctccagtcggattaggcgagatacacttgacacctccttctatatttccaactagctcagtcacatcactctccacattatgcactagcaaaagcccatgagaagtcccaattaatagagactccttctccgcgagataatcgaaagccgtgatgaaatccccaggctcaatatcaatactgcagacctccacaggcatagcactctttgccccagcgctttcattctgccacaagaaatacataaacataaagagaaagactttcgatttaaacagaccctactcgctaagttcacttgcaagttcatccacaagaaacttgaatcaaaagcaaaataaaaagaaaaatccatctttagaccaaagtccccaacttttttctcactcgtttccttattaagcagaaacaggattaaccaaggaggaaacgaattctctcacagaaagcaattcacttacttggaaggaagagagctgaagggcgtaaacgaaattagcagaagatgcgaaaaataagcgactttggtcgatgtcataagctgcgaactgtacaacttcttcagtcgaatgcaattggatgttctgaggaacctccgagaaaagcttcaaatttttcattttcgaagaagtaagaatcagtacaacatcaacgaactttgcagctacagatccaggaagcagatttaaaccccagaaatcactgatataataatatttagggtttaacctaaaacacgccttcttctctgtttttcttttcttctctgtttcctctctttcgttttgctataaacttgaaaaactgacccggtttattttaccacaccggttatcttggtttataccggtttagtttgtaagaaatataatattattatccggccactttcttcagagatcagttttctatgcctttccttgctgattctctcactagtgaggaaaagcatcatcatg

SEQ ID NO: 32621 - DNA, 3000 bp, Unknown
  misc_feature (1)..( 3000): 2750-1469P.txt file - cDNA_ID_3059287; gDNA_ID_1620329; Annot_ID_153593
taggttgatcttcttctgagagttcaccatacaaatttggtgagcctcactgggtattgctatgaaggagataattaggcccttatctatgagtttcttcccaatggagacctaaaacaacatttgtcaggtatattgttctagtaatctcatcgcatttggtcatgaaactcagaaatagccttgaatgggtctaaaagatctaatatacaggaaaaggaggtaaatccatcatcaactggagtattcgtctacaaatagccttgaacgcagcactaggtttgtactaacttaaataccgtagaataagatgtatatcgactcattttcaggtttgcggtaaatcatttgatatagctggctccattgcaggattggagtacttacatattggatgcataccgccaatggttcatagagatgtcaaaactgccaacatattgctagatgagaatttcaaggccaaactcgctgattttggtctctcaagatctttccaagttagaggtgagtcctatgattcgacattcgttgctggtactcctggataccttgatcccgagtaagtatctctttgttttgaaacttcctattcattcttcaatggttaaagagtatataccctgttcttgtcttgcagatattaccctacaagtcggttagctgcgaagagtgatgtctacagttatgggatcgtgttattggagatgatcacaaaccagcccgtgatctctgaaaagtaccacataacagaatgggttggctctaagcttaaccgaggtgatattattgagatcatggatccaaaccttggcggggtttatgactctaattctgcgtggagagcacttgagctggcaatgtcatgcgcagacccttcttcctcgaaacgaccaaccatgtctcaggtaatcaacgagctaaaagagtgtcttgtgtgtgaaaactcgaggatgagcaagactcgaggcatggaatatcaagaaatgaatattagcttggatacttcggtggttcctggagcaagatagttttgacttttgagtagttgtctacttgttgtaccaatattgaatcaacatatcaatttgtaaaacatctataataaaatgtgatttcttctccatggttttgcttttgtgacattctccaacaacaacaaaaaaaaaacactttttcgttataaaaagaaaaaaaaaatggtgaagacgcctaaaccctagtaagagtggggcttaagcccaatgggccaaacaagcgtctgtgaatggcggcaatttcttaacgcgaatcaatcgtcgatcgctggagaaaaggtctcaccgccgggaactgctgatgatgaagaagcgctctttttctcgctcgacgggatctttcgccgtcgtaaaccaccggagattatcattctcagtcgccgactcgccgaagcctgctgagatagatgaaaaacctagatttctcttggactcgctgctctgtggattatccaaacaggtgtttgctttgacattacactataatttctacttacgcatcatgaactcaaatcttctggtgtgattaagattgtgacatttgtgctaaatcaacttgttaaacatggttgtgatttcttattgaaggaaataattaggctaatcaactttagctgaatttaagagaaaatgatgtcttcttacctctgtgaagctgcactagaatcacacacatttactctttttcgccactgacttgtcaaaagtctttcttttgtgaatgatatgtttttttttttcccttatttatttgatgtttatctctcagaccaagatttctctcagactcgctgccctgtggttatccgaacatgtttttctttggattttgatagtgtcttcttaaacaaaataatcagaggctaataacctaagctaaacttaagagactcacaaattattgaattgagagcatccaaacaacaacaaaaaagacattcaagaaaacaaaaacccaaaaagaccgtcttgtactctaggttgttggactcgtcttatattattgattgtcctataatgtgccaatttattgcttaacgtacttcttggcccgctcccaaattcatgacggggatattgggacattgtcgtcctcttaaccctcatctttcccttggcgaagggctagctgcactagaaaacacatttactcaatttttcaccattgacttatcaaaagtctttctttttgtgaatgatttgggtttgcttatttattgaagtttatcttcagcagcattaccgattatcgatttcatttttctaacaaaaacccttttccaaaactacagggaaattggtaagacgcctaaacttaaaaacccaaacaggtttctcttttgagattgcactaaaatgtcttcgtgcatcatcacttcatggtggattaagatcttttggtacgattgatatgatagtttctttggaactaagattcatgctgattgtctgattaattaagaaactactgttgcatcaaaagtgacacttctctagtaaaactaaagaaaaagaatattgtttgtgatttcttaaacaaaataattagagactaataacctacgcgataaaagagaactcacaaattagtgagagcaaaaaaactacggaaaggacagtctttaaagaaaaacacaataaacaatcaacgaaaaagggcagtcttgtttggactgtgatatatcaatgtgtgcttcttggtccgctccttagtttcccagaaaaaaacttcatgacggtgatgttgggacattgttgtcctcttaaccctcatcttcttccattggtgaagctgcctgcactagaaaacatatatactcattttcaccattgacttgagtcctgactaagtctttcttttagtgtatgatatttgggtttgcttatttatttaaagttttatcttcaacagcatagccacccgttggtttcttgatttttccttgggagttaagaaaagatg

SEQ ID NO: 32622 - DNA, 3000 bp, Unknown
  misc_feature (1)..( 3000): 2750-1469P.txt file - cDNA_ID_3059302; gDNA_ID_1620330; Annot_ID_153613
aaaaatattgattttcttttacaataaataattaatattagaaaaagataattggaggaaaaagcaacttgagattatattttaaaaaacttaagtaaaaatataattaattaaaggaatcatttattattttcttagtcgttgtgtaaaactcagaaaattattctttcttataggagtaattaaacgaggttatatgtgagtttgagtttataaaagaagtttaaagtgtataattaaacaagatttatgtcggttttggtttataaataatagttaaagtttaaatttataattaaatgtagttaaatgattgtttgggttttataaaaagtgattagggattttattttacaataaaaatgtttaattttaatttttattagatgagagattttgatcactggcggatgcctaacgtatatttttttaacacaggcactatattataaataatttaatcaaaaatataatattaacataaaagtaattcttataagaaacaaaatcctacaaaattattctacgtttttcccaattttggacaaatgaaaaacaggaattgatttaatttatttagagaagtttttgcatcaaaagttttagtataaattaagtacagattatagatacaattacctactgtggacattttgataatttaggaattaggactcataataagccaaaaaaattaacaatggaaacaaattaagaaaagaaaaacagagatcagtttgcgttgatttgtttaatattttggaggccgtaagggttgggggtaaataggttttaaggcgtatattttcgtttaatacaaacttttggtcaaagtattgtttttatttttagtactaggacacttttttattttccatattggctttggcttaatgtatttgaaaatattaaattatatgaaaaaagagtgtggggcgcgtgtcctagtaactctgatcttgtagtatccgcccccgatcataattcttttaaaatattatcttaattaatcgtatttaaattggttgatagtgtttataaaaatttatgagatttgtatccagtttaaatttctgaattggtcaacaatctaatttcaatcgaagccatctcagcgttatcgcgtctcattgttaacagagttatacttgcccatttttggatatttttacaaagtgaaaattcatccgaaaatgttgacaattgaaaatgttagactgttttattttctaaggaatgcataaatttgttaacttatcgtcgcattatgtgtatgattgataccacagtagaactcgttcgtttgaatatttttttaagtttgtgtaatctttctttgtaagcgaagagttttggacgaataatttgagacaaacttgactacgagaaaactagctgagggtaggatttgaacccaaaacttggtcataatcctttttgagttcccaaaattcactgatagtgttaagcggaatcgttcattcaaaatatatactatatgtaggctatttgggaatatcttatacacttttttgtaagaaaattagacatatttatctattgtttttaaaaaaaaattgtaaaaaaacgagatctaagtttattgtcaagttaaacaaatagagaattacgggacgataaaaagaaggaaactaaatgattagagactttatttttatttttctcaatcgacgtgatgaccaatttgatacagactcataatctatatgatatacccaggtggaagacccatgcgttgcatgcgttagaattaatataataaaatacaacctgttgtttagctgtttctaattaatattgaaatatgtttagctgttgaaaacatatagaggttaccttttatttttctctaacttattcatctcatctagtttatccaactcttttttattattcagcttatctttattcaacttatcagtactcattttattcagctagttcaatttgttaatcaccattggaaactttttaggtgtttatttttagaaaatactcttcattaaatctcaaaagttcataaagtttttggtgtaaactactaattggagattcgatctaatgttttataaagtattttatatggtttaataagattttagaaggtatttaaaaatgttttacaaggtattgttttacaaggtatttataagttatttttatactgtatttataaaatatttataagtttttacacacatataaaagtagtttgtatactttaataaagttacacacatatttgaataaacctcatattcttaggagtacttttaataaacaattagaaatataatatttttgaaaagtggtattcgaaaagatgcttttgaaattcttcctttatttagcttccaattctaaacatttgaactaaactatttgatattcaattttaaaagcttatatggattgtcacctccaaacatatgctagatatttacttgagaatttttgataaacatctacttacaaaattttaactaaaataatatattgagaaattggaaaatgaaaaagtaaaatggtcgaagaagaatatcttttatgatatgttagcctcaacaacgggtgatatttaataattagtttaaaactttagtcactttgtagttaatacttctgatttaggattaaggtccgttgcacccactacttctgacaaaactaagtgtgcggacttagaaaatagattaaacatggatggtctcctatctctttgttgtcaacccaaaccggcaaaccctgatattctcttattacttttcatctataacatattgagtactagtacttgaccaaaacaaacatttaactatatagtacatctctttgggcttaaggaaacccttttgtaaataaagcctaagcccaaattgtagaactagttatagtcaataacacaaaattgcttctaaaaatttcccaaatctcaagtcttattatgttattttcaacaacgatatgcatgagatcatg

SEQ ID NO: 32623 - DNA, 3000 bp, Unknown
  misc_feature (1)..( 3000): 2750-1469P.txt file - cDNA_ID_3059311; gDNA_ID_1620330; Annot_ID_153631
tgatgcaacattcacgattggttttctctgcagtgaaagagagaatggcattacaataaacagtcaagttttatttctgtattatttaagtttttccattgctaaatttagatgaaaatggcactatagtaaatataaaattttaacaagggttaattgtcttcattatacatgtgtgaacgttattcaagttttctcactttaggaggtgtttagtttcgtagttagattaaataattatctttaatcttttatctcagtatttcattaggagatattgtccacatgagttcctcttctttcctaataaaactaacccctcttctttttgatagataaaatcttttttgtttttttaatgcaaagagattacatgaaaggtcacagaaaatgcaaaataaatttgagagataagcataagcatacaagttgctagcttttaaaaacatcaaaagctcaagaaactagggaggagctaaagaagaaatagcctccatatatactcactagagatccttaattgaatggtccacgattgcctcagcctccaggccctccacgaccatggtttctgcgtccaccgacatgagtatattacatctcttgaaccttttgagctgcctttattggtcatccttctcaagatctctaactctctaagctacatcacaaacagattctagacctgaattaattctagatttgaaggcagcaaatggattattgttaaggacactataagccacatcattttgtgaggatcttgattgagaggaaggagttgtgaaactttttctgtagcatggtaaagaccaatttaaatgtttgaaattgcttcaaaatgttaagaaattaaaatgtaagacttaaattcgactagaaaaaaaatgttaaaaattcgttttatgcgtgtttaaatatagattgtggtacgacgaggatactataacaaaaactattgtgttatatatgtcttaattttctaaaataatatgcataaacggtacgtgatattctaatataatcaatgcaagtataatgtaagggaagaaaatgtcacattattacaacttacaagcaaatcaaccaaatcattagtgttgtgccagcttctttacacaactcgccacgaaaccgacttagacgtaatttttaaaatgatataatgaaagcgtcaaaataatattcccaaacctcatcctcgctttcctcaagtaacaaactttccttcgtccgcttttgattttttgaacttttgactttttggatatcattcccaaatgtttttcaaacatctcttgtgaacgttccaaaaaaattgaaaatgatttattaattgtagagtactcataataatatatcaaatcatttttcgggtattagtgttacatattcttttggagttcaattacgatttttttttttttttttaatgttaagaatttttgaacttccgtaataatgatggttcaaacaaatttgaaggtgaggaaatcacgtaaatttcgaaacttcaaagttcgtttgggttcccgcttgtattttttactgtttgtgttaggttataagttgattttcttgttatttttagtctttttctcctatttatatctctacgtaaattttgtcgaaattttgaaaaatgataaagatgataaagatatgtaacataaaaaaaaaagtgttaagaaatttggaatctaagtgtagataaatttcaagtttatatttggaaaaataactgtacttgtaaatatgaggattgcaaaatctgtctactgttcatgcatgcttacttttttaattaactgaaaattatcgctacacatatcttgttcaaatgttttcgctttacttttacgatgaacaacactaaattttattaactgatcttacaaaacttcgataataaaaatgtagttacggcgactagtcatcacacaataattttagcactactttcaattcatccaaaataaaaatcgtaactaaattgtgtcttaaaatttacgattaagaaatcaggaccctagctagagtcaagactatagtatatatgtaccaacttcttttattttttgtcgatcatcattaggcatgacggattaacaaattaaatcagtagttttaagtcttcactattcatggatagataatttgacgactaaagtaatcagttatcgaacctctggagtctggatagatgactacataaggagtaatggagcaattgttgcaatgtccacatattgaggtatacttaattggttatttgtcttaatgaaaaacaaattcagaataatagtttatactagtaaaattaaaatattgcctcaactaataagttgttatgtgcaattatatgtggttgttgtacatgtgaccttaactaatattaagtgaaacatatacatttaaagataacgcctaaaatttaaatccttttttttttcttaagtccttcaaaacattctcaatcatatgaaagtcttgtcaatcaataaaagtccaaaatatatattttagacccaagtggttttagagaaaccccgttttaaatcattactatttcattaaatttacttttacatttctttcagaatcgaagttgccaagaatatgaaatcgaaatagattacgatgaacattaattacaattctactattatcgacttagctggatcaaattttcagcatatcatatacattgtaatataaattattaaatttacaacatggcaaggaatgttacaaagtcgctcgcacgcctttgcaaacgtttctaagcttaattatctaaacaaataatataacctttgactttcgcatgtattcggcatgtatatgaggtgtattaatcttttaggctctaaattatatttcgaaggttggctttatatatatatatataccttatggttgatcttaaatgactcacaaccctttccacaagaagttataaaccaatacatagaagaaaacttccaaccccaaaaaatg

SEQ ID NO: 32624 - DNA, 3000 bp, Unknown; identical to SEQ ID NO: 873
  misc_feature (1)..( 3000): 2750-1469P.txt file - cDNA_ID_3059344; gDNA_ID_1620331; Annot_ID_153660

SEQ ID NO: 32625 - DNA, 3003 bp, Unknown
  misc_feature (1)..( 3003): 2750-1469P.txt file - cDNA_ID_3059358; gDNA_ID_1620331; Annot_ID_153649
ccttagggctaaggtgtgattttaagtattataactcatcacattttgcgtctctcctagagttcctcttggttgttggatccaacacgttttatttctccgtgatcaaaaacagggtaaacttgaagatagaatggctggtggaaaagaagagtacaatgcattcttctactcgcttgtttctaccgatacacaggtaaatcactttattgttgaagtagccataaaaactgaaattcatcagaccaaatcagaaccaaaatataattcagttctagtccgcactcgtttccaaaacacagaaaaaattttgctttccagaacccgtgacttgaattcctgaaccgataaaaatcgaatgactgattgaatggagaatgactgatgtaaggatcgtgaatgttgaaatgcaggaaatgtattattcaacgaaaagacagcagtttttgatcgaccaaggttatagcttcaaggtaataacaagcctcccacctccggacgcgggttcaagcttgggctaccacagtcaagaagaacagttgtctcttctcggaaaggtgttgaatgctggagacgatatggttggtttagaacaacttgaagaagacacagatggaaaggctctaaagacgcgacgaagcatgggatcgatgagtgcaatgtccggtgcaaatggaagggtctacatggaatacaactcaggtcgtcaaaaatctggtaaccaatccaagaaacctaaagacccaaccaaacgacacaatatcttcaaaaaacgttatgtttgagacaagagaactcatattcggctatatgttttgagttgtaactttggtgcaaatttgtttcaggcacaaaatcaagaaaacctaaacgaagacaccctaccttaaaagaccgttaacatttgatatttgttttattatgtgaattgattaattgatattagaaagttctttccttttttttgatatttgttttctagcatatcatgatatcgcctcgagaatacctttgaaaattattttgttattgtcaactgtcatgatatctcgctgaaccaacatataaaacacgattataatttggttgacagatcctgaacaacagtaaaacgtacttagttttcgaggttaaaaaataattacttgtcatgatttcgaattaaaaataataatgggctcaatttgagattaaagaaagcccacgctaaaagaggcctactaaatgcccatattggatccgttattgtagcctttctatatatgaatcgagtttgcatttctgctataacgttctctgcattcacatgatcacatcaactcagtaacggactcgacatacccggacctggacccgacaccgaatccgaatcataatgcgacggagacgcagctcgcttctcggtctagcttacaacggaaaatatttacggtaccgtttgttttccctctgtcgtagaatttctgtcttcgacaccggattgatataatcgattgaaaagacaagagataatgtctaaaattgattcgatgaagagaaaaagatcaatatggggaacgataaaagtctcgatcttactgattttggttaattttcatattaccctgcaaaaaaaagtattgtcaattctggggaattttgttgttcaggtgaaagatgaagaagacccgactctgtgtgttttttcttttaagtgtcgtactgatgaagaagatctgggtcaattagtcatccgttatggcccagttgttaagatgttatccaaatcgtaagaagaaggcccgacatgtttttgagacgttggtaagaagaaggtcttgcttcttttgtgcatccagataatgtctatatgaccaaggtaagagcatcctcattgcacatcctccaatgaatgtctttcatattaaataatattaaatttaaagaccctctctcttttgacaggtaaaatgtctactattaagacacatccatttattattttccacttttttaagtagtttaaaagtttaaagacacccataaaagatatgcaatgaggatgctctaagggaccgagattatatactgctgcagatggggtaatgtaatgctatttgtcttgtgcaggagcgttggatgtacattggtctcctcttggttcatactttgtgtcacttgagaaggagaagaacgtggcaactctttgggcattgaatcgtctcccattctcagaccatgtacattgcacaatttttatgagtatcataagcccaaaaatattaaattaatgaataaaataactgatttgggtttaagtagtatcactggagtgatttctttgataccagtctctgataacgtggcgggttatgattagttgggaaaacatgtttttgtgtgaaaagagagaaattttttttttcgattagtcgggaaaacgcatcttttcgattttgcaattttttttttttaatgatactaatacgatttcaccggtggaaacagatttattatcaatattataaaaagtttcaaacaataaataaacattaaaattaatagtaaaatattattaatggtactctatgagtaccaactatgtgcatgctctcatgcgctttccttcctcatcctatggtttgtctttcatctcccattttgcatatgtaagaataatcttagaggctaaaagaaaaaagaatgggctcaacgtgagaataagaaagcccacattaaaagaggtctattaaagcccatatttgatccgttatttatttgtagccttttgaatcttctactttacatttcccttccttgacattaatgattaaaccagtgatacccgaacccgacaccgaatccgattcaaaatccgccggggacgcagctactccctccgccaaatagctttcaacggtaaattttcacggcgccggttgtcttccttctttgttcttctcaggaatcgctaattgataacttcaattggaagatacaagacaaaaaaagaagatcaatatg

SEQ ID NO: 32626 - DNA, 3003 bp, Unknown
  misc_feature (1)..( 3003): 2750-1469P.txt file - cDNA_ID_3059365; gDNA_ID_1620331; Annot_ID_153647
ataacctataaacaagaattaccaaaattaaaacatctagaagaaaaattatcagttttgtctcgttttttattcacagaagtgaatctaaagcacaaactctaattcttaatctccgtttttttgtagacgatttgaaacgtctgtacacaaacatatgtatatcaacactgacatgtttcgtaaatccaactttgtgatcagctattagtgtattcttacccattttttctttttaagtttttctcttgttctccaatttctttcttctgatacagagagaattgagccttctaagatgcggcatttgcgggttgctagtcaagagtagagtcaaataccatttcctgcagaacaaacggatcctctcagacatatcccgggaattaaaatgaatttgtaaacaagctaaattggaactactcattatttacggtttacttagagattagagtttttcgacatacaccaaagagaagtgaataaaagaatgtaccttgttgcagacggggcaggtttcacttctctccatccattctagaatgcatgcaaggtgaaaatggtgatcacatttggctacaagtttcgggttctcgatatcatattctgaatcaaaagcacagacaatataataaataacccattctcgcagtcatgtaaggtacgattatgtttatatgtttttgagatgtgggaaaggcaaacaagcttttaccttccaaacatatgggacaatcctcctcttcctctattggtataaaaacagcttttgatagcttcgggtctatttcttcagtagattcaagatcaatctctgtttggattttgctatctgtctctttatgtgagcatgtagttggaaccccgagagtaataccatcaactgtttcttgagcagactcggtattagcagagtccaccgaaacctctcttatatcaacacaagtagcctcttcaccactagctggtgtttgaggaatccctataggcacatcgaaaggggtaggcagtggcggtggtatataagcatcaggagatgatgtctctaagtttgtgtctactactacaacaccagtagagattgcagaggaagtcctgttatgagcggaagataaaggcacacgctcttctgttgcccttgggtactgcaaaatacaagtcataaaacaagttatattcccatatgaatctcgaagcccgttggggcttttaactcatttagtgtcctgaagcacatcaagattgatttatttgcagcctatcaaagcaaggacacccaaaaaaaacgaggaagtgggagaagtatcagactaacgtagtagtacgcaggtccattatctacatcagctcttcgtgaagaagaacaacaacagcaacctcccatctcttcttctctttttttttttttctgttttacaaaaactacaaaacccgaagactcttcatctatgctaacctacaagatatgtgaagaaacaaattacattctgagatcagtaggagaatatttatcatctatatgcaagaaactcaaacaagctttatcgttttcgatatcagtttgagctgtctactaaagtctgatcagactcatcatgctagtagcaacaataaaacaattcagctactaacagttcaaattcactctcaataatcaaagatacaataaacatcaaccattaaaatcgagacaacagtgttgcgactacaagcctatgtgaatctcctacaattctcattctctttagcaccatctacacacaattgcaataaattcaaatcagttttacactaaaccccaaaaacttaaaacaattctactcagaatttaactccaacacaaacaatgaatccacaaaaagaaccaaagctccattaagagcaagctaatccgtaaaaccctaaaccgaaacttataaaagcaacaataaacatcagaattctcagaatctagcataaacacataggagaaatacggatcaaaacagtaaaaaaaaaacccacagaatttcacacaaaaatcaagctcaaaacctaaagaaaagcgatcactagcaagaacaaacaccaaagaagaaccgatcatcttctcgagattgaatcagagaagaggaattaaaaatctcaaaatcatagagagaattttactttttgttcttgggggaagctttttttgttttgtcttcgtctttctctgcttctgtgctttttgcggtgctgtgtttatcgtgcgctctatcaaaatgactttcctaagaaattacaaagactctttttgggctcaatattatatttacttacctgatttattaaattcattaatacaattattaattagctgattaattattttattttttccgttacaatgtatttttcaaaatttcaataatgaaattacataactgaaaatcggctgaaaagtgtcgaccaaaaaattataaattgggaagtaccattttcagtaaaattattactattttttttccggcaaataatttatcgatgtttaaaaaagaaacatgggctcaaacttaagaataaagcccatttaaagaatcctattaaaagcccatatttgatctgttactgcagcctttatatatgaatcgtgttcttacgtttctgcttaacaatttccttcctccgcttcaaacgagtcaccgactcgacacaggaatccgaattcgccggagacgcagcttgcttcgttgaatagcttacaacgggaaattaccacgaagacggttgtatattccctccgtcgtacaatttaggttatgtgcgaattcacaaattgaaaatacaagagaaacaatccctaaaatcgatttgattaagaggagcgaaaagaagaaaatcaatatgggaaacggtaatggtctcgaatctcgatcgtactgagttttgattcgtttattgaattatccggtgaaaagagtatgctaatactggggaaaatgttgatgtttagatgaaagaaaacgacctacaaagaagatg

SEQ ID NO: 32627 - DNA, 3003 bp, Unknown
  misc_feature (1)..( 3003): 2750-1469P.txt file - cDNA_ID_3059382; gDNA_ID_1620332; Annot_ID_153682
caattacactttgaaagggcattaatgtcatttgatggacagaatcagttggacgtacaatgtttttactggtgagctcgtatgtcttttccctagttttaaggctttaccttttctagctatcaaataccaaactctatttttagtatttaaatcccggggagcctctgctttatttacattttcattaagttttaatggaaaaactgtaacaacaattcataactcggctctacttgtcgggttatgaagtcttagttacttgatgtcgagaaatcatctctcattgtgatgggaggaagcagttgttactattggttggctatgcgcagctttggtaaatcgcattcacagtttcttcaaaaaaaaaggtcttctttggtgcttgggtcaagtgttttcttcggattttagtttgtatgtttctatgcttaggttttggtttcgatctctttcgatttcggcttttaaatttctgtttatgtttctctttcatacgattttagacttcgggaaattcacgtttttctccagctttagtttccgaaaacttttctctcgtccgtcggctttagtttccgaagatttttctttcgtccgtcagcttaacttccgttatttgggatttgtatttcaccttagtttcaaaacaagtttcataaataaaatatttcagatgataaaaaaacaattcataattcggaaataaaaagttacaaacaatgtttaaaatagtacttaactgtttccatattttaaacattgtttttcccccacaaaaagcaggttcttgtacattcacaaagcacacacagatccgattaagatttagactgcacaatactcaaggaacgtgtcttcttcttctttttctttaaagaacatgtttactaaacaagaaagtgaaatttcttcatgagaatttgcaaaagagacaaaagctgatgcctacaacaactaagattataataacaaaattatgaactgaaaaaagagacatgttcagtcttttattgctttatatctttctgcagttaataaacgaatttgactacaatgagaagctttttctttcctattttttttattgtgatcttgtaagaaaaaatagtgtttaacactgttatttactattatagtttgaattatgttcttgatcaccaataacaagtaaagttggagatgtggtgcagtgataatgaaaatatactaaactaacaaaattaatttaaaaggctcaatggtttaagcatttaagtgtaaccccaatgtaaactcatttttctgcaattgggccaattaaatatagacaaccacaaataaatatcaatgacatcatcactgtatatcctaatgcttctcaaagaggcatataatactgtaatctccaatttttttgtttgtcaatttcttttaatcccaccctaccattgacggctgtggaggaaaaaagagagacaactaatgaagtaatgagtaattatacttttgctttagttaaagagccggctttagccgttttttactttcttttgtttagtttttgttttctactttattcttcttaagtagaaagtttacccaaaaaaaaaacccatcttaagtggaaagtaatagagcataaataaaaaataaataaaagagggttacaaaatatgcatatttattaaaggatcacatgtattctaaaatctgatatacgttagccatacgacagaacctcgtatagccttcaaatgtattaaaatgtaaatgcttcgtcgaattatgcgatatcacagattatatcttgtgcactaaaagtatggactatttcaaagaaatattcaataaccaaatgtacttcaaataatcattattagatgtaaaacccattacatggataatgtggatttcttctagatcgctctccttgtagaaagaataattgacatagtataatagcaaattgattatggaatagttaaggatgttcaaaagggttttaacttttaaggccaactcgacctgattctaaattagctcagttctgaattaactctaacctgtttttggtccgctaaattttgcataaataatatggttaagcctttttgtaacatggttttagtctgccagtttttttatttaattcttttttacaatatttttgtatgtataaataaatagctcagattttcttctcttaactaacatttaaaagttattatgcattcatagatcaggtatttgtttcatattttagaccctaatgcctaaaccccatgtagcgagctacaagagcaacttaatgtctgtacaattaaattaattatcgtttatagggtttttagaaaggcggttaaaaaaattatttatatataaatctaataaatgcttatattgttcaccaaaaagtaaataaattttaataagttcaaatttaaaaatttatttttaaaaaataacaaaaatatgttaaattttattgtaattataagttttactctaaatgaaatgattaatatgatatatgtctaactttatctctaattaattaatttttaatatgtgatttaacattatcaaaatatatttatatttacattagctcggtaaattttctgtgttttggattaactacaactttagtatagtgtaattagaagtggacaaatatgtataaattttaataaatacatcatctgaacttatctctttattttcaatattcttaataggccttgaattagaggcccaagtaaaaatgtcgaatattgtttttttttcacatttgtaacaatcggctttaataaaagttttaattctgccatttcctttcaaagtaaaaactaaaaagcttcccttgaggcaccacttcttctagagtcgatcttcttcaaccttgactcgtgagtcggtgcgacccagattcttcatgatcgtaatctcatcttctttatatattcatgggggtttgatcatctttctgcagcaacagagataacgtttaattcgaagatg

SEQ ID NO: 32628 - DNA, 3000 bp, Unknown; identical to SEQ ID NO: 882
  misc_feature (1)..( 3000): 2750-1469P.txt file - cDNA_ID_3059391; gDNA_ID_1620332; Annot_ID_153675

SEQ ID NO: 32629 - DNA, 3000 bp, Unknown; identical to SEQ ID NO: 881
  misc_feature (1)..( 3000): 2750-1469P.txt file - cDNA_ID_3059396; gDNA_ID_1620332; Annot_ID_153673

SEQ ID NO: 32630 - DNA, 3000 bp, Unknown
  misc_feature (1)..( 3000): 2750-1469P.txt file - cDNA_ID_3059400; gDNA_ID_1620332; Annot_ID_153672
aggtgaagttctagtaatccgacagggctggtttgatctcaagatgcaggctgtaacaatggtctcacattatatgttccattctgcagaagagtcgttgatgcagaagcacctctggcaattgttgtcccagctagaggctctagctgcagaatgaagctgcgcgagaaggatttgtcttggaacaactttttgggaaacgcaagaaatttgaggtacacccagtgaattcaatactgttgtatcaaacagagttatgaaatgtaattacaacgattttgtttgagaaacacttagagcttgctattccaaattcccggagaatgatatatgctatacttgtttcttcagaggcgtggaatatgttgctgcagagaaaccagcaggagcttacacgaacatccttttctcatcaggaaccactggtattccaatgaaaagaaaaaggcatcatggtatgtagatgaggatgtcgtgttgaattaccaagttttggttttctggtgtaggtgagccaaaggctattccatggacgaacatttctcctctgaaatctgctgctgatgcttggtgccatttggatgttcagcggggggatgttgttgcttggccgaccaaccttgggtggatgatgggaccgtggcttgtttatgcttccttgatcaatggggcttgcatgggattatacaatggatcacctcttggtcctacctttgccaagtttgtgcaggtatgccattaaactatgcattctcatctcatggtttaagcagagagaaaaaccttaaaagagacaaaagcaaaacatattttgtgcaaatatttgcacatatcaaaataaaacatcaaaatgggatctatgattgactggatttcattgcatggttgagtctgggatttgggcagcctttaatttaccatatgtttatattctggggttaggatgccgaggtatcagtgctaggcgtgataccaagcattgtccggacatggcaaaactcaaactccacttcaggctatgattggtcacggatccggtaataccgaaagtgcatctttagaatgttgttaagcctgaattttgttgtggcgtggaccttattagatgttttgagaaaaagaaagttaattagttttaatgtatcatgccaccacttatttttttccagaaataaatctatctaagtattgttgctagttctttaaaaactgttcaacaaacatcttatgtagttgttgaagtcaagaagatttttctatgcagtagtaacattgatgttttatatttgatactttttcaatagttgttttggttccactggtgaagcttcaaacatagacgagtatctatggttaatgggcagagcacattacaaacccgtaatcgagtattgtggcggaactgagattggaggcagttttatctcaggttctttgcttcaacctcagtcgctggctgcttttagcacagctgccatgggttgcaagcttttcattctcgatgaagatagcaatcctattgtaagaaactttatggtctcatagatgatacagtatttcttctgaaagatcttacagtatgaaggttgtgtgatatttcctttccttcctcgttttagcctccatatgctgcaggagtaggcgaattggctctttgtcctcacatgtttggagcttcaagcactcttctgaacggtaatcacttcaaagtttacttccaaggaatgcccaccttccaaggacaggtaatccaacctttgtcatatttatacagaggttttcatctgttttaagtctgtgccttgcctgcttttcgatagatcttacgaagacatggggatttatttgaacggacttcaaaaggatactaccgtgctcatggacgtgctgatgacacaatgaatcttggtggtataaaggtagccttactgtacatcttcgtatatagtattgaaatgcacaagcctaacgcattgtcatcataatcatattctgtgttgattgttattgtgcaggtcggttctattgagatcgaacgagtctgtaattccgttgatgacagtgttctggagacagcagccattggtgttccacctcctagtgggggtcctgagcagctagtaatcgctgttgtgttcaagagcccagaattttcaaatcccgacttgaacctgttgaagaagtccttcaactccgagatacaaaagaaactgaatcctttgttcaaggtttataccaaaaacaaaacacaagagagttgaagttgttgtgtggctaatgtgaatgttttttttcatctggcaggtatcatctgttgtgactcttccttctctaccgaggacggccacaaataaggttatgagaagagttctaaggcaacagcttactcagactggtctaaactcgaagctatgaggcaatttctctctaataccaaatgttgggttttgccattcacaggaaacaatatttggtctttgttgtaagaatccacatccatgtctgtatcaagaaatgattctcaattcacataaataagagtggagctagtgtacatacatctagtgagatccttgtccctcaatttgaatctcaactttggttatgattttatttcgtaacaaaaaccatattaaataaaacttgctatccaaaacgcaacagaaaacaagaattatcaaattcgtttatcacctaatagtaacaagcttttgaccatgtaaaaaaagaaaattgatgattggggtgaccaattaagaggtgtactatttacttatttacgaattaggggtgaaattcgaatattttactagatacatggacataaacgcgaaaagacgaaagatgaggggggaagtaaattatctaatgtacgccaggcggcgcaagatagaacgattcgcttatctttcccttatttcttttctcaggggatacagagagaagccaaagctaatagaagcacgaacggcgtcgggttagtccgacggaggaaccatg

SEQ ID NO: 32631 - DNA, 3000 bp, Unknown
  misc_feature (1)..( 3000): 2750-1469P.txt file - cDNA_ID_3059439; gDNA_ID_1620333; Annot_ID_153701
gagtgtcgcaggcggagaaagcacagtcccgcgattcgtgcgtttcgctttccctcacgactagtgacgcaccgactcactgctcatgacacgtgctcacgtgaccccctcctatattctccttatcttttctgaataatctgattaaattagtacattcttctaattaattatttttagacagatctcagtgattaggtggtctattattcaagttgataaaaactttatctctatattgtctaatgtctatagcaatattctccttttttaaaagagttggactgtgtaactttttatgatactccatcagtatagtatttgttctttgtttacatagtcaaatggtcagtattgaccatatcttttcttaagttaaaactaatatccacatattctttttaataatgtatcaattatgcggatttaaatgttggtacaattaatattagattacacctccactttttttttttttattgcatcaagtaaatatccatattattgtatttgttttttcaatggaaacttgtttatattttcttagcgcttattgatactacattactagttttatacatcgttttgttacactcttttcttttcaaaacgatgtaactatgctaaagctaaatcatatttttgagatatgaagtttttaaaagttaaaaactacgaagctaagctagtacatagtgttgtgttttaaattttaatacatgcgtcgtcttgtagaaaaatgttgttgagagtaaaaattcaatatctttatatttttttacgaaaattatattgtagttaccatttgcgaaaattataatatagatttttaaaaggataatgatgggtcattgttaaaaacatatcaaatgactagacataaaaaagacttggaaacgttgaaaaaaacaagctacgaaaagattcgagcaagacattaaacacgacacagtaacttcctaacttcctttaatcacctaatttgaaaacaatttactaatttacctgagttcgaaattatttggtaaattatgaataaatatcaaatatgcaatctgacatctggttccaccatcgaccgtgacattcgcgtgcctttctagctctcgcttaaagtcttttatgctttctcaatttctggttttatctagttctaaagctccactagattttcttattttcttcaaaacttttaatttttctattaatatttttttacatgatcttcaaaatacaatacagtacatatatacacttaatctgccatattttacttatatctaacttcatgttccatggagcaaacaaaaaaaaaactgtgccatgagtttttaaatacttatttttaactgcttaattatacaaagataacgggaaatccttataaatttgtcaaacaagattaatagttaaaatgttttacgatgtttcacttacttatctttattcatgcggagtttacccaattttgaaaatttggagatgtttcatatgttttctcttgaataacacaaagcatgttttaagtaagtgtgaggtgaccacattccatctaggttggatatacctcctctcaacaggaggccaacctggacttccatgcatgtcccaataaaatgtacgtaatctactaaaagaacatataatcaagagttctttagaatgtcatcttcatgtcatctcgaatatccttctaaagtttaagttataactaaaacaacgtaacatgattgatcggaaaatcgtaaatggaactagttttgggccggattttaataatgtgtaccgtaatgtgttcattaagctacgaagcatacacaaaaccaaatttagatttttctatcttttttgctcttttaaacttaaacttaaactttggcatgaaccgttgtgagatggagatgaaatggtccacacttaggagatgaaatggtccattaaaaacaaaaacaaactattctcgggtatgtaattatgtgggagatgaagggtaaaataataatctaaaagagagatggtagtgagtgatgagaggggaaaacaaaaacagaaccacttttgtcatccctcaacacctacatttgtcttgctagccagaaagaagataatacttgtccccactgtctcaaattttctattttctatttttatttttcaattgacaaatatgcaattgtgacaaagtttattcatgttttaaatggaacatatttttcttttaacaaaacccgaaatttcaaactagttaaatctttttttttgtaaaatgaacaattttgaaaatcaaaatactttttaaaatcctaatatatcatataataattttaatagtgaattactatatcaaatttaaattatgatttaaactcgcataaccaacgataattaaaataatcaaaaaatatccaacgaccaaaaatttattaaaaaaaaaaataataatagtcatacaaatattttcggataaataatttcttcattaagtataaatattgaaaaataggaaaacgtgataaaagaagattaaaatttaagacaaaatatttcagtactaataggtggaccaaatatttatgaattgcaaatcgataagtggagatgacattatgacaatcgtgataaaccttaaaagaaataatatttacggatattccaaacaaataaataatattatatataaatatatatatccctaaacggctaaaccctaacttgtcgccgggatttcgattaacataattctgtttcactaaaaaagactcagaagaaaaaagaaaaagaacagtagtgagagaaagtaagagcgagtctgtggttgacaaaactcttttgctctcgcagagaaaagataacttatttttttttctttaaaatatttggaaacaaaagagactctgtctgaagaaagctaaagacttgtgatgattcttgacaaaagaaactgtgtctttggagaactctgaagtaagagagacagagaaagacaaagagagagacatg

SEQ ID NO: 32632 - DNA, 3003 bp, Unknown
  misc_feature (1)..( 3003): 2750-1469P.txt file - cDNA_ID_3059447; gDNA_ID_1620333; Annot_ID_153695
tcactttttacccgaggccattctctttcgtattgtgaatccttgatctgtgaatgtatggttctccggataggcccgtggtctggggtagcagcatccagacccagttgatgaagcttaatggcagcatcgaacagataatggtaacattcagcctggaagtgatagttaaagtttataaatagaaacaaacaaatatatgaacataacataagaaaatggcgtagaacttattgttggtttctcaactttcaaccaaatattgaagtaacttgcacaaacctgtgtcttagcatggatccaagaatcaccccaaatgtaaactccgtgattgcgtaccaacactgctgttgcttttggataggcttctatctgcaaatgagagtgaaatatgtcaaaactaattaaaaccattattttgttgcatatattcaattcaagcttcctcagaacaattagacttacagctttggtaagtgaatctgttagttcattctcatatgctgtgttctctatgattgggacaacaagttcatcatagtatccgtgaccttgaatcccttttatcatctccatgtgagttatctatgaaatgtcggacaggaagaaacattaaaatgcaaagtcctaactctactggggaacctggaattgtctaccaaataagcattacagcttacacggaattctttggcttgcggattcagcatcgtcacaagacaagattccatgccatgactgtgaataacagctccagcatttcgcatctcatatgcctgcaccacaacaaggttttgctatgaaacttattgataacgtcactatctcaatgttattagagattggacatctataaaatgagaagggaaatcatacaaacaaagcaagtcaatttggcattaaaacaacccacatacaacttgtcgaaacacaactcactgaaggaaaaagagattgtcttaacatacatgcaaatcatatataagtttacacattacaagcaatgatcatgcaacctcactgatcaactgaacccaggaaagatatatttgatagtctaaggtggttctttaataagtaaagagaagttacaaccaaaactccattttcaagagtgtttgtgtaaacatcaatacgctctaaatatcaattcatttttctgagcccattgtgtttagttctaacacttcactactgaatccatctcaaccagtgcaacctagtgggtattctatgggtcgaagaaacccacttgacacatccaacgaggggattattgctcaaattggacaagttttaccttgtaaccgagttttcgcaagcgtttccccaaagaaagtcgcctgttctgcacttttttttggattgtaatccaacagtcattagcaaacaacgtatttgccattccagtaaaagatcactagctaaatgggaggaaggacaaaataccactagaaaagagcgacgagctcttaacatatttcgttcataaccatgtgctctaagaaaaatccttcttaacagaaaacattataacttgaaatccgtaactgctgctcaacactttgacgaaatccaacattgctcaacaatttgagaaaacaaaaaatgcacaatcatcaaagaaaataccataagataaagaaggccaatagcaaagtgataatcaagctacgtatacagaaatccctaacgcagaatcaagtattactaccttgaaagcgacaaaaccataccttcatgaaaagtggagcacaatcggtacacttgggaggcttatttgggtatggctttggagagggtgtagatatgatggatccattagcagataagatgtacatatcctcaggttgcatcctctccttttgaacaccttcaaacacaacaagaatcagtaaaccgtgaagcaaataaaataacacatagaatcagcattgcaagattttcctttccattcaacatcttgcattgttaagtcgctaatgattcaaatacacaaagagaacgcttctaagcattgaaagaccaaaccaattctccacaaaaagagtgttaccagtgattttaaatacacaaagatgatctctagaaacagaaactttaactgataaacgcattacgcatagctcatatagcaaattaaaggtccacgagaacaaacacatcaactcaacagagcaacgacacatacatcagttcaaagatgcatcaaaatgagaatcaaggagaaagaaagtgactttaagatgtagagaacctgaaggagacatgacgataagttgctccggtttaggaatcgaagcatcatgaactttcatcgttatgctaccgccagtgccagacacccaaccttgagtataaaagtgacggcagagttcagtaaccaacgaactcgtctccttcacctccttcccttccagatacgcctgtggcaacccgatcatcgccgctgcagccaccgccatagattctcagagatagagaaagaggtatagagattgaaagattagagctttgtaggggaatgaaacgcaggtttatctggcgagctttcctttggctgctttcagaatatgattcctttttacaatttcccttaatttttatttaatctaaaggtccaaagtttcgtaaagtttgcatttttaagtacagcatgtttcttgctttagagttagaacaaacataaaaaaaaaaaaaaactttcatagcaaatttcaatattttttttctataccacggcgcttcctccgccgtatcttcgccgtcatcgccgcaaatatagaaaagacgctcgatttggggatttctcaaattaaactccttgtcgtttttcttacaaagaaacgacacgtagtctaattagaaggtacatgtttggtaacaaagaataagtctaatccaaaaccgagataagaatagtgtaaaaaccactcttgaaacctcctcttcaaaaataccagagagcgagaaaagctcttatcttcttcatcttctccaatg

SEQ ID NO: 32633 - DNA, 3000 bp, Unknown; identical to SEQ ID NO: 883
  misc_feature (1)..( 3000): 2750-1469P.txt file - cDNA_ID_3059451; gDNA_ID_1620333; Annot_ID_153694

SEQ ID NO: 32634 - DNA, 3003 bp, Unknown
  misc_feature (1)..( 3003): 2750-1469P.txt file - cDNA_ID_3059469; gDNA_ID_1620334; Annot_ID_153732
ccgcaagttgagcatcggccgttttcggctgaggaagacgagacgatcgcacgtgctcacgctcagttcggtaataaatgggcgacgattgctcgtcttctcaacggtcgtacggacaacgccgtgaagaatcactggaactcgacgctcaagaggaaatgcggcggttacgaccatcggggttacgatggttcggaggatcatcggccggttaagagatcggtgagtgcgggatctccacctgttgttactgggctttacatgagcccaggaagcccaactggatctgatgtcagtgattcaagtactatcccgatattaccttccgttgagcttttcaagcctgtgcctagacctggtgctgttgtgctaccgcttcctatcgaaacgtcgtcttcttccgatgatccaccgacttcgttaagcttgtcacttcctggtgccgacgtaagcgaggagtcaaaccgtagccacgagtcaacgaatatcaacaacaccacttcgagccgccacaaccacaacaatacggtgtcgtttatgccgtttagtggtgggtttagaggtgcgattgaggaaatggggaagtcttttcccggtaacggaggcgagtttatggcggtggtgcaagagatgattaaggcggaagtgaggagttacatgacggagatgcaacggaacaatggtggcggattcgtcggaggattcattgataatggcatgattccgatgagtcaaattggagttgggagaatcgagtagacaaagtgagattattaggaaactgtttaaattggagaagaagaaaaatgctctgtttttttctcctttggattaggcttaagaattttgggttttaaggaaatgtatagaggaaatcgagtgaacaaagctcgagagctggggacgtagtgacgaagacgaagatcaaatttctcttaagctattcaggaaaataaaataaatttttatttataactacgcttaatgatgataatagatcaaattaatacacaaagtatcacaaagtgaaagataaatgatccagttaaagaacaagtttgtcgaggattggtaaagacttgcatttggcaactaaaggcacagatttgggcatggtaagaccctttccttccgacatgtcaacggcaacgtcattgtctctctcccaatcgaaacactggatcaatgagcctaaagctaagctcagtactagttgggccaggcccataccaggacatgctctcctaccgattccgaaaggcagaaacttaccacgatgggtctctgattcaaacctctctggtttgaaagtttctgggtcatcccatacatttgggtctctctgaatagcccacgcattgataaatagccaggtgcgacgtggaatgtcaaatccagcgacttcacagtcagtggatgaagcgtgtgggacaagtaagggcgccgccggaaacaaacgaagagtctcagagatcacattgttgagatagggacacttgccagtatctgattcctcaaacacacgcccttctttcgaaacctcgtttagttccgttttgagtttccttaaaacttccggatgatttagaaggttagccatagcccactccaacgtcactgcggttgtgtccgttccagcaagcaacatcacctgcaatgaatcctttgaatctttgatgaatcaatcttgatcactcctattaacgattcaaaattataggaattaaaaactcatgtacctgtacgagccctttgatgatatcatcagtgtaacattcaggttctgattcttgaagagacagcaaacgagtgatcatcgttttctcaagctctgcttttcctctgtttttccgatgctcgtcgactaatttctgcataaacttgtccaatttcgaagcgagtttctttgctctctttctgtatccatcaagatcaaagagcttcagagtcgggagaaaatctccgacataattaacaccagcgaaatcgaacacctccctaatcagcttccgaacttccttagtttcctcgtcttcctctcgttttccagcgaccatgctcattaggatgttatacgtaagcccataaagaaacggctggagtttcaatctgacactgcctcctgatgttaccagttccacgttgatcttccgaatcatagctctcacttcgtctctccgtatatccgaaaagtctctgagacgagcggtggacaagatatctacggcgcagaaacggcggagtctgcgccaatgctccccgtacggagctgtgctaaccagcgtgttgttgtaacccatgtattcagttaaagtagcgagaggcctgttggcgaaaacaacatcgttttgctgagataagaactcctccgcagctgaagctgacgttacaaccaccgctcgacgagagcctagccggagaataaacacgtcgatgccgaggtttcgagagaggtcacgaagggaacggtgaacaggttctttgagaaggtggaggtgtccgatcaccggaaaacctacaggatttggcggtaaattcttcttctgctttgatcggaaaacatacgccactgcaatgaatccggccatgagagcgagtagaaacaaatcaatcatctcacccattcgtgaacacataattctggagactagtcgcatgattctggagagtagtcaaaaaaataccagaggtctcactattataatatacgagggagcgaaaaaaagaaaagaaagtgtacatagttctggagagactagtcaaaaatatacgatgggttgggccgaaaaatatgaagttattggttattgataggcccattacgataatctagtgatttggttacccagtaaaggtttactttttgtcggagattgcaaatatcatgtgagaagagtttataatctcgagaaatctttttgggcgacgttgtttgctcggagctctttctccgatttgtctccattttcggtgatttaaagttaggatttggctgtggagatg

SEQ ID NO: 32635 - DNA, 3000 bp, Unknown; identical to SEQ ID NO: 889
  misc_feature (1)..( 3000): 2750-1469P.txt file - cDNA_ID_3059473; gDNA_ID_1620334; Annot_ID_153731

SEQ ID NO: 32636 - DNA, 3000 bp, Unknown
  misc_feature (1)..( 3000): 2750-1469P.txt file - cDNA_ID_3059477; gDNA_ID_1620334; Annot_ID_153728
taataattcaagtttttacgtaaccccaccaaacatttgaatttataccttttgagttatatatctacatttttgtcgatttgttgataatctattagacatcaggagtttaatactttgagtgaatttgataattaataatgccaagaggttattgtgatgggaacaataagctctagatgtaaccttgcgtagttattatattgggtttacgtgttcgtttgtgagactcaactatactactataaccttgctcgttgtttctattatcaatggtccgagtgtcggttttggtctccttgttttaaatattttattgaagtcgttttacaattaccaacttttccttaaaccaaaaaatagatcaataatggttttgattgatgatattgatggttgattgacggtgtcttactcactcgaagattagacaattaccaaaacgattttattcgtagtccaccaaaaaaacaaatcaactgtgatcatttttcatatctattataaatgactactatagtatgacattttgaaaacatttgtaacgaataatcatcacaacatatagtaaactgaaaatataacatgcaacaatctaaagaaaaaacctaaaatacacaacgtacagcctcaattattgaaaatattttgttttctggtatgataaattttgtgattgaaacgaccaccgagaagttcatatgaacatagaaaacattaaagaaaacaccgtccatatattattttatttaagacacaccgtccaagattacaactgtatatttttggaccaaaaaatcattgcccctcttgtggaaaagagatagtggtgcagaaaaaaaggcacgtggaacatgacctaattcggctaaatacagttttaaaattcaaaaacttacgataaccggacaaagatttaacagctgttttccagtatgtccacgtgtccatgaattatccttccacgtgtaagtttgagtgacgtgtcatgctaattattcttaacaaaggcaaaactactcttgtcttgttcctcctgtcgtgtaagctagcaactgtaattttgctattggtctactaacgtgtttagatattcttccacttgcattaccttttctttttattcgacattatagaatgtattaattgttaacggtttagggaaactacttaattatatggtttacaaacaaaaaaaaaacataatggtgtcaacaaaaaaaatcacaaaggcaataaattaaagaaaacaggtgcatgtggttcgtttacttagttgcatagaatagaaagatgctgctacaaaatatccttccgtgttctcgcttatccttaagccgtatgcacattttgtaccttcaccttccacacgtgtgcatgtatatatccacacgcactacaaatctgcattaatggtacggtcatcgttgaaacgactacgttcggtgaccttcgtgcttaagataaattttgttggtcttctgatgtatatgcttaagccacacacacctaacaccttcactaaagcttgattgaaaagcgattctttgttggacgacaaataaaaagttactcttttcttcttctttttgtatgtgtggaatcaaaacgtttaatttttgtacctaccaagtactatttcatcttatatgttagaacttaccgatttgttggattttttagaattctgatatcatatgatatttccaaaaaaacttatttaaagatttgctttatttcgtcttcaaatctgaaatttatcgtcaactttgtaaatcaaatgttaaaaaatttcaaatgtagaattgggatattaaaaacttgatcattttgataatatctatatactataactctataagataatgcatggaatcacgttttacgaccaagcatcataagagtcatgaacgggcaaaagcgagggcaatataaagctagaaacaaaaggacagattactacatgaaagtgtgtgaagctttttccccacattggccgccggctttttttgacttaattaatattaacaatactctctacactgttttttctgtcaataatagtagtatatgataaatattcttttcaaaacaatacttctcatgtggagaaaatatcgaccacatcatcaactttcatgaacaatgatcaatggatcgaccatcacacttgctaaataagaaaggcataagaagattatgttgcaaattattaattgaaactcttggatcgataaatattccatcggatttgaacatgaagataatgtgtgaacgattacattttaggttttcacctttttagagtgcagtaaatgtgtgattaaatagaaatttgcttcactaaaaccaaaaaagtaagtacaattctataaacagttcattattttatatatatttttatagaattgcagaaactttccgtatagtaaacaagttcaatgaacacaaagaatgaaagaagcttctgtttaagtagaggaataaaatgattataaacagagcgaaattatatgtaatattataagaaaaagtttcggcgggtctatctaactgaaagttaacaacatcacagtacctactaaaaatatattgaataataatcattaggagtgtatgtgtggttgatgaaaggccgaagtagagccgccctataaatgggcttttgtcgtcaaagtggtggagcccaattttggaatggcctatctgattgttagttggtcatttgtccttttcccccataatttatttcaacaagtccttttcaacttcttaaaacatctagaatcagaaaactattcattgaaattcatacagagaatatcagttatcacttatcagctactaaatatcataggaaacacagtaacacacaatagcgtagagattatacaataaatgggcttcaaaagatcagcccaaaaagaaactaagcccaataaataatttctaactaacgtgtggactcggtgagtcatcatctatctcatctcggtgatg

SEQ ID NO: 32637 - DNA, 3003 bp, Unknown
  misc_feature (1)..( 3003): 2750-1469P.txt file - cDNA_ID_3059492; gDNA_ID_1620335; Annot_ID_153764
cacacaattttttgttggataagattctagtaatgtgtcaatatttcaaaggaaaactataatgccgacagacacataacttgatccacaaacttccattggactaatctactactcgatttatcattcagttaaaagcaattctatacaatgaaagttactgcaagtttgacctctcaagatttaggctaacctgacaaaacagagcaaaatcttacaagatttaggtttaaataagacgtgtaggaaccaagaaactaagaactacatgagatttaagatggttcttatttcttcatcttccatacataacttaaatgtgaattctacaaatgattttcttcatctcttttctttacatttgattccattttatgtttgcaaataatgagcaatcacaacaactgtaaaaaacatcaattcaagatactccttttcagcttcggtcagctatttggttgttcgttattggtgtccattgctgacttatccatctcatcatcagaatcaatgacattttcaaagtcataatatggatgcgcctgcacatttaaaaaccgatgtcgctatgtatgtgtatcaaagaagtaaaacaactcgttggttcattatcagcatcgtaagttagttacctttggtcgcggtttaacagcttcgaaactatgaaattgaggatccgagaaatcaggcgcctgcaaaataatatatgctcctttgtttttgtacctctcttctgttgcctacaccacacacaaaaatgattgttaacgcatatctttagaaaatgcaaataccaaaggcgtaaaaatacatacttggaattgcggatagtcaggtgcactgaaaatagtgataagctttccggattcgacattgtggtctattgtatatccattgtccattccaccaagaccagttctcttctctctagcatctggaccttcatgtgatctgatgatcaactgcaccaataagtgtaaaacatttgatccaatcatccatatcagtatttgggaagcaaacaagcatcaatatctactttggtgtcaccttcagttcatatttcttcaaaaaatcctctgtacaatcgggaccccaaagaagaccaatgcctctctgttcatttggtgaaaggcccggagtcattgaaggatcagaccataaaacgtctcctggtatcaagtttgaaccttcccaaggaggatcaagaactgatcttcgagcttgcatcaactcatctaaggtaccgagtttcattgagctcggctcaggttccagaagaactacccgacggttctttttcccccttgttgttcgcttaggcaagactgggctgcggaaaagccctccatgtgctgtataaacacgtccagaaattatggaagccaaaggaagaccttcaaagcaacccaaacatttccggtacacatgttttcccttgtctccgtattttgtaagcacttccttctcgaaaccatacatagatgtacaatactttgactcatgattaccacggagtaggtagactctgtccggcatcaaaacctaaacaaccaaaaagatatgtgctttaagaatactaagacttgagccaatagtaaaacagcttagtaaagagtttaccttccaggacaagagaacaaggaaggtttcaagtccccaagcaccgcgatccacatagtctccgttgaaaacataacaccggttttgacaaggaaagccagtatctttcaataggaaaagaaggtcatgaagctgaccatgaatgtcaccaaccacaacaacgttggatacagagtcaagatcatcgatatgaacgcagttacgttctttgtggaggattttatgagcggtgaggacgagggaatcaaagacgttgacaggcaatagtgaaggtaactgggaaggaggtagattccatgaagaccattcgaaacacgacataagcccatgtacccagtcgttagtgagagctcccccatctggccatgtaatgggagatggtggaacagtttccattaaaactgtaaaaacactaatctataatcaattccagagtatgaacatgtgaaacaagagtatcaagcaatcgaaacatagacaaagttttcaaatttcagcgatcaaagccaccagaacataaaatcgaatctgtatatattcattcgtacatctttaaactcaagagaagagcaaaaagtacaaaatcgaatcatgggaaatcgaaatccatatcacaaagaataattcggaacagagtgagactcaccggctaagagtggagacaatttacaaaattccaaagcttggatcttggacctagctaagctagcttactttgctttctctctgctttcagtcccgacaccgtcgtcgacgagatttaggatctgtctggctttggatccatttactcaaacgacgtcggttaaccagctaaaaggattcaaatcaaattcatgattccaaaccggccggtttaataaacgaacaaaccttttttgtcgtgacgctgcaatagcgttttgcaatcacgcgctatcgaaaacgcgagttcgagattttgttaaaggtggccaaccggtttgttctggttttgatataaacttgaacaaaattgggagaccgaattatacattggtctattcggttacttatcgatttcagcttgattttgtttacggtactatccaaggaatttttgtttggtttcgatttttttatttttcagtgtggatgaaatcaaaccgactaaaatcggttcgatatcgatttttacattttttcggtccggttcatgcttttcctctattttgagatatttgtactgaaaagcagaaagagagaagaaacacaaaaattggactttggtttgaaattggcgacatttttgggaaatctagagactaataatcaatttcgtcaaaagatcaaatcttgctaaattttcttctgctcgtttgattttccgaatcgttggtttcgataagtgaagaaaagatg

SEQ ID NO: 32638 - DNA, 3003 bp, Unknown
  misc_feature (1)..( 3003): 2750-1469P.txt file - cDNA_ID_3059492; gDNA_ID_1620851; Annot_ID_170330
cacacaattttttcttggataagattctagtaatgtgtcaatatttcaaaggaaaactataatgccgacagacacataacttgatccacaaacttccattggactaatctactactcgatttatcattcagttaaaagcaattctatacaatgaaagttactgcaagtttgacctctcaagatttaggctaacctgacaaaacagagcaaaatcttacaagatttaggtttaaataagatgtgtaggaaccaagaaactaagaactacatgagatttaagatggttcttatttcttcatcttccatacataacttaaatgtgaattctacaaatgattttcttcatctcttttctttacatttgattccattttatgtttgcaaataatgagcaatcacaacaactgtaaaaaacatcaattcaagatactccttttcagcttcggtcagctatttggttgttcgttattggtgtccattgctgacttatccatctcatcatcagaatcaatgacattttcaaagtcataatatggatgcgcctgcacatttaaaaaccgatgtcgctatgtatgtgtatcaaagaagtaaaacaactcgttggttcattatcagcatcgtaagttagttacctttggtcgcggtttaacagcttcgaaactatgaaattgaggatccgagaaatcaggcgcctgcaaaataatatatgctcctttgtttttgtacctctcttctgttgcctacaccacacacaaaaatgattgttaacgcatatctttagaaaatgcaaataccaaaggcgtaaaaatacatacttggaattgcggatagtcaggtgcactgaaaatagtgataagctttccggattcgacattgtggtctattgtatatccattgtccattccaccaagaccagttctcttctctctagcatctggaccttcatgtgatctgatgatcaactgcaccaataagtgtaaaacatttgatccaatcatccatatcagtatttgggaagcaaacaagcatcaatatctactttggtgtcaccttcagttcatatttcttcaaaaaatcctctgtacaatcgggaccccaaagaagaccaatgcctctctgttcatttggtgaaaggcccggagtcattgaaggatcagaccataaaacgtctcctggtatcaagtttgaaccttcccaaggaggatcaagaactgatcttcgagcttgcatcaactcatctaaggtaccgagtttcattgagctcggctcaggttccagaagaactacccgacggttctttttcccccttgttgttcgcttaggcaagactgggctgcggaaaagccctccatgtgctgtataaacacgtccagaaattatggaagccaaaggaagaccttcaaagcaacccaaacatttccggtacacatgttttcccttgtctccgtattttgtaagcacttccttctcgaaaccatacatagatgtacaatactttgactcatgattaccacggagtaggtagactctgtccggcatcaaaacctaaacaaccaaaaagatatgtgctttaagaatactaagacttgagccaatagtaaaacagcttagtaaagagtttaccttccaggacaagagaacaaggaaggtttcaagtccccaagcaccgcgatccacatagtctccgttgaaaacataacaccggttttgacaaggaaagccagtatctttcaataggaaaagaaggtcatgaagctgaccatgaatgtcaccaaccacaacaacgttggatacagagtcaagatcatcgatgtgaacgcagttacgttctttgtggaggattttatgagcggtgaggacgagggaatcaaagacgttgacaggcaatagtgaaggtaactgggaaggaggtagattccatgaagaccattcgaaacacgacataagcccatgtacccagtcgttagtgagagctcccccatctggccatgtaatgggagatggtggaacagtttccattaaaactgtaaaaacactaatctataatcaattccagagtatgaacatgtgaaacaagagtatcaagcaatcgaaacatagacaaagttttcaaatttcagcgatcaaagccaccagaacataaaatcgaatctgtatatattcattcgtacatctttaaactcaagagaagagcaaaaagtacaaaatcgaatcatgggaaatcgaaatccatatcacaaagaataattcggaacagagtgagactcaccggctaagagtggagacaatttacaaaattccaaagcttggatcttggacctagctaagctagcttactttgctttctctctgctttcagtcccgacaccgtcgtcgacgagatttaggatctgtctggctttggatccatttactcaaacgacgtcggttaaccagctaaaaggattcaaatcaaattcatgattccaaaccggccggtttaataaacgaacaaaccttttttgtcgtgacgctgcaatagcgttttgcaatcacgcgctatcgaaaacgcgagttcgagattttgttaaaggtggccaaccggtttgttctggttttgatataaacttgaacaaaattgggagaccgaattatacattggtctattcggttacttatcgatttcagcttgattttgtttacggtactatccaaggaatttttgtttggtttcgatttttttatttttcagtgtggatgaaatcaaaccgactaaaatcggttcgatatcgatttttacattttttcggtccggttcatgcttttcctctattttgagatatttgtactgaaaagcagaaagagagaagaaacacaaaaattggactttggtttgaaattggcgacatttttgggaaatctagagactaataatcaatttcgtcaaaagatcaaatcttgctaaattttcttctgctcgtttgattttccgaatcgttggtttcgataagtgaagaaaagatg

SEQ ID NO: 32639 - DNA, 3000 bp, Unknown; identical to SEQ ID NO: 907
  misc_feature (1)..( 3000): 2750-1469P.txt file - cDNA_ID_3059506; gDNA_ID_1620336; Annot_ID_153800

SEQ ID NO: 32640 - DNA, 3003 bp, Unknown
  misc_feature (1)..( 3003): 2750-1469P.txt file - cDNA_ID_3059514; gDNA_ID_1620336; Annot_ID_153797
agctttgtggaaacatgttattcatgatccgcttgctcatttgtttgctggagagacacatttgagaaacctacacacaaagattcagactgaccgtctcaacaatgctcgagaggtttctggtgtgatcctagccgttcgaactctctggtttgacacaaggattcaagctgctctggagtctttccacggcgatgcagcacaggttgttctacttggtgcaggtttgttttcccctgtttagacattttaacttatgtgtgtatatatatatgtggagcatgagtttaagataagtagccaacatagaatgatgtaattgaatttcaggaatggatgcaagatcatacagactaaactgcttgaacaaaagtgacgtattcgaagtggattttcaagatgttttggaaaccaaagcgagcctagttcaagctgcagtaaactctagagatgagcttaggatgacagcgaaatcactagtcagagtagcaattgatatcagagacaacgattggtttgaacagcttaaaaaatcaggttttttgccagagattaacacggtatgggttctcgaaggtattctctattacctgtctcacacagaggcaatgcaagtactaaacctcatagctgagaagtgtggactaaccagcacagttctcttggcggatttcatgaacaaaccatcagctacacttccaaactctgtgttccacttttacagtgactggcctgatcagctcttaccaactttgggattctctcatgtcaagctttcacaaataggtgatccagatgcgaatttcggtctgctccacgatccacggaatctcttcaacaaacttctccgcctgccaaggactgcacaaatccatccagatgatggaaaaccatgctgccgtttgtatttggtcgaagcttccggttcaccgcctcaagataaccaagcgagcttgtaagctccttccggacgtgcatttggcactgcacgcttttgcagaacagatatatatgtgagtctttcacactagagaaattgtgtaggaggttaatgtaatttgatgtataaacgattgatatgaacaattcattatattctaaactctaaagttctatatttctatctgcttgaaaattacaacgaagaaagaacgcttgtcatgcctttcgataactagcatgatcgtccttccttactgtaactcaaacgatgaatgaagctcagcatcaagcataagagtatattcatatagaacgagatatcgtctctcacttagacagttgtaaaaaaagttggtacacctattcagccataatgatttcacaagaagaaaaggaagagagaactagacttcatctcaaatctcaagacagtctttgacacccttctcaaatttgtcaagataagagatagtctctgtaaccccatctgcaactttttttctgcaaaacaagttaaaacattgtactgctttagtgacatgagagataccaaatcatcatacaaatatagtttcgagtaacagagaacacatagaagaaacggatccctttaatcatttcaatcactaacctatcagaaggaagattcatatcaaccccattcgtcaacacgataagggaaccgaaagacctgcgatataaagtaagtgcaaaatcaacaaacaagaaccataaatcacagcatttgcatcacatttctataattcaacaaccaatttcattacacatttcaatagagagtcacactagcacatacctaacaagatcatcaagtatattctctgcttctaatttaactggatccttatcatcaagtaatgaagcagcattcttcacaacaagcttaaatgtacaaacctaatcaacaacatcatcatcatcatcataaaaatcaaaactttaatgtcattcataactaaaacccaaaactttaagatcaatttaagattctagaaacctcaactccggatttagattgaaaatcaacaagagagcttctttctttaggaacacaatctcttgcagaagacttaaacagattctgcagattctccaaatctttctctgtataatcagattcactagttaacgaaagataagcagattgaagagcttgacgagttgcatcaatgggagcaagtaagaatcttgaagacttcttcttctgatctttaagccactctttaggtcctgctgtgtgagaaaattagtttttttttcaaaattcacaaatttggagataagatcaataaaatgaagagtgagtgagaagtgtgttgtgtacagattcctaaggagaaggcgaaagcgggattggtgggggagagagtgaggagaagagaagtggcggaggagagaagaacggtggcgtctcggcgagagataatctgtggcaggtggtcggagatttgtgcggcggcgattggtggtggtggtggaggtttagtgtttgaagagaagaaaggttgagaaattgggataagacgagccatggcttaacattaacgagctaagttatgtgtacccgctcatgtggtatttaccaatggtttcctttttgaacagatttttgtcttgtttttaaacacaaaacgacgtcggtttgtgaacataataaaaatgtaaatgttgacttatctttgctaaattggtccgtcagctaaggatgtaccttatttagcaaaattaacgaaaattaacgatttaattgaaaatcaactaaagtttaaaattaaagtcatcctactcaaaattggtgctttgtttcaccacttttgataaactggtgatggtttttatgacattttttccagtaataaaaggggtagttatgcaatttagtagaagttaaagggtttctaaacaaacttaaaaaccaaatttttctttattgctttgctcgagagtgcctgcaactgcaacagttgagattttgagcgtgtcaaggattctgattgataacgatattcaagttcagcaatctcattgcagtagaaaatg

SEQ ID NO: 32641 - DNA, 3003 bp, Unknown
  misc_feature (1)..( 3003): 2750-1469P.txt file - cDNA_ID_3059522; gDNA_ID_1620336; Annot_ID_153795
tctcattacatgactatataagaacctagttacatgaaacatttcatgggcttttttagacttatcatgagattcgattttgggtttcatatggatccactaataggatatatatatatatatatatatatatatatatatatatatatatatataaatcctcaattttaactatcgggtaatctttacgcaaatatttctatttactcaatagttataacctctacgatgagattaggtggcttaagacatgtttcacgaagtgtcacctaaactaacacttagctaatccacaaaggacaaatacattaagatctatctcattcaaattctcatttttgacttgcctctgctctctataacttttaatccctccaaactcaaaccaaatcaagtctagaatcgtgggggccaatctcataggctaggtactgtttacaatcttctagagagatatttcggatttcgacagagaataattgattaaaaaaaatatttgttttaatgttaagcttaatggtgaatgtgtggtactttagtttgtgcattaatggtatttgtaacgtctgtatcccggaaaattagaagatttgagtttatgtcggaaattggaggggaatctgtttaattccagttggtttagtaagcttattattaaaccaaagaggaaattgtttaattttggtaatcctaattcctgtttaatttaagttgactgaaaagaaacttaagcctatttataccctataaatcaaagaagccctagtgatttctcataatggccaccttcaaggagagaaagagagaggctgatttttggttaaaagaaggaaaatagcttcctcaaaaagggatttctagacagattagacacgccattctagagcagatgtttggtctatataatcgccttgtttggtaagaaaatttattgacttgtagcttagactcatacctatatattgatatgagtcaatattctaagagttatctgtggtttagtgagctattctgttttactcgtgatgtggaccagcgtgtatttaaaggaagaacgcgagtgaacttacggttggatcgtcatgaaactttggggacaacttcaggaaatctaggaaaacaatttcaacggtgcgatttgaaagtggacttttaaatctcgttgcgtgatctcatctttcaggctgaggattctgttagttttctagaatattctagtttatgttaaatgttgtttttgtggttggctatatggtgagttgatctactgttggtgagtgggaagttactgctgattgtggaattgttgtttttggtacaaaaaacatcctcatttcaaggtgtgtgcgcgatcatgtgtgacttatttgttgttaagattgtgtgacttgtttgttgttatatataggctggattttttatggatccataatggatccctgcgattgttttgtcaatagatgttttggtttgtttaatgatttatgtgtttattgtgatcttggttttgcttgtgtgtatagatcgtagatgagagaatcgtctcaataagtatttatgcatctctttttttatggtgcatgtaaagataaagtgtgaatcacaaacaaataaagagatgcataaatttgatcaaaaatacttaggcgatcatcccatctacgtgttatacacacaaacaaaccaatattacaatcaacacaaaaatcatgaaacaaaccaaactaatgaacaattatctattgacacaaccatctcagggattcaattttggatgcatcaaaaatccatcctacacatcaaaacaaacaagtcaaacaatcttaacagtttagataatcttatggtcacacacaccttgaaccaaatatgatttttgaacaaaaacagcaatcccacaactagcagtgactttccacttgcctaggtggactggtttgttttataattatccaatttaagatgtacttttctcaattcttatacaaaaatattttgtttgaccacaaacatgcgtattgcttgggtttattttcctaaagaacttgataaattgaacatcatgatgttgaatcctgaaatgaaatagcaaacaaatttaaaacttctcaccaatgtcttaagacaaaataatcgtacgattgataatgaaacgttttaaaagaactaaacttgtggactgaaagtagaattggttgtttttcagttaatcttagtgtcatcatgaccgtgagacatatttgttattaataaacaataattgtggtagcagaaaatttgaccaaaattttggttgcaacttgcaaccatcgttactagtctaatgcttactggcaaaaaaattcatagtaaagaaatgtaaactagtttttttcaggtgattgtcaaaaaaaaataaaaaaaaaaaggtttttcaggcagaaaattaaagcatgtgaataagtttattgtcggaattatgaactataaacctatctacttcattcttgaaaatttaattgtattttaattaacttttgtcatacattaatattttgtaacgtataaatatttaaaaaaatggtttctttttccaaaaatttaaacaaattgatatcatttttttgtgtgaatgaaataaaaagcaaacaacaataaaacttctcaccaatttcctactttggacaaaataatcgtacgagtgataaagaaacgttttaaaagaactagaaaaactagtggacactcgagctctagatttagttggtcaaaatcattaagtaattggaatagtggaaggggttaaaagaagcaactagagagtggagccactcgttgctctcttaagaggaaagaaaaaagccagtggttacgcaatgaagaacgtatgcttttgcttctaagcctttggttttttatgtgtggttctcttttcttatctctatgaaccaacaccaaacattttccaacattccttcattatatatcagaacaaaacattattcgttcatgagagaaacaatg

SEQ ID NO: 32642 - DNA, 3003 bp, Unknown
  misc_feature (1)..( 3003): 2750-1469P.txt file - cDNA_ID_3059527; gDNA_ID_1620336; Annot_ID_153785
caaaccaatagcaaattaaagtaacactctttttccacataagccaattcgtacataatcatctcaaaattcagatcctttttgtacaacttcacaaattaatcaagcttacgttgtctaacaccaccaataactttggtagtaggatccaatcgattcaaatttccttcatttttcttactaggactctctttcccattcaaatctggtttcttcaagtcactagatttgaatccgatcctcgttgattcaaatacaagcaacccaacagcgagaagaaaaactaagacgacccagtatctcacaaaaagccttagaacatgacgaggaagctcgtagctggttctgtgactcactttcttccgctttcgtcgggtacgagctcggatccgattcaaatcgttagattcgtcgtcagatactgagatcgagacactgttgttgttgaacattgttgtggtttcgaattgtttaggatgatctttggaattggtttctcgaaaacgaaagagttgagcttgtcgtagtagagagagatcttcttcccttagaatcgaatcatcggtgtttatcaaattgaacgaacccgattaaaccggtttatgtctcaataggatgttttagagattttattttgtttcattatatatgatgttatacaactttctatgcaatttataaatgatttggtatcttatgacttatgagttatgattatttctatcatgcaatcttgcatatcattagttgagtttgctaaatcaagtattaaaagatatttttaacgaaataaataattgtcttaaattgttagcttttaagtaaaacatcatataatttaaaatagaggtactaaaagttaactgttataactattttaagtttgttaaactttataaacgtcttaaatatttataatattaaaacctgaatgacattcaaataatataaatagtttaactttataagaatttataagaagtttaaacattataaatatttaaaatatttaaagtattcataatatttacattctataaaaagtttataataataatatttaaactctataacaattaaaaataaattttatgaaacttttttggttcctttgtgaaaaatgcaaccggtcaaaacagaaaagatacgactgtagttgaacaaatataactgtccaaaaaacccgtaaataacgaaaatatacgacaaaaaaacactaccgtaaaacaatgaccgtaaataattgagcgaaagttgcgataaaaaacgtaaccgttgagaagttcaaaagatacttgagattgttttgttattagattccaaaaaattttagttagactaagaattagagaaatttctttcatattaaaatgatgtatatttaaaataacttcgaaagtaaagaatttagatccattttacaaaaaaaaaaatttggattcatcataaataatcggtgtgaaggaacaaaaatatgagaactatttaggaagaaggacaaatatatagagttcaaaactcacgaacatttaaataaactactttattcatacgaaaagttgtgaaaaaagcagaaaatatataataaagagacgttactttaaatgaatagatgcaactataaagaaacaaccgcaaactaaaaaaattataattgtagttgaacaaatataactcaatgataaaaagataaaccgtaaactgaaaagatatgactgtatttaaattaatataactgtcagaaaaaaataatcgtatataatttaatgtaaagatgcgataaaaatatacaactctaaatacttgaaagaaatattgtgataaaaaaaggcagctattcagaatttgagatgcaaaatgatacgaacttagttgaacaaaataactgttcaaaacataacaataaatattataaaaagatacaaccacaaaaatataactgaaaatattttaataaaaactaccaaaaaaaaagcgaaagacatttattcagattatttttattattaaattataacaataagtttacttattctcaaactcttatctataatactgatgcaacctggaaggatgatcatcgtgcaggttttggatagatcctcaaaaaccaacatggatcaagattttatggtggaaccggctatgcggagtatgtcaattctcctctacaagcggaagccttggcgcttctctttgccataaaacaagttcgccaactcggtttcaaccatcttacctttgctactaactcttcacaactcgtcaaaaccatcaattcggagactcaattcaaggagctccatggaattcactttgatatctttgatctatcctcttcttttaccgtttttagatgtgtttttattcctcgtttgcaaaacaatttagtagattcccatgccaagaaggtcttatcatcttctgtaatgggcctagcccaatcttagagcagaaacgaattttttttttttttttttttttttttgtctaaatgcagaaatgaaatctatgttgcaaaaacaaaagtttccttatccccaaatcgagctgaaatcttcaagagtgtgtcttcatttatctactgttcatcattctcgtttaggacaagcaacgaatgttaaaacgggtagcctgattaattagttttgtttcactaaacgaaaactacgtcgtttcagcttagggtttatcaattaccagaatctaccaaattcacaacacgagagactctctcgatgtcgagaccctaaatccaatcttcatctcgaccacacgacgaacctttggaagagttcttcgagttctccacaaactaatttgagctgatttgatatatttcttcgagttctcgatatgctgatttgaggtcattctcgacaagtttctgggtttagactagtgtaatcgatgagatattgacattatatgaagctgagattacaattctgttttgctttgaaccgaatacatgctgcagttcacagttttgacaaaaaaatg

SEQ ID NO: 32643 - DNA, 3003 bp, Unknown
  misc_feature (1)..( 3003): 2750-1469P.txt file - cDNA_ID_3059576; gDNA_ID_1620337; Annot_ID_153828
tgcacttatttgtacttctctctgtgaaacatcccaacaaaactacttaatatcttacatgtaagtgtataacttgactatagataactcacctgggaggtctcttttgtggttctgctcatagctttagcgtatctttcttggaacttcttgacatcaacaaatacattggagacacgctcaccaaccgtgtttccaaccccgatcctcacgttgcctcgtggttgctttgacataaggaactccaatggagcaaggtcagatctctccaccattctgcacatctcataaagtatcatacttttatgtatttctctagttgtcttgtctctattgacttcacatatagagagggaaatgaaacaaaaccattactacatctactagttaagtgcttacgaaatgcagtctacagggcaagcttcgatggcttctttgattttggattcaggatcagcccattgagcaacaaccctcgctctcccgtaagcagtttcaatagcaaatgttttctctgcacacaaagcacacttcaaacacccaacacacttaacctcgtccacaaacgcagctcgttgctctgtttctggtccacaccaaaccgagtatatcggtttccctgtatagcctctgagttcttctagttttgcttgctcctacaacaagaaagtttcattcatatttacttagtgtgaccttgacagagactacaagatcaaagaagcaatataagaattataaccttgtcataggcttggcgcgagatcggatcagagagaagctggtaagcctcgttaagaatgatggccatatcatgaccgggatctcctgcgatatctggatgacatcgtttctgcaacgcacgataggctgatttgatctgagacttatcagaacttcgatcaatacccaagaggtcataaagatcaaagtcagtgatagacgatgatgatgaagttgctctacacttgaacttgagtggtgatctaacggtgatgagcttctgagatgttgaacatggccatgtagcagttgatggaggaagagtcgtcggagaaaaaatagccggtgtcatattttccccttctctgttttggaaggtggatgagtttagagagggacaagttgttgaaaatatctctatatgaagctatttttccatctctcttggaaagatattttatttgggacgaataaaagttccaaattgagttatagctaaaatgaataatattttataaaaaataaaatttttgaaagcagacaataaagttgattggtggcaattaaaagagttgtactattatgatattatccttctatacgaatgaaagtttaaggctgaggatcatagcgtaaaaaatatcataatgaattatcgaaatgttgttttaataagaaaaaccaaaaaataaagtcttacatatttaggttacctaatttttggcttttggtttggactttaaaagatccagtctacacttgttgtatctttcttacaatcttttctttcattttcaggtaaaccaaaaaaattataaagaatcttcccaccctaatcagaaaaataaattataatatcaattttcaagaaatcaaacttgtaaaatttttctacttaggagagtataattttgagaaatttgagtttttaatctacaaaaaaattataattaagtaactaaccatcccacaaaaagatactgatattatttgtattttctgtaataatgacaatgctaccctttgcctgagatacaggctctttttcttcttcttcttctctctttccaaaaaacactttctcatcagctgttaacattccaacagctttttgggtcccaaaaattactatctcctttttgtaaagcttcggattctgaaaacgttcaatggagatgtattggcgacggaatcaatacatttaatttttggaattgacgtctagggtttgtgattaaattgaattgggggttttgatttacaaaggtaaaattttggatttttttggagttacatcaatttctagttaagtgtggcgagttcgtgtctccttgtgccctcgattgtggaacccaaatggtgtacccggtgttctctactaccacttctttcctctaccaagagactatcttgtgctgtgctactcgttatgttggtagtgatgacaaacatatattattctatttttctatggttaaagaatattaaattttagattgaaatctttgggttcccaatatattatccacttagggtttagtatccttccaacaaaaacatttaattgattataatgctatattaacgtaacataaactactatctcatcaccactaccaacactattactttatatttaaaacattttgctctatactaaaattaaaattgatttacaaatcagttatgaaaatagtatagaacaatattttatttctatacatcttaaatagtacaatatattttttacttacaaacactatttctatttttaaaattcaaatccgattttaaaaattcaaactattctgtatgtagaaaaaaacatatatttttctctactaaatttcagaattgaaatctattttttggaaaagatatatagcaaacatatataaatggataaaaactaaaataaaggttagtaaatcatctcacctatgagtcaacattaaaattgtcttttccctacccttacatgttactttcttaatttctatatatatgatgctatattcttaattacattatcaaaagtagctagttttgcaattcaccctataattttgtgtgcacaagaaaaaaaaaaaaaaagagtataattttgtttggactcaaatcaatgggccttaatatggatccattaaattaagcccaaaagctttcgttaattcttcaacgaagatcgctgaaaatttcctttcccatttcgctgaatagggttcagtacaaaattcggaatcgtaggtttaagaattttagatcattgaaacagccatg

SEQ ID NO: 32644 - DNA, 3000 bp, Unknown
  misc_feature (1)..( 3000): 2750-1469P.txt file - cDNA_ID_3059583; gDNA_ID_1620337; Annot_ID_153826
gagtagaggttcttaagtaagacaactactcatgctaaaggctatggagtcaataagttgagaaagacagagacaaacatgaaggcaacacaaagaaccttacagcttcatatgtcaatgttccagatcgagaaacaatccctatcttccccggcttgtgtatgtatcctggcatgatcccaatcttgcattcaccaggtttgataataccaggacaattagggccaatcagcctagtttttgattgactgttaagagcagcctttacacgaacctacattacaaaagccagagaaatcagtagagccaccttatattactgtgcaaacctatcatataaagaagatatcacaaaaaaaaaaaaaaaggaaactggtaacaacgactattaccatgtcatgttgaggaattccttcagtgatacaaacaataagatctaactcagcagctaaaccttccatgatagcagcagcagcgaaaggcgcaggtacgtagatcacagaggcattggctttagtctcagccttagcttcagcaacagtgttgaaaacaggtagccccaaatgttctgttccacccttctttggtgtcactcctgctacctattaaccaaacaaccacaaacctaaaataagatcatcacaagctttaaagcaaacacaaaacaaacaccatttcatcaacataaacgaaccaattccaagtgaacttgagagatgaaatagtaaagaatcggctcttatgatcgtacttaagaactccatacatagaatctgaattgctcaaaaacaccaagaagtacatttgaatctatgtgaattctcgaatacaataccattttggtgccgtattcaatggcttgttcagtgtggaaggtcccgttctttccggtaataccttggcagatgacacgtgtatttttgtcgacaaagaccgccgcaggaggcggaggagttgtcccgaaggagcgagactgtaccaatgaagtgagagagcagacctttgagctgccgctgcagccgccgccggaatggcgaagagatccgagaagtctcgtgacctgcctagacatggctgtttcaatgatctaaaattcttaaacctacgattccgaattttgtactgaaccctattcagcgaaatgggaaaggaaattttcagcgatcttcgttgaagaattaacgaaagcttttgggcttaatttaatggatccatattaaggcccattgatttgagtccaaacaaaattatactctttttttttttttttcttgtgcacacaaaattatagggtgaattgcaaaactagctacttttgataatgtaattaagaatatagcatcatatatatagaaattaagaaagtaacatgtaagggtagggaaaagacaattttaatgttgactcataggtgagatgatttactaacctttattttagtttttatccatttatatatgtttgctatatatcttttccaaaaaatagatttcaattctgaaatttagtagagaaaaatatatgtttttttctacatacagaatagtttgaatttttaaaatcggatttgaattttaaaaatagaaatagtgtttgtaagtaaaaaatatattgtactatttaagatgtatagaaataaaatattgttctatactattttcataactgatttgtaaatcaattttaattttagtatagagcaaaatgttttaaatataaagtaatagtgttggtagtggtgatgagatagtagtttatgttacgttaatatagcattataatcaattaaatgtttttgttggaaggatactaaaccctaagtggataatatattgggaacccaaagatttcaatctaaaatttaatattctttaaccatagaaaaatagaataatatatgtttgtcatcactaccaacataacgagtagcacagcacaagatagtctcttggtagaggaaagaagtggtagtagagaacaccgggtacaccatttgggttccacaatcgagggcacaaggagacacgaactcgccacacttaactagaaattgatgtaactccaaaaaaatccaaaattttacctttgtaaatcaaaacccccaattcaatttaatcacaaaccctagacgtcaattccaaaaattaaatgtattgattccgtcgccaatacatctccattgaacgttttcagaatccgaagctttacaaaaaggagatagtaatttttgggacccaaaaagctgttggaatgttaacagctgatgagaaagtgttttttggaaagagagaagaagaagaagaaaaagagcctgtatctcaggcaaagggtagcattgtcattattacagaaaatacaaataatatcagtatctttttgtgggatggttagttacttaattataatttttttgtagattaaaaactcaaatttctcaaaattatactctcctaagtagaaaaattttacaagtttgatttcttgaaaattgatattataatttatttttctgattagggtgggaagattctttataatttttttggtttacctgaaaatgaaagaaaagattgtaagaaagatacaacaagtgtagactggatcttttaaagtccaaaccaaaagccaaaaattaggtaacctaaatatgtaagactttattttttggtttttcttattaaaacaacatttcgataattcattatgatattttttacgctatgatcctcagccttaaactttcattcgtatagaaggataatatcataatagtacaactcttttaattgccaccaatcaactttattgtctgctttcaaaaattttattttttataaaatattattcattttagctataactcaatttggaacttttattcgtcccaaataaaatatctttccaagagagatggaaaaatagcttcatatagagatattttcaacaacttgtccctctctaaactcatccaccttccaaaacagagaaggggaaaatatg

SEQ ID NO: 32645 - DNA, 3003 bp, Unknown
  misc_feature (1)..( 3003): 2750-1469P.txt file - cDNA_ID_3059587; gDNA_ID_1620337; Annot_ID_153821
tctgagcagcagaagcaagttcaagagaacattcactaccaagttgaaaaattctgctctttgatggatggaatccttcttcctgatgttaggaggaacgagtcggggtcacaatcaacaagccctcgtcctcctcgtagaagtggtcttactttcgccattggtagtaataatgcttttccacatgcagatcagccccgtaagtgttttactttacttgaatcgatttgtgaacttattactcagtatttttctttcagcttaattagtattctcactgattcttcttcagcacagttgttcccgagacaaagcctttgaaactcaatgacgtctcacagagattaatggatcaaatgggttacaccctcgagaccaaaccgtctgtaatacctcacaaagacgctggtcaaggttgttttatcaaaggcgaggcagatgttggaaccgtcttagccttttaccctggagttatttactctcctgctttctacaagtacatacccgggtacccgaaggttgattcacagaactcatatctcatcaccaggtatgatgggactgtaataaatgctcaaccttggggtcttgggggagaatcaagggaagcatggaacgggtcctacacacctgcggtcaaagcaaacaccaaaaccgcagaaaacgggtcagacaggttatggaaagcgttgagcaagcctctcgaaggttcgggtaaaggaaaagaggttcttgagaggagaaatccgttggcttttggtcacttagctaaccacccagcgaaagagatgactccaaacgttatgatatgtccttatgacttccctttgatggcgaaagatctgcggccttacattccgaatatatcttttggggattctggagaaataaagatgaaaagatttggaagtttctggtttaagacagggagtaaaaacgggttagaagctccggttctgaagacactggtcttggtggcaacgaggtcgttgtgtaatgaggaacttttgctgaattacaggctgagcaactctaagagacgaccagattggtatactccggttaacgaggaggaagataggagaagatggagctaaatttctcttttatgttttaatgaaacttgaaaggctctgtttcaaaacatgctcctcggttttctttagactattagcgggacgtcgtttcgctgattgtgtcactatttttgtttttcgattatttttggaagacattttattctaatattttatgttgttctgttgttacatactatggacgaagagcaacacacgactctgtgatgaaaccagtgctgcaactgtaatagggaaattacgtaatgccaatgcaattatagagttctcaatggatggttggaatggaacaatggtgatgatctgtgttgttgaatgtgataaatgacttaatgatggatttggttttgtagtcaaaattattgaattgaagacgttcaaaagttatcggaaaatatgactaccgaataattaccacaaaaggaatagcgaattcaataaagtagacataaaatgcacaacttcaacataaacgattatatgaaaactataattgtataatcttataactctattatctataatcattgtgagtatatcaaatgttgtttaaactcactcttgaactatttgataacttaaacatgtaataattatctacgcaaaaaaaagacatagtaattgaaaaaaaagagagtaaatgtttacatgtttatgatcttcgtagagaatcttagctagtttcttttaaaacacgttagtcatataataatgcaaacaaaaaaatttataaattttttgtttgtaaacatttcatattgatcacactgtaacataaatgcctcgtgacttcttaatgtatataggtataataggagagtacatgtagatgtagatatacacttctatgacgtatataaacagaaactgaatctttttattacgcaatcaaagccgtaacattctgttttgttatatgacaggtataatttactttgcacatacatcacaattcacacattatattatataaaaatatttatgtagatcggtcgttgctaatttcaagggggaggaacatgaaagattgagagagagagaagtaaaacagtgtttggtcaaatctctcttaagaaataatcttatgaaatgaaccgtcactttctttgctctgctctgctttttatttggatccttctattccaattcattgaccaatcacttcattatctctaattctctaacattttttttatattatccttttgatttatatatcaaattatttcaatcatgatacaaaaacgatattggagacatagcacaagttgcgtctgtctgtacgtattttctatttatctagtatagtctaacaaaaagagaaattgcccataaaaagggaaactcaatttctaacaaacctttctatttttataaagagaatttgctactattattactgatataaaaagaaataaaatttcttgctttctatcatatttgatattttttgatgtcttcgtcttaaggaaatggttacaaagacaagtataatcatataattcaaatagaaaacgatattaaagacagatcacaaattgcgtgtgtagatatttcaccaagtgttaacaaaaagagaaattcatataaaaaaaaatatttataaaactgcaactattaatttattcaaactaattaaaaagaaagagaaaaatcttcctataaaaagaaatgaatctttctttgtaatcagaaagaaataaaattctttttacttttccagaatttgatttttctcatgtgtcttatcttatgaatatggttaccacccagtgagactacagagtgttcttatctgtctctgaatcccattctctctctcacacaacattatataagcttacacagtcacttcacaatttccacaaattcgatatattaaactataataaactaaaaagaaatg

SEQ ID NO: 32646 - DNA, 3003 bp, Unknown
  misc_feature (1)..( 3003): 2750-1469P.txt file - cDNA_ID_3059624; gDNA_ID_1620338; Annot_ID_153871
tggggtttgactatttaatcagctttaagtatcatcatttgaccttttcactgttttactgctaccaataagattttagcaatttgtaccatatgagagaatcatatgagcacttacttttttattcttttcttttttggtttaaatattagtactcacttacaacagtttctaatttttttagctattgataaatttccataattggattagcaattgttattctctttataatttcatgtgttttagtaatatggagtattatgtgatatgtgagggaaaaaaatcaaaagagggagaggaaaagaaaagaaaagatagatactcttttaatacaaatgtaagtcgagagaaagagaagaatccaagtcggcagttccatgtgtaagcctcgggaacacaaatatttgtcccacagtgcgatcccaaagttcatgccccacacgtgtgaagtcctacttggcgccacgtcagtatttaatgcatgggaaaattgaggtggtaactgatgatgttaatatcctctcgattattgcttgaagatgtctcactcgatagtgaaacttgttgatgtaatatcacagttttttatcttaccagttacgactagccagtgtttcgctcacttgttttggagatgaccaaatttttagaataaaacttacaacaaactcgcttttcttagactagactcaattatatatcttatagtttatccaaaaatgagtttatacatgctgtcaattgtaattaatggtcatattgactaaaacgaaaatacgtttgattaacttttcaagataaccaatcaactatcgtcacttactttcatgtaacggaatttacctaacgtcatttgatttctcatcgttttcaaccaataacacaacctggtccagctaataaactcatttgtttttttttgttgtaactttttctctttagaaactcatcggtctatactcttgatctaagtggtattgttattctaggcaagaaatcaattatattgaacaaacatcttatcacgcacaatccggtcgcgatgaaagaagtttctacttctagttgaggccgtcctaaatcaattcgaatacgtattttagatcaatatttggaatgcaaaaaaaaaaatgacggagggagtataaagaacccatatttaatttgtagactagtctatatatcttcctcatatcttagtgatttgctatgaatctttcaattgtaagaccaaatgtgttcaaaatagtgtttaatctgtatagtatatgtatacattagaaagaaatatacgtacatgtatatatatatatatgcattaaaagatgtgctttatgaattaaggtaaaatatgtgaaattatgtcaacattattcttcccttttagggtgtattttaaaacagaagctcattggtactttaggtttagcataggctataggttttagttgttatcgagaatgccgtgtttacttcatcatgaacatctcatgttaacaacatgcattttaagttcttcaaaaaaaaaaaaaaaaaaaacatatgcattttaagtctttgtaaagagatgtaacattgtttatgttatctttaatcaattaaatacgaagttataatttacatatgaaaggtaaaaataaagaaaggtaaaaatagtaatcaataaaatagagttattttgatcaattatgctgaaatttcatgaaatatgtgagaaatacatctattggacaatccactaactgtcaatctcgagaattagaatcgtgctttgacagttttaactatatatagagaaacacaaatggcgtgagttttaggtttatattttgactgatacattactaaacaaaaatattaaattaagtactaaaataataaatgagtgaagtaatattagattcacgtataagtcatgtctaaaagggaataaaacaaaataatttacatttcttttcagatcttgaggtccacagttccaccttcgtaccaacacccaagtggttctttagagagagagagatttataagcttctctttgggcattacaattttttttgtgaacatagaaacactcaaaacttcaaaccaaaaaaaataaatgggagaggttcaagaaaatcctaaactcttatatcagcttttcaaatctccatgaataatattaacaaatttgttctgatctattttattttatttttggtatcaggaagagaagaaaccagaagcagcagaggaaaagaaaatggaagagaagaaaccagaagagaaaaaagaaggagaagacaagaaagtggatgctgagaaaaaaggagaagattctgacaagaagcctcaagaaggagaatctaacaaagattccaaagaagattctgctccggcggcgcctgaggctccagcaccgcctcctccgccgcaagaggttgttcttaaggtttacatgcactgtgaaggatgtgctagaaaagtccgccgttgtctcaaaggcttcgaaggtatgtattaaaaacagatatgtgtagagaaaaaaaaaagaattaattgatttatataattttgcaattccacacaaatcttttggtttacatttttaaaaatataaaaaattcagttttccatagaatagtttcggaaacaattttttaaagatgattaattatattgtggctttattttaaaaatatacaataaacacaattatcttgtattctttccagcatcctatgtcaattgctgtaactggatatatcttgtttctgtcaactatagtttttttggttaatctcgtatctaagtatagttaatattcgtcatataatttgtgtgtagggccacataaagttttggttatgctttagtattatagcttttgttttttaaaaacactcaaactagaaattctgtttttgggtaaaaatggtaaagctaatggtttataaaaaaaatatataactttggaattttggttgaattaatcaattaggagtggaagatgtgatg

SEQ ID NO: 32647 - DNA, 3000 bp, Unknown; identical to SEQ ID NO: 919
  misc_feature (1)..( 3000): 2750-1469P.txt file - cDNA_ID_3059635; gDNA_ID_1620338; Annot_ID_153862

SEQ ID NO: 32648 - DNA, 3003 bp, Unknown
  misc_feature (1)..( 3003): 2750-1469P.txt file - cDNA_ID_3059641; gDNA_ID_1620338; Annot_ID_153859
gaaggaagacataattctttactctgccaaggtgtatatatgaaaatctacatacataggcttaagagcatctaataagttagtggctgtgatcgctgatatctatttcggtctaatgttttaatccaggtaatcccaggcaatgaatcacgagtaatgaaaatgatgaatcggatagcagatatcgggccaaatattatcatgggtaagaatgaaatgctccacacatctggtcatgcctaccgtggagaattggtaagctgctgcttctcttaagactgttgataccttcagaagttttgttgccagctttcctttctgtttcttttcacttcatcaatcttaggcttttagcgcatatgtaaaggtgtaaaggcaatagttccctgtttgcaaactgatgaatatctaagggaaaattttgtttctaatgattgtaactattccctattttgaaggaagaggtccttaaaatagtgaagccgcaacattttcttcccatacatggagaacttttgtttcttaaggagcatgagttgctcgggaagtctactgggattagacacactactgtaagtctctcaccaaagacatatgaactcatggtagataaatagcatacaacataggaaaataccgattgtgaagattttttctaaaagttctgcaacatgtttatgagtttgatgaaatagatgcaaatttcatctggtcacaaagtgcctcaaccgtgaaaacagaatttctgagacatgttcaatttaatacaaaaatttcatggaaggatccctttattatctctcggagatataaaataaagaaacccttgtttgtctggtattaaaacctaggtcaactagctgaatgtttcactttttttttttttcattttctccaacttcaggttataaagaacggagaaatgctaggagtttctcacctgagaaatagaagggttttgtctaatggatttagctctcttggcagggagaatttgcaggttgatttgattgtcactgttgtgttctgtttatcttgtgtaaatgactagattaggatattgaataatcctagcgttgctgcagttaatgtatagtgatggtgataaagcatttggcacatcaagcgaactatgcattgacgaacgacttagaatttcttctgatggcattatagttctgaggtaaatctgaattgtaacattcctgtgccagtgcattttgttagtcgtatttaataatttgttggcttccttgtatgattttctataatccagcatggagatcatgcgtccaggggtctcagaaaacactttgaaaggaaaaataagaatcacaacgcggtgcatgtggcttgacaaaggaagacttttagatgcacttcacaaagcagctcatgctgctctatcaagttgtcctgtgacatgtcccttgtctcacatggaaagaacagtctccgaagtcctgaggaagattgtaaggaagtacagtggtaaaaggcctgaagtcatcgctatagccactgagaatccaatggctgtccgagctgatgaggtcagtgcgagactgtctggtgatccaagtgttggttctggagttgcagctttaaggaaagttgttgaaggaaatgacaaaagaagtcgggcgaagaaagcaccttcacaagaagcttcccccaaagaagtagatcgcactttggaaggtctggtcttactttcacatttgtaggtctatattcgggatgtaatctaacatgtttcagtcatgcagatgatatcattgatagtgcaagactactggctgaagaagaaactgcggcatcaacatacacggaagaagttgatacgcccgttgggagttcttcagaagagtcagacgatttttggaaatcattcatcaatccatcatcgtcaccttcaccgagtgaaacagaaaatatgaataaggtagctgatacggagcctaaagcagagggtaaggaaaacagcagagacgacgatgaattagctgatgcttcagattctgaaaccaagtcatcaccaaaacgtgtgaggaagaacaaatggaaaccggaggagataaagaaggtaatcagaatgcgaggagagctgcacagtagatttcaagtggtgaaaggtagaatggcattgtgggaagagatctcttcaaatctatcagctgaaggaatcaatcgaagcccgggacaatgcaaatctctctgggcatcacttattcagaaatacgaggttcgtctctgaacatatgaatctgtagccgtagatttgaagttcatgattacaagatcaaaagctcttaagttagcaaccaagatttgatgtaatacatttttgtgcaggagagcaaggctgatgagagaagcaagacgagttggccacattttgaggatatgaacaacattttgtcagagctaggcacacctgcgtcttaagtaatgtgatttagatgacattatcttcccaaaagaatcatctccagattttcttaaattgaacaaaaacagaaaagcattaattatattatgtatgtaaccagctgtaagatgatttttgtctgtagaactagaagctatcaacgcagaatccaaatcccaagggacaagaaagccatgactagttttttcggtttggtttaagattcgctttggcttcaaacacatgactaaccggaattattcaattttgatgttcatgtggttttcttattggttttcgttgattttatataccaccaatcactaatttttttaattaaatccggtttagatgctgttgtacattgaaccaacagttaaagtgagaaatgacggtttcacccttaaagcagcgtagcccgtctggtattccaccgtcgatcgccgccgtggcaattttggtaatttattattattttaaaaacaatgtgaaagagattaatgcaaagttgagagctgagtttccgacaaatttattggattgacgaactttgaagaagaagaagagagatg

SEQ ID NO: 32649 - DNA, 3003 bp, Unknown
  misc_feature (1)..( 3003): 2750-1469P.txt file - cDNA_ID_3059645; gDNA_ID_1620338; Annot_ID_153858
aggcatataatcttgtcatttactaataattctttagtaacaaccataaagcttattgagaggttgaaagtggtggaccggtgggtgaagttataaatgcaaatggttgaggcctagggaattgagttactaactgtgtacccaacattaagtcacagcctgtcctttctatatcgagtgtgaaaggtcaaagatgcgtacctttgtttactcttcaattcacactttatatacgactactactagtactacttgaactcaaataataacaagaaattggagtgagattatatgattttcaattatttgtacgtagttcagatgtggtgtgtgtgtgataagtctttgatttgtagtgtataagaaaatagcgattacagcagtgtggtttgaaaatgttcgatactatgcgttgtcattgaattaatttgacaatggagttatggagcagagagactctctcctttaaaaattaatttcccaaacaatgaattctgatagaataaatttatgcacatttattttatactatagtactatgtgggggacaaaaaaatactatataatcaacgttattttcatactatttaataaaatacgtatataaatatcgaataagatggtttttgtttgcgtatgaattaggtagatgtgataactcgctgtctttgatttttcataataagccgtcaatatccatttatcactagttggaacttggaagtgtatatatatatatatgatttctttttaagttctgataaagcaaaaaagaatatgttgacttggtcaagtggtccaatgaatccaatcttccagcgggccatttataaagagactatcaaactaaaaagtggtttacgagtataaactaagttgataaaaggttttttgttttgttaaaaggaaaattatgttttgcagaatgatttatcttacgagtataatgatcaatgatgtattcttaaaagcatgggaagattgacttcggtttaaaaatatatccagtttcaagtctctcacgttaagtgtaatagtaatataagatttgacaatctttatcatcgttgactttgaccaacaaaaatagtcaaatattggatatttggatattttctaatttattcagacaatgcaaaattgcaggttcagtatcaatgtatcatattcatgggatttcagattttgtgatgactattttagaacactactttgtgattatctgaaatgttatatttaggaataaaaatcttagctaaacttttttttttttttacattcgtgctatttgaaagaaaaaaaaaacttatagttgctatgaatgagaaaccatcttcctatgtatgttgacctgataatcacttgctatgaatgagacatttttatataaaaaaaccgctatgaacgagacatttaaaaccatcacgttgacagcaaactgcatataaattaagttaccgaatggtttaatgggcctagtaatgggccaaacagtctttctcctttatttcagattgatatagtggccactacaaatgcaggacctgtcccgttgaggaataaccggttttcaattcaattgagagaaggtttattgtattcgtcgtctcccatccgataagagagaaagatagtttacagtcacagagatacttttctcactcatctctctctctctttcccgcttccctccttaaaccccaattcttctcctgctcacaaaaaccctatcttttgggttttgttatacagtgatgatgaaacctgcttctttgcaaggtttctcctcacatgcgtcctcctctatctactccgatgttcgcaggccagctactactccttcgaaaatggcagcttttagtgccctctcgctttgtccctatactttcaccttccgccaaagctctcgaattaagtctaccgtttcctgttccgtcacttctgctcctgcttctggtctgttgtttttctttctctcctcgtcttttcctattgggttcctcggaaattaagttattgattgagtaaatgtgctccactactgtaatgggtttggagtattttgaattagcatagaaaaaaattgaaactttataagatttttggttgatagtggccgatagtttggacagagtttctatggagattctcactctgattctgttgatacttgatagtatgagtagaatctttgaaatttggttgttttatgtgtcgtgaatggaccataggagactgactagtcgagtgtttttatttgtgtgtgtattgactctatttgttgattctggtgttatgtatcaggtacatcttcatcctctaagacgccacgtagaagatcaggtcgactagaaggagttggaaaaagcatggaggattcggtgaaacgtaaaatggaacagttttatgaaggaaccgatggaccacctctccgtattcttcccataggaggccttggtgaaattggaatgaactgtatgcttgttggaaactatgatcgttacattctaatcgacgctggtataatgttccctgagtaagtccggagatacattcatcttgttaatattggcgagaagtcattatctttgtgtgcgtggtgctaactctccgtggaaaacattgctgtataatgttacagttatgatgagcctgggatccagaaaataatgccagacacaggatttatcagacgatggaaacacaaaattgaagctgttgttataacgcatggtcatgaagatcacattggtgcgttgccttgggtaaggtcttcttctactccttgaaaaatccataatgagccatagacttttggagatttctagatagagtctagcttttatttttcaattaacagctgcggctcgtgtgtataatgcagttcttttcctcagtccattgctggtttctgttctttttttgaccgatacccttttacatgagcaggttatcccagcattggaccctaatacaccaatattcgcatcatccttcaccatg

SEQ ID NO: 32650 - DNA, 3000 bp, Unknown; identical to SEQ ID NO: 926
  misc_feature (1)..( 3000): 2750-1469P.txt file - cDNA_ID_3059651; gDNA_ID_1620338; Annot_ID_153856

SEQ ID NO: 32651 - DNA, 2237 bp, Unknown; identical to SEQ ID NO: 931
  misc_feature (1)..( 2237): 2750-1469P.txt file - cDNA_ID_3059681; gDNA_ID_1620339; Annot_ID_153909

SEQ ID NO: 32652 - DNA, 3003 bp, Unknown
  misc_feature (1)..( 3003): 2750-1469P.txt file - cDNA_ID_3059685; gDNA_ID_1620339; Annot_ID_153906
ggtacaatcattcttccataccagaaaagttgtttatcacttgagtttattttaattacctttctagtaacgctccaattatcactttatttgttggacacacatgtttaacactcatgctgtctctttatttaatgttttaattttaccaccactaagataacacatatgcacattctttatcaaaaaaagatacagacattaatctaattaatcttacttgtaagtttcaaactcgcacgcacatacgatataaggatatatgtacatatatatatatatatatatatatatatatatatatatatatgtatgtacatacttgttgatgaggcatccactggaagtatacacgtttggttttggcccacgtgtatatgtctatttatagatgtaaatcatcttgaaataatatatgcacatattctccatttgtataacttctgaaaacgggtataaaatgttctcctaataatgtttttctcactatcccttgacgtcactttccactttttcttactttcaaaaatttatgtaatggaaaacagcttcaatgtagtaatcagatattccgagtgcgatgcagtggtttaattacagctatatatgtttttaataatagactttgtagtttggatgtatttcatgcatgttggaacaaagtttgatattatcacaataattatctgcacataaaagtagcatgcgtgtgtatacacaagttaattgacggttaaggcgatgcaaaaaggtaaggaagagtaaaacttacgacaagaattccatgttgtattaggacaggttgtctctttcccccatctccggcgacggctccggctcgtccttccggtatcctttgcatattcaatatgtacccatcttgagtcaccaccttcataatttaacaattaaaatagcagctttatcagttaatatatcgatgagtaatcatcatcaatagctatatagaaaaaaaaagaatgtcgtacgtacatcatgttcttcgcacttgtaaccaaatatgtgaacagaagaagcgcatatgccgccggcagcagtcctctgcggtggctgtccggcaagcctgccgaaggttccacgagcttcaagggtcttgagggaaagagcgaagaagattaagacagataaggctaaaccgattgaaacggacggaaccataaccgaaccggccattgagatatatataggggttatcacgtacgtttataggaaagtgaaaatggttttatatagagagaaggggtgacggataagataatagaaaatggaattattagctatttataaaaatgcaaaaccacgttagcaactatggatagacaaaaacttatttagaaaaaaaaacaatttatggtgtgtaaacataaattaagaattgaatcatgcacaaaaaataagacaagcatttatgaatagtttctagaagtggtgaatcatccactgctatcgtcgatacaacatttactaaagtttctatatataagtggagggatgatcagtgtgaccatgccatgatttctaacttttttgagagagcgaggttattatgataaacatttaaaataatacgtggaactgagatgaatggaaaataatctttataaaagagaaaaaaaaaaatagaagatctcatgataataaaagtacttccatatgttttcaatgtgaagaaaagaatagtaaaggagatacatccaatagcttagtctagaaaagagctgactaattttttttaaaaacaagatctctggtttgtatatttgtatcgattacacagcctagatatataaaacacaaaacttgatggagacaatttcatatcctatatatacacattaatttaatgagtgaatagtaatagcaactagcaaggcaatctaaacaaaattaagaaaagaaaaatgttaaattcctgagatctataataactcataagcaaaaaatatatttaaaaaaatcatacaaatgttgtaataatatcattttgttttaatgtggagtgataaaaagaagataggacgaaagaagaaactgttaaaggcgattgtagatgctgtagggacggataaatggactatgacatcagtttccgttacttgtttcttctcgaactcaaagaagaaagaaaaaaaaaaaaaaaattctacatcggtacgctttcgtttcacaccctgcatgcacacagtgtccggtagtcaaaaatacaaaaaaaagaaaaaaaacctcgagacatgctaaatttggataatgattaataatttgggggtacacaatgttccaaataatttatatacaaagtcttgctttcatattatttgtgtgtccacacttcaacaatatagtattatactattatccctatcccctatgaagtatgaacacactttttatgatacgtatcatattcagaaaacatcaaaaattggtcataactctcacgtggtgtggtggatttgcctcgcctttcgtttctgttttttgcaaatatttaagaatctttggtcatttaggctttaatttagttactttaaatttatttttgttatagaagtattatgttaaaaacagttcgtgttcatccttggactaaccagacgatttgacaaaatccgaatatccgatcataaaattaaataatcagccgttattgttcctctactactacgttttaacttttaagaacttctcctggtactttgatgggctataagagcggcccaatatttcgactttaaaatgggccaatctttggtaaaggcccaattatagtggcgcttcttcttcttcttttcctaaacaagcaatggcatggtttagctggtgagccagtttataggtaaaaaggataatttaagccatttaaaaaaacaaatctttaatggcgtaattcaaaaaacgtgcacacctatctaagtaccaaactctttatgttatataactattgtgacacaatttcaaatttgctaactcccaaaaaaaatg

SEQ ID NO: 32653 - DNA, 3000 bp, Unknown; identical to SEQ ID NO: 937
  misc_feature (1)..( 3000): 2750-1469P.txt file - cDNA_ID_3059699; gDNA_ID_1620339; Annot_ID_153891

SEQ ID NO: 32654 - DNA, 2739 bp, Unknown
  misc_feature (1)..( 2739): 2750-1469P.txt file - cDNA_ID_3059706; gDNA_ID_1620339; Annot_ID_153885
tctgcagctgcaaggaaacaacacacagcgctcaagtgacaagccggctcacttcccttgtctgttaccagtccatggtagtagtatgctgcagcctgttaagaaaaaagcagaacataatagagagatatattttatgaaagaacaatagagatgaatatatatcggatcactctcaacaatagcttacatacacatacaatacctttgcttccagaaacttccagtagataaaccggagaagtttcttggcgcatccatggctaactgcttcacaactagacaagcagtgatatgcctgaaatgataatgagatcattttatagcaaattaataattaaaacagagaaaagacatatgattgccccgaaagcatgccacagttataagaagctgaagattgttaaactatgaggaggacctgagtgaagtagatgacttgctcacatgcaattctcctcttcacagacaatgttgctttctgactatcaactgctaatccaagttgaatctcagttccctgcagtgagattcaaccaaacttacaaattgaaaacatatatacaagattcaggtttaggagtcacagtttcaaagtaagcatgtgtgtaacctggcctagtgcttgtatagagagagtttgtaatacactttcctgcatatcatctggcaacttactcctgcatacatatagcaaattttcagatatgtaagtattaatgtgatcctagaatttatgtatttgtgcttcatactttatatcatgaggaagttgagtcagaatctctcggacgcagaactccaagtatccagatgccttgagcagcaagtcaaccgcatctctcctgcaatctgtttgaaagtgacaggttaattagttttttgtaaacacaataaattaaaataaaagtgtgaaagtcaacgaggccacaccagtggagaccacacggacgccattgccagaaccagaagcatagcaatcctttggaatcatgagagagttagcttcagtcaatgccaaagcagccatcatgtggatcactatcaacatctccatccaaaggtttgtgcaacatatctctgcctgtatacacccttcacattgttaagattttaatgatactagaacaaacaaaatgaatatccttaggatcagcttaatttaagcaaaaaccgaacttactcgtcgaccatcgccaagggtcctccatttgagctctacgcagccctccattccatctttacctgtagagttaaatattctaatatcaccatttgaatatactaaactgtttaagttaatcaaaacttgcaaacacgaacttttcttgataagaccggatagaagtgacaagtactcctccaaagctgtacgcaactcagagatggctgaaccccctgcagtagaaaagatggaaccttatgtcttgacacgcaagaaaagaggaagaagttggtctaatttctctatacctgtgtcctcagctaccaactcaatctgatttcttaaacatgtcaaccgattgatggttgtcttgggagaaacacctttgagttggcgctgaagatcagactgaacaggaacacggaactgtagaacaaacactacagattcttgaatgatcctcttcttgttcttccttcccacaacagcaatagtagattgagcacaccccatgctctctttctctctctctctctctctgctatgatcttttgctcacaaaatcatcctacacaacattgacatatatatatgtcaaaataaggatgttttggaacaacctgaagcagatagatccggattaattttgaagctctaagtaaaatataaaaagaacaatctggaagagagaatctcagagagctaaccagaagagataagtaagcatgtgatgatgggaagagaagatttactcaggtttcagagttcgatgcaaatccctccacatgctcttatattcaacgatagatatacgtgatttagttaaccaacaaaggaaaatcacatgcctttcggtttaatccaagttttaattatgtttcttacgggtagctgtgaattcttattctatgtccccacccacttgcctactttttattggctctcctgttttagttttagtacttccttcctcgttgacttctttccttaactttcccgccaccttgattaattgaatcaaatcaactttatcagtttttaccctcttttcttactccaaccaaaagattgttagaaatgaaaatgagattatggtaacaaaacctccattgattcgagtcaatatgtcttttgaatgatatgaatcgttggctattacatcttaagtagactttataattagacgagataattaatagacaaagtcatctatgattataaaagtattagagaatatttggatccaatcgaaatgtggtgtgggaaaagaaacatgttagattgtggcaggagacaggctgtgttatcttcattgttctactgcaagtgcaaacacacttcccttctttaatttggacggtatattaatacactttattattagaatgggcttttataagtaggcccattatcaggtgaaaaacaattgggcccatcattgactttttttgttaatgggtggtggtggtggtgattaatatcgtcgtcggaggtttcttgagctgaagaaaacattcgtagatctatttccgcatctgcttaaacacctacatcgtcgtagatcgcaaaccatg

SEQ ID NO: 32655 - DNA, 1222 bp, Unknown
  misc_feature (1)..( 1222): 2750-1469P.txt file - cDNA_ID_3059715; gDNA_ID_1620340; Annot_ID_153947
ctttcgtgtgattgtgatttattcgatacagattgtttaagcctatacaaaatgacgtgattagaaattttaagagatattcacattcttctagattggttagttaaattaaatgtgagtaccaatttatacaaaagcataggttgtttatatcattgtcattcctagctatgaacaaaacaaaattttatatttcttctatgtgacgacagctaaacatttcttgtttttagttggtgtcaatttaagaataattagaaaaataccaaaagaaaaaaaagtagaaagtatagaacaaaatagaaaagtgagaataatggatacacacacactaatatacaactgcaagcacataaaattttcagacacaccacacaacattcactttcattataattttggtatgtgttgtattattcaatttccagttttttttatctattcttttcttagatgtcaattttgtagctgaaaatttatatagttgtcataatattactgcaaatcctattgactattgttagttttctatttggagattttataacattttttcacgattttatgctcctttagatcgacttcatataagcctccattcaatattacgtcaacaacaaagccatacatgaagattcatgagaaaagaacaaattagaatttctttttggctttctgttaacaagatacattgtatgaaatgaatctgacccgtgatgacaatgcaacaataatactagtacggctctaagagtcatagtcaaaagagatggtgattataagacagcaattacgcatgtcaacgtcacaataatgcgtgctactactaccatcctcctactgtctgctacgtcaacaagtggattgcaatcagacggtgattgtgtctcttttcattctctctcttttactaatttctctgataattaaactgagaatgtatattaagaaaaaaaaacaaaaacaagagaggaattttcatacacactaacttaagactctttgtaagttttcccaaatatggattttctagtataaatatgagttcattagtttcaccaagcctacaagcatctctccatctcaaatcatattcacctaaaaatcaggtcccctctctttatatctctaacattcttatatcagatcatattttttggatttcttgttaagtaacaccaatcttttaaaagtgttttcaggttaatataaaagaataatg

SEQ ID NO: 32656 - DNA, 3000 bp, Unknown; identical to SEQ ID NO: 942
  misc_feature (1)..( 3000): 2750-1469P.txt file - cDNA_ID_3059719; gDNA_ID_1620340; Annot_ID_153946

SEQ ID NO: 32657 - DNA, 3003 bp, Unknown
  misc_feature (1)..( 3003): 2750-1469P.txt file - cDNA_ID_3059723; gDNA_ID_1620340; Annot_ID_153944
aatattatataatttgcatagaaacttgaaaacaacttatattgtgaaacaaaaaattttatctaaaacaacttatattatgaaacggagggagtatttatctacattcgttataattattttttactttataaatatacttgttttctgttctagtttatgtttgtggggaaagaccgggacacatagtagagaaacattttgcaatgggagagagccttaacggtaaaaacaaagtagacattaataccgaaaggcgattggcagatcagaaatcaaaacaattcaaagaacaaggttgttccgaggaagaaactgaacaagccatgaaagatttcggattaaaaaggttgttatacaatatcaaatactgaaattagaaaatagatactatgaagtaactcgaagcattttcattattcatatatataatgttaattagggcaagactttatgggtggccaaacacatatgtcttcaccaaagcaatgggagaaatgcttcttggacactatagagaaactatgccaattgtaatcatacgtcccacaataatcacaagcactttctcggacccatttcctggttggattgaaggtttaaagtaagctatccatttatcattcctcattatagtagttactttagattattcatccacgtacttgatttgtttctgactcaacttctaatgtgtttattgtatgtatgaagaactgtagacagtgtgattatattctacgggaagggaattcttaagtgttttctcgtcgatcaaaagacagtatgtgatattgtaagtttcactagcacattaccaactttgaaaaatgtaaactaaaattctatttttactagcttgattgctaacaaagaaatatctctatataacaagataccggttgatatggtcgtaaacgcaatgattgcaatcgcagctgaccattgccatgattctggaagtcatacagtttaccatgtcggctcatctaaccaaaatccggtgatatataaacaaatttatgagatgatgagtcgttatttcatgaaaagccctcttgtcggacgtaatggtatgcttatagttccaaaagttacaagaatatccacactggctaggttccgtgtatacacaaatcttcgctataaattacctatacaggtaacagcttgcataaattgcacacgatttttttttttttctgtttgagtgttattctttttattattttaatagcaacctctcattttggctttgtgttttttcttctttagatattgggattacttagtgttatttccctatcccaaagagataaatttgcacttcacaaccgtaaattcaagatggccatgagattggtgaaactttacaagccttatgtactcttcaagggcatgtatgtatcactctcatatttcctccaacattccttttttacaagtattttcttccacttttaatgtatctagtagatatttttcatgccttagttcacgttttaactatagtttgaaattctattgtgtattcaatgcagatttgatgataaaaacatggaaactttacgtatcaagaatgaagccaaagatatggagaaattgtttggcaccaaccccaaatgcattgattgggaagactattttatgatacgcatatccctggcctcatgacacacgtattcaagaaatgaacttcaaatacaagttaatatacgaagtcaagtccaaagatattgttttgcatgggatgaagcctactatatataattactaagtatataaataataaatcgatggaaaatcgacgacaagtaatgttgtctttgtttgcttcttaatgtataatccatatttggaatttgcctatctaaaatccctcggcttgtctttggttatatataaaattggactactcattttgacaagtaaacatatactactttttaagtcaagaacatatactacttttccgacagaatcccacatttctttagttcttttactttgataagcaacgtcatcacttttaatgatattttaagtgaatgaaaaagagatgttgagtgaaggaaaaaaaagaagaaaaacaactagacgtaagtaaaattggactactcattttgacaagtaaaggtgggcttcggtgaagcaagaggttacaaagcaaatggacatcaaccttaaacactagtatataaaaagattttacaagtgacctgcgcttgtagttacctagttcagctaaaagtaaaaaaatgacacaaatgtaatggacaagtactgaaagataattttattggatataaatgatgtaaccactgacactgttgagcaaaccttcacggctcattaaagatttataaaggacagtaagaaaaaaaatatgtttccccactaggctttctatttttagtatcactctaaactctagcgagtgaagatggctaaagtatagctagttaatgcttaatgcgtaatataaatatagttggtatatgattaaatactagtaagtctggttttcaagtaatgcagtttaaatggttcactgatgaattaaaattgacacacaataaattgtttaaacataatataaatgaggaaattaatgttttgaaggaacttcaatacagtataagaatatatgtgtttctcaaaatggtgatttatgtatagttttctagggtctctccttaactccgttgctagacataattggtgttcgtgtataaatgatttgaatctaacaaattgttaggttgaataaaattttgcagcaaatttgaaggtggatgaatttaagagccgttaatatagaagaactgcaaaagtacgttatctatttgtgtaaagccaaccaccaaaaaacaacgcattttggttcctttaataatcatttctttcttttatataaacctaagatacgttccccatatttcactcactcaagaagacatctaaagccatcaaaaatatatccatagaagcttcatcgaaatg

SEQ ID NO: 32658 - DNA, 3000 bp, Unknown; identical to SEQ ID NO: 947
  misc_feature (1)..( 3000): 2750-1469P.txt file - cDNA_ID_3059725; gDNA_ID_1620340; Annot_ID_153941

SEQ ID NO: 32659 - DNA, 3000 bp, Unknown
  misc_feature (1)..( 3000): 2750-1469P.txt file - cDNA_ID_3059730; gDNA_ID_1620340; Annot_ID_153936
tcgtttttgagctttgatttttagtaaaagatttgattttggttttggaaatagagaaataaaaacgatggagaaacgctgagaagatatgaaaaagaaaatgagtttgcagttaaaaagggtaaattggacaatttggtttgacaaagtgccttatcttttcaaagtgtctaaattcgtacatacttttctaaaagtgccatagaatgtaatattctcttaaaagaatccttgaacacaaaaaaaagagtaacccatagcggaatagtgtttatttgttaaaagggcaaactatttgtgtgtttaattagtcccgaatccgaaaaagataagaaccttgttgtctttcgttgaagaagtcttatcggattgtctctggtttttacgttttttttttttttggtgatattggaactgaagataaagattgatatcaaaacttaaccatattgtgaaacgatgaacatgtaagaggatgataagctctggctctcttataaaaatagtttatacgtgatccctttagaaaatgatgataatcacaatattaccagtgacataaaaggaatatatcggacttcagctgcacgcatgcaacaaaagaataacatatgatcgaaaagaataatcacagaaaacttgattaaaattaacaaacatcacacgtaagttgacaaaaaaaaagaaatacaaataataatcacacgttataaatggccatgggacataactaaatgctctaaaaagagtaaaacgttacgtaattcatttgtattagtattagcccactgagtactgatgagagcggaccaagtctcaaatctatgcaaaccacaagaaaagacacctaagtattagtatgatgacaattctgtcgtaaataagatttagttgttcgattatattctggctccatggatttgtttttttgctcttcttgacttgccttaaaaaaatttaaagaagtctacggattgtcgggttgtcaaaacttgtttttggtttcgagatttttattttggtgatttgatagagaaaccaaataaaattaaatatcaatccagcttctaaagtttcaatctaataaaaacaatattaaataatatataagaaattataaggaatgataatttaataggttcgtcttctatgtcgattaagttttattccggtaatgtttttcaactaaaattaaaacggccatacacctttttagttttgcttttcacgatttttttgtcacaattttgatacagtaccaattgtgttaaatatttttttgccaaaattatcactctataacactttaagttttaactggagaaataacaattttagctagatctttaatttatctgtgaacgcatttgagttttggatcattcatttctttaaagcaaatgtttgtacttcctgaaaacacttgaaaaagaatttggtagtttggccaaaaaagaaaaacttgttttactttcgttggttgggctgttacataacttgttttaagtgaatttgacatttctgtaatgaatttcatattaatagaagaaagagtctcgggttgacctattttttaagtaaaggtacggttgagattaattaaggtcgcaacatacttaaaacgaattattgatgttgaccacttttacctaacaatccataacggtgcgtgattagttttcgtattggttggtttatctatctgttttctgtttagtgatttaaattagagaggacccccaaactatataaattatgtgcccagttaagtttaatattagtgatgcatgcaaatactctactagtcatggagacgaacctaaccaaagtggcatttattctccgaactggtacatgagtaccataattatctagaataccgtacacaaaaatcgttatctagtgtctcgaaatcggtatcacaaaactagtcgatataggaagcattttaacctagattgagaaaatacacaaatttaccattttctaacttgcacatatatgatgtggagattttcaaaatacactatggggcatatatagtcttcttcttttttgttaaagtgtatcaacttttgttatttagaggaaggaattgaagtgttttttttcaatggtcaatatatagttgtgaacaattagaatttacattcaaatatcttcaaaatttataattttcagatctatgtggtacattacaaagtatcttggtatttaaaaagtcatctagtgtaattatactcaatgattaaattttggaaagtaatttgcatctataaaagataatgtaccatgataacgttaatgtacttgcaaatggccgaatttatgtaacgaattaacgaaaataccccaaggcaaagtcttcttcatctttttttttattttcaacttgttatatacttacacagttttttttttgttatgtaaataaataaagttaactaaaattatgacgagaattgttacacatacattatttcagttttactatactttcactagaaattacatgttccttaatgaacctcattacaaagattattgtcctctgacaatttgattaggcattagaaaactaacctatgactaatctgagtttgcttcaaaaaaactatttactaaaactggcaagccaaattaaaagataggaaaactaaaggaaaagagactgaaacttgacggcaaagacgaatgcttgactcattcaatggacgtacgtggctcgtaaaaagtttactaaacagtaaacacataacaacgaaagtaatcaaacacacacacacaaaacatccttgtctttaccaatatccgtacaaaaagggaataaaataaaaaaaaaaaacgaaaaacgcgtagagaacttttctcctttcactcggagaaaccaatctctacttcttatttaatgacaatgaatccatggcatctaagttaataatataggtagctacaactaattagagtgtttcttgttgttaaaaatatcgtacaaaaatg

SEQ ID NO: 32660 - DNA, 3003 bp, Unknown
  misc_feature (1)..( 3003): 2750-1469P.txt file - cDNA_ID_3059734; gDNA_ID_1620340; Annot_ID_153935
actacaataatgttagagttgaagtggttcttaacagctatagttctcgccccttctgtgcaaaatgtcactccagatgcagagctcctatcattctaaagctttgtgatccatatactggatacatttgttccgatgcatgtgtagtgcccgactatcaatacagctaagacaactatgtagctgtttatttcactctattgtttctcgtaattttttggatgtaagagtttatttccaactacaagtgctaagcattctggttatattcatactgtgttcatcagtacaggcaggattaaactgtatcgatgacatatataaagtcgtaacaagttatgacaaacttgctaaaaaggtagtagcaactaatatgatttagttaatgaaaacatagacagaaatgatggaaacagatatttgtgaatcagaaatgttattaaacaaagatgaaaactgaagtaattttaacaacaaaaataacgaatatgtgatgtacattgcaaatgcaaaaattataaagacacagcggataaagttttggaaatacagagaacaaactcactcacgtgactaaatctaaaagacaaggcaagagttcaatgaacctctgtatcattttgattttgacatttacaagagttacataagcaaggaggaccatgacatgtaacttcaaactcacagtcattttcatgacaaaaccaaggcttcaaatcgaaatgatgcgactgagttgatttacaaaaacagtggtccgtttcagtataccttagataaggccgccagattttaagatctgcatgatggtaaagtgattcctccgcagaaagatgcgattattatgtacagcaagaaaactatcaagcatgtcaacaagaccctgccgaacacaaacaagaaaagcagttttgttgattaataaaagtgatctggaactcaagcatcaaaacaaaacaataatgaaatttctttaagcagaggtggaatcaaggcagtgtagttcctatcagccaaaaattagatattttgtcgaggagaatttcccaaaatcgaaaataatgttgaatcttagaactactgtatctctagtttaagaaacatatcaataaactatgctgcaaaggcgagttgaaacacctagaatgtagaagagcgtatctcttagttagcaaagaaaaggaatgaagagaatctagaagtgagagagatccttacaggagcttagcatttttcatccaaagagctcggcgaaggcgcttagattgcttcctgaagtgaaacgagctatcttgcattgttgctgttttatcaacaagaagctcaatcctatcacctctttccattatcttctcaatgttctctaccatgaccgatcgaatctgtaaacacgataacacaacaatgagataacaaacttcatctttcacccaagacagatttaaagaagcctgtgtgagccaagaaggcgtaataactcataaaaattcaaccttttcaatggatatagctgagtaatatctagagatcatacgaagaaacaattatacctcactgacttctcctctaacacgattgagagtatcaacactaggattactagagaagaactccatctgctgatgcaaaacccttgagaattcatcattcattgcataagctggagcattatgagccactttgccatagtttttcatgaatctcatatgaatctcttccaaatacgaaaatggaaccctccctgaaaatccaatcaccaacacatcaaaacataaaactcagaatcaattacaaagactaaatcttcttaagagagattacgattcggagaaagtgaaaaatacttacttccaaaggtatcattggccatacagagaaaggtaagaccatcagatctaagaatatggaagatataacgatcttgagagaaacaaagtctttcatcggagatttccggtgaaagcttctcgaggatccgtcgcaccacggcgcctgtgtttcccgtaacggcgctgaattcagctaataccacggtacctctcgctacaacagcatagacaatcgccatcggagaatcttcaattagagtgattcgatgacagagagtggagatcacgcgctccggcggcgagaaagttcaacgtcggctttgctgcgatcagaacagagtataaaaatgcgaagttataaggttaggtgcaaacgtttcgaatataaccccttgttttattgttacgtttttaattgtcacctaaaatattattttgttacattttaaaccctgatgcatcggtttacggtttaccaatttattaggccttggtaacttatccgaaaacaaaccgacccgaaattcacttttcggtttgggttcggatactccaataataacttgatcgtttccttctttttaatttcgattatccggttcggttcgagtatagcacgaataaaccgaattaaaattaaagccctaatttaaatataccgatcgagtcttcggcgagcttacttcgccttgaatcgagtcttcgacgagtctccggctgcgagtttctcttgctccggcaaacagacctgtcattgcttctctctccggctaactacacaggcgagcttctctatttattttcttctgtgtctccagttgcttctgatataatgaatatgctcttgaagcaaattgtttctctgcttctctttctccagtgaattgtttgttgtattataaacgaggtttaggaattgggttaataatattggaggattgtgtttgtattctgtgtccgacgaacaaatgacatttccgatttctattgtgctacgagctcagtgtttagaagggttttgatgttctctattgaatattcatgttatgttagtttgatgattagatgattttgctttgcaattactgtgtttttttgtctgactggctctgatattatacaacgtgtttgactccgattggtatcaatcttcttcttcgtcttcagaagcatg

SEQ ID NO: 32661 - DNA, 3000 bp, Unknown; identical to SEQ ID NO: 945
  misc_feature (1)..( 3000): 2750-1469P.txt file - cDNA_ID_3059738; gDNA_ID_1620340; Annot_ID_153932

SEQ ID NO: 32662 - DNA, 3003 bp, Unknown
  misc_feature (1)..( 3003): 2750-1469P.txt file - cDNA_ID_3059742; gDNA_ID_1620340; Annot_ID_153931
taaatgacaattgagtaacctggatcatttcagagggatcatagatttgagtccggatgataaccaatcgatctaatagatcaatagggactccatgggggctgggcatatcagtccctctgcaaataaagtaaatcacagtaccaagttaacaaaaactcacaagatttccaaaggaaaatgtctatcaaggtctagcgctcttctcaccttacgttgcaaacacctctatttgttgcaaatatcactatcggagataatgagctctcaagagcacggttcaagtatgagaagcactccatatcaagcatatgaacctgaggttttataattaaacaaaggtattcttactgctcctgagtcctgagcaagatcaatagtggaatgaaaaaaaactttatttgggaaaatacctcatcaataaatagaactcctggaacaagctctgccacaccttcatctatatatcggttcacaacctacaatggcatataaaaatattagaccttgcaaaagagaaagtaagatgcttaaaaaaatcacccatgtactagcgaaaatcaccttgttaatttcttgccgaagcttatcagtgatctcagtcttccgcggtttcatcatttggcccatcaaagaaagtatatcctggccaccttgaggtcgagcatttgctgcatccagatcttggagtgtgacatcctatcagtcaaaagtatatggtctagttgagtaacaagtagtcttaataaacttaggaactaaggttaatacacatacaaactaatacataacagataataaatcaacaaagaaaataattactctacacagaagggagaggtcaaagaaggtaaacctgcactatctctttctttttgtggacctctcctttgggaagtggaacatattcttctgcttccagatcaaattcagtggcaaaagcatcacttctacctacccgtttgacagctccactgtttgcttcgatatagattacatctcctacagctacctgagaggcaaacagcaaaaatataaaaagaaaccaatcagaatgacaaagtaatcagcaaattcatacacaattgtccccacagaatgacatcgttagaaaaccaaaaaggtgaaaagaaaagcaggttttggaacaaactgaaaagcaaaaacttaggggaaaataccacatccaaagcatagcatcgcatgccaagaactgaccttttccttaatcaaggcatcatagatagtgggatccaatttcagatgtttggttcctttgactgtcttgagtgtaattacaacatggctgatgcttttaccataacctccagtgaggctttcagtttcttctggtgacagctcggtgacctagaacacaaggacaacatgtcaaaaaccaattagcgagacatgctattgcataagaacacagcaaaagaaaccgcaaatagcaacacacctccccttcatagacttctttggtttccttgatacgtagaccaatggcacgtctaaaattctccatgagaacctctgttttcttaacctctgatgagtaaacctcagatccaaccattggacagaatggaacctgcaagaaagaaacaatccagataaaataagctaaaagtaaaagaaaaaagcttcatacaatgaagccatgtggaaacaatgtaacaaagaagatacaaaatgagacatccaaaattaccttgcttcccagctcttgagagattccaagagccaaagctgttttcccagttccaggaggtccagcaagcaaaagagccttgcccgccattttcttctgcttaatcatgtcaactacaagaccagctgcctctctagcctcaagttgaccaacaaatccagctgccaattttatagggataccagttggctagaaaaagagacgcaacattagcaacagaaatgatgtactggttatagaacgagatcacacagatgcttgagaaactacagtcagtaaaagaagcaaagatagttaattaaaatcaaagtgccgtgccaaagtggaagagcaaaggtcttcaaacatcggtcaagtactatatatttcataaaatacatgtattaaaattgaatatttgcaaatcaaaactagagtataattgtgctagagccgaaaaaagagtctcggagaataccaaacgaagcaatgagcttgaaacccctaaaaatcattaaactttaaacacaaaaccttaaagaactttgagcaatacgagaatactgcaatgcatcttatccccagaaaagtcgaaactttacaaatgaaaactagggtttgtttgtgctagaacagagaaaagaaactctaagcgtagtaccaaacgaagcaaatagctttaaaaccctaaaaaagcttagaacataaaaccttaactaaaccctaaactcgagcaaactactggaatccactagagtcaaagagagagaggagaaggagcacctcgaggccaaggcctttgatatgggtgtgagtagcaatccgttgtttcttagcggtggactgaatttcttcaatctttactttctccatctccgtcaactacaattactttgatctgctttaggtcttttgttgtattctccgacgacgaaaacgacggcggaaagttttgagctttattgagtttgcaacgcctccctctgactccaaattgccaaaacctcttcctaacaaagtttatatgttaaacatgttgttgcaacaatgggcctttatattatcctttatttacaaaatcaccccacacttcctaaactcagaaatagaaagaaaacgaaaacaattagagaaaagggcgaaacaaaaagacaggactcaatagtcataaatgtaaattaaggggtgaaattataatatatgaataataaaagggtcttctttttggaaactttctttctcttcatcaacaatagtgataagcttcttcttctggaaaaaaaccagaggccgtctcactctctcgctacatg

SEQ ID NO: 32663 - DNA, 3000 bp, Unknown; identical to SEQ ID NO: 949
  misc_feature (1)..( 3000): 2750-1469P.txt file - cDNA_ID_3059746; gDNA_ID_1620340; Annot_ID_153925

SEQ ID NO: 32664 - DNA, 3003 bp, Unknown
  misc_feature (1)..( 3003): 2750-1469P.txt file - cDNA_ID_3059811; gDNA_ID_1620341; Annot_ID_153984
caaacttgttcttgaaagttactgtgttaagaactagatgttataagtggacggagctttcagtgttacttcaaacaaatcaaggagacaaagctcgacggaaactgatatctgatcattattacaaggttcaaagacagacctgagtagtggattctgacgcggatggtgacggaaacagaagaaatagagagacgatgaagaagaatgcatccagagccattgatgattcagcttctcgcgagtcttgcttgattcagcttcctatcattgtttccattctctttttgttattggccgatcaattggaaagtcaacggaaaatcaaatcatttaataaaaccggttaaaccggatttgaatttcaattggtttttgccaaattgcagcagagctggccggttcgcggtttcaatagaacccttaaggtaaggtaagggattttactttgcccttttagttgaatcaatttttgaaaaaccctcacttattcttactaccccatctccttcttaacctatttgaaatacaattttacccttctcctttatcctttttaattttctatttaagttttgctaccaaacaatctattaaaatcaaccaatcatttacattttatttcctatctcattaatcagttaaacctacaaaaaaacgctggacaacagaaaccaataggtacaactatgttgatgaacttctacgaaaaacatataattacatatcgttttatttttctctttcattttcaagttataatcaaaaagacttcagtcatacgcgtttcttataatggatactattaattttcttgtcgtatttatacaaattaatatgttttgtattggtacaactaagtacaacccgcacaactaaggtcttttcacttggctagttttcagaatattataaaatatgaaaatttaaatccaaactaagaaaacttaaataatgcatacacaatggtaatgaaattacataattagtttttgacaaaaatcatattttctaaattaatgaaactcttatcacaaaatctaacattcatacactaacaaccttaaactttcatggttactttgtatattttaacaaaacaaattaaaaattttaaatacttgtaattagataaatataaatacaccgatacaaagtaattgtattttgatgggggaataccatatgttctacccataaaaattaattttgagttgataacaactagatttattatattctcgatattgtacaactatgagcaaaaatgtgcaaccgagtacaactgtacaactatgggcaatatatttttcagatatttatagatattttttagatatttgtagatattttataataaaaattagctttattcttttgtgataaaaatatttagttttttttgtcatcaaaaatacttaattttatagttaaataaactatatttttccctttcaaacttttttttcattttcaaaacactgttatttaataaaataaaatactaacattcataaaaaattttgtgttttgttttggatcaaaatacattgacgtgtagattcatatttattttggagttttttttgacaagaaatcttagattcatacctaaacccagatacataattgtacatgagcgtaccagttgtacctaaacgcttagatctattatcttaaaaaccaaaagacagccgaacaattgtatctaaacccaaaaacccaacataattatatctaaaaatttagccacaattatacctaaacacaacactatctaaagactcaaacacgaagtcttcttcttctctttgtcattctccttctcaatttctttctccacagctttctccttcttcccttttcttctagtttttatcattcaaaagcaatctcataatattttgttttaatgcatttcacaaactgtctctaaggaacaaaattcaaattcattcgaatcccaattgtaatcctaaaaactaagtcgtaatggctattacaagaggcttttaagggacaatttcgattttaaatagataattaattcaaatttgaattgtactcataaaaatctaaattataatcgaaatttcatccaaaatccatcattttcaaacaaaatcaaagaggaaaagagatcaaactatcaaatctaataagaaataaaactctaattaaacacaacaccatcaatcatcatatatggaatagagatagatctttggattgatagaaacaaatgaaaaggtaaaaaagatggatctttggattgatagaaagaatgaaaaggcaaaaagaagacgaaagattatatatggaatagagagaagagagtaaagagaagaagaagaagaagaaacaaatcaaaagttttgtttttgttgaattgagagaaaaataaattgagatgaaaaaaatttgatctgagaaattaaatttttttttgttgagaataaaagatccaaaattgttatggatctagatccaacatagaggttgggttgtaaataagtaaaaaactctagttttacttgtcttttattattattctgatttaaaataaataaataaacatatgtttttttataaggggctaactagagaatgtttgaagctgagggggtggactagattaaaatcctaagctaaggaagaagaaggttttgatgttagtgaaaggttagattttttattccgatcttggtcagtctcctccaatcgtgatttctcttctggatccaagctgatgagctctacgtcttcctcccaggtcatcactcttctctttttatgattgtgaacttgttttcgatggttttgatcgatttctggttcagttttttttttatccttcttaaaggattttatactatagatgggtcgatcaagtgttattgatatgccattgaagtgaactaagcttgaaatgagccaagttaagtcttttatggggattcttacgaagttactgaatctgatgtgaatattttgtggcagatg

SEQ ID NO: 32665 - DNA, 3000 bp, Unknown; identical to SEQ ID NO: 957
  misc_feature (1)..( 3000): 2750-1469P.txt file - cDNA_ID_3059815; gDNA_ID_1620341; Annot_ID_153983

SEQ ID NO: 32666 - DNA, 3003 bp, Unknown
  misc_feature (1)..( 3003): 2750-1469P.txt file - cDNA_ID_3059821; gDNA_ID_1620341; Annot_ID_153980
tctctctttcttgcttcaaggagcaggtacagtattgaaggtccgttactcacctatttacaaacctttgaattttggtgacattattctccttaatctcaaattcctttttcttataggaagtcatctttatagatagccaaagacgattaaaggtacattacaatccccaacaccacattatcagaagtttttatatgtttgtttgaaagactcaaaaatcatctactttttactaccacagggtgcttcactcgatctatttatagtaaattcatatggttcagctttccaagtaagtgtttcaccctaaaaatttctctgtaaactatgacttgcattccaagccaagtaatcttgtctctggtggttttgtttccttaccaattaggccatctgcattgcgttgcttcttccatttctttcaaaactttggggcataccgtttaaccaactcggtacctacctaaaagatggtgcggtttgttttctcaacaatgggacaataacaaaaggatgtgatggggctccgtttttgcctctgttgtttgtgataatgaacattggctataacattgctcttttaagactcctcaagatttcatccgcggtggtttcatgtcttgcatcaacagtctcagtgccaattgcagtgtttctgttcacaatgccattaccgtaccttggagttgcatcatcactaccaaaagggttcatgggaggaacaatcatacttgtattgggaatgattctttatagttggacaccacacggagctaactcttctcatactgattcagtcattccttcacctcctccaacatagagagggcttaactaaggggttttgcttttatataaagatttgagagatttatgcaaattcggtttgtgtttaaataaacttatatttgatcatatgatgttaatggaaaagttgacattttgtgtgtgttgcgttcacattagtattctagttcattagtcaacggctaacataatcttgtcttcaagagttgttaccctttaaacatatcactacaaatcgtgtgctaaaccatttaaaagacaaatcaaaacaaaataagaagaaaatagcctgcaacaatcaaagttacttcatcaaaattgttaaatagtaaaagactaagcaaatcctacaaaccactgagttttcttaaaccatttgattctacttgtggcaaggtctcgaagacaccacaagttgaaggaagactaataatatttagctaataaaggtcatctttaactaaacagattgaatcactattgattccgttaccaaattcttctaccggtgcttttagtgtaacccccagaccaaatatcatcatctccaatagaatctactctttcccatttgttactctcaactctcaagattcatcttaaagatgtaaaacaaatgtttctcttcaactagcttttctaataaactcaagatgatcaaaacctcttctgttttctgaatcactattctcctcttccaaatgtactcccactcttttgaaacgtactcaaacggatgatcccaatatggggtttcttcgacttcttctttgggaaaatctccagagaaatcgacaatcttgatgtgatcatcagaagtatacagataaagcttgctgttcttataagccagatcccaaaaacccaaatttgcgcctcttgtataccaattcaaccaacaatcatctcctttcttgtgtgtgaacaactcaagcttattgaaaattcaagcaacgacataatctcctgttctttcgtttatccacagaacagctgctctttcgcttccgaagatatctttcgacacacgttccttatgataagactcaacgaaataacctcactcatcaccaccgcttcgtttgaatctcacttgtccaccgcgtattgacgtctccattgatggaagattgattctttcgcccggtaacatgttaaagatagaaaagtcgagataagaatctaccatcaatagacagtttccgaagctagccatatatataatagctcttgtcagagattccaaagagtttcgcgttgtaaatcttgtcttctccgggatcgaacaacatcgaagattcattatggtaatatgaattgccatggatacagaggccgcttcacgcatgttttccaaacggagaaccactctaagcaaacgttttttatacggtgaaaatctatagtgctcaagctttcgattatcggacgtaaaagattggaccaatcttgattttcagacattttattcactcatcaaatgtctgcgcttacatcacactaatgggagctatagggttagggttttagggtttacaaccaaccctgtacatttccctttttgatgttctgcttttcactttgataattaactgtattttatattttactttcttcctaaatacaataaatttcttaacacattcaaaatcccatgaattagaaaattggttttcacatgtttcagattgatgaatgaaaattctcatacacctgattacgtagtttcttatgagatacatttataatcatatttatataagatttaggcaaaggttctaatcttgatttttatgagtagttgtggaatatagaagataagaagagacagttatgtaacaaaaattaaaatcccagaaattcctctcaacctttgtcttaaatccctaaatgttgtttttactttaaataccaaaattacagacacgttttggtcctaaactttctccctatcaacaaaccctataatcctttgaaccgaataccaacgaagaaaaaaaaacattctattcatagccattcacaaccaaaacacctaacgttttcttgctaaagaagaaacaaaaaccagaggaagaaaagcaaaaaaagtaagagaagaaaaacacaaaaaaaaataaaacctttctatttctcttcctcctttgagctttgacctctcctccatctcccccacccttttatgcaacaatg

SEQ ID NO: 32667 - DNA, 3003 bp, Unknown
  misc_feature (1)..( 3003): 2750-1469P.txt file - cDNA_ID_3059825; gDNA_ID_1620341; Annot_ID_153978
aagaaattgaagtgctttctcaagaaaagatggacttccatcgatttcttctaaagctagcaaaattggtcttccaacaaccgaagacttcaacgggcgctgatccctccctgcatgtcagggtgttactgatatacatcagaaatatgaaaggagccatagcagaggagctgataataataaaataagtgagaactaacatgaattgaaagatgcttcaatagtattgtttgcttctgttcggaatattccattttgaccaattacaagtgctgcattgggagcttgtgcaagggcttgctcaagggcagccttccattcatacaagtcgtccaatgtctcagcctatgagagccaaataattagcattcgatagaagcataacatagcacatatcgaaaaagggggaagaaaaattaagttagccaagcaaatatataaatcaccttaagggtgaaggctcgtccatcacgcccatctgggaatagtacagtcagcaacttcttatcttctctcaccacgacactgcaaacaaggatgttaacgcaggctagaaagttggagctattcttataaacaaaaaccacatgaaatttctacctccccgaactgttcaagtcaatgcctccaagggtcaaatttacttcacctcccttttgtggtaatgcactctgtcaaacagttgaaacaatgagtttaagttataaaatagttctagaaagtttggagttgataatgtaaatcaacatcctcctaaagcttttagcaaattaatacaaccatctaagatttctattgatcaactatcctaagttccaaaagctcaacagtaaaagtattatatgaattggagaaaaaatcacatcaaaggatcacaaacacttactggatcatttttgaaaaagaccaaagaagttcgggtaaggataaaccaacgcttcttccaggatgtccaacctagtcctgccaatcagaatgccataaagaatttagtaaacaacaagatgcttgtaaccaaaaaaaagataattttgaaagaaggggaaaataaaagagttcaccttttgatgatatgaagagagggccactcttataaacctgtcaaaattattatggagtacaatgaagattagcatcagtttgctttaactgtggaattttcatacaaagcaaaacactcagagctacatatataagaacgaacatattttagaacccagaaaacccccaaaagatgcatatattcactggcactaactcggtcttaaacaaaaatcgtacatacacagtgtcacatatgctttgaatacgaaacaaacacactaatcttatttatctcatccagtattcaactttcctaacaaagcaagcaggaaccaaaccagagactgtaattaccgtattcgaagctccagcttgaggcctctgtataacagctagagaagcctccattgcagaagtacacacttaatcaaaatgacgcatcagaaaaagatcattcgtaagcggaaaactaaattgctatctctcaaaagctccccagacgaatcaaactatacacattagcccgaatcgatggcttgttcaactcccatttccaagccaagctttcccttactttgcagtgaattcactacaagagtctgacctactgcacagctacaagagaagatgagtgaaggaggggaaggcagggaagggaaagttcaggcacagcaacgtgtagtctagttctatgcattgggccaatcaaaagacgccacgacaaagacatgtcttttcccctttttttgtcatactttcacattattattatacttttcgcatctagcggtgatggtactaatttcggtcccgtgttggtttggtttccatttagggttattcggtctggtatgattttgattttggattgaaatcgtatttgaaaagaaacaaaacaaaaaaagggaaataagttttgaactttttggttcaattcggttcaaattgtatcgatattagagctcacttcggttttcgtatatgttttttctttaaaagaatttgttccaaaagttcatcaaaattggtttaattcgaaaagctagatgttaagttcaaatattcatataagaatgcagtatgtatataatgttgtattatgtgatcctatatatataaacacatataataagtatttcagatattttatcataacttgtcaacacacaactttgagccattcctcatcaatcaccataaaacatcacatgaacatgaacttagcaagccaaaatcctaaattctgcgcatggctaactacttaacttggtcactatcgtatcgtccaacagttttttagtataaatgtttacgtttttttcaaccatgcatcacaagttagatgtagtgtacataagagttcacataacaaaagagcctaaaaacatcactacaccctacaccttgtattaacgtaaatatacactagatatggttgatcaaatataccatttcaaagattaataataaattctaaaattatagttgaagtatcttcccctcataaaaaaaacgaatatattcaataaaggaactactaccacattacatagagattaatctacttatatatctatttttatttacattttcaacaacataattgtagaaagtgatgtgtaaacaacactagcacaaattaaatcattacttattggttatgttttctattaaaagtaggaatgtctaaaataccgataacgggctaatttaaggtataatcactttttctgaaatttcctgataagggttaaaattgtcttttcgatgatttaccaaaagaaaaaaaaacatttgtcgtattttgcaaaacaagttgggcagcgtgtgttaatgcaaattgtttttaaaaacaaaagagagagataaaaaggcaaagtccaagtcagcaactcacttccgtctctctccccctcaaaaccagcagaaccagtctcactcgatccttaatccaccatg

SEQ ID NO: 32668 - DNA, 3000 bp, Unknown
  misc_feature (1)..( 3000): 2750-1469P.txt file - cDNA_ID_3059837; gDNA_ID_1620342; Annot_ID_154003
cacaggttacgatgtatgcccagttatatacttgtatatatatattaaaaaaatgttggacactgttcattaaaacatttcgaaatttaagagaatcataatcatagatggacacatataagttaattgttgttccgatcccaattgcaacacataaaatgttgcaagcgaatatttgagcgcagaatctccagacaagccggtggttggtaagtttgtagtaatggtttgcttttggcgacgaaaaccaagtaacttgtctcactcagaagtcagaaatagattagataattatcacaagagattttaattttccatgtctttttccctcaacaagcatatgagttcaaacacacaatgcaatacataaaactagaaatacaatgcacaaaaagaaaaaaaacgatcatgatgtcaaaacaatttattagtagagaacacaaacaaaaaaaaagtcaaaaagttactacaaatatctttttgcctatttcaacaactatatactaggtgacttaaattttgattaccaatcgtattaaaaaaaaaaaaaaaaaagcgatcatgatgctataatgcgttacggtaatatacaaagcaatgggcaaatggccctcaaatccactcattgactaaataattcaatacataaatacaaacatcacataacctctcatcttctacttgttcatcttccattccaatctcaagatgcacgcgaagaccgactccgaggtgacaagcctctcagcttcatcgccgactagatctccccgtcgaccagcctacttcgtccaatctccatcacgtgactcccacgatggggagaaaacagcaacatcattccactcaacaccggtactcaccagcccgatgggatctccaccacattctcactcttcctcaagccgcttctccaagatcaacggctcaaaacgtaagggccacgctggagaaaaacagttcgctatgattgaagaagaaggtcttcttgatgatggagatagagaacaagaagctttgcctcgtcgatgttatgttttagctttcattgttggattctctctactctttgctttcttctctttgattctttatgcagctgctaaacctcagaaacctaagatctctgttaaggtttgtgagagttgacttagtagatcgagatcagatttcagatctagagtcgtgcttacgtttgtagaattgaattttgcagagtataacgtttgagcaacttaaggttcaagctggacaagatgctggaggtataggaactgatatgatcactatgaacgcgacactgagaatgttgtaccgtaacactggtactttctttggtgttcatgtcacttcttctccgattgatcttagcttctcgcagatcactattggctctggctctgtaagttctaaaatctgaaacttctttaaaatgtgtctaattcatcttcatcaatgttgttgtcatgttgctatcaccagattctctttgtttctttttttttttatgaaaaatgtataaccgaacctttttcggtttagtttggaaaaaagttcggttcggtttagtttttggttagtctttgatcaatgttgtcggtggctattatcacatggggttgatcaggagtgcacattttggtgtttagttttaaaattttgtgtttaaaatatgtgtaaccgacaaaaaaatagaattttattggaagtggtatataatggatatatatttttaaaagtttgatctagtgtggttgttactaaattcaattttgctttatttgacatagacattttcttaacatttggttttacaatatagttttgatgacccacttccaatttaatttgatcgttattctttttacttttgtagattaagaagttttatcagtcaaggaaaagccaaagaacagtggtggtgaatgtacttggagacaagattccactctatggaagtggctcaacattagtcccaccaccacctcctgcaccaattccaaaacccaagaagaagaaaggacctatcgttatcgtcgaaccaccagcgcctcctgctccagtaccgatgaggctaaacttcaccgttagatctcgagcttacgtgttggggaagttagttcaacctaagttttacaagagaatcgtgtgcttgattaatttcgaacacaagaaactcagtaaacatattcccatcacgaataactgcactgtcacatctatttaaaagaagaaaaaaatacacatgagagtgcggacggtctcgtattgggtagtgcgcctatggccctatacatgttacaaggtattgcgtgtggcctaccccaaagcagaagaatcatcatcagtgggtttcataaatttaatttacgtaattggtttgagagattttgttaatgatacacagtaaacgagaagattcacattttgttttctttttttaatatgttttttcacgcaaagtatcaaattcttatttaatggagaaataccttatagtagcacacattttgcaaatttttaaaattaatattaattagtaaatttatacaataactagtttacacttattcattatttataaaaaattaatagtaactacaattttcttaaatcaaaataaaaatttcgaaatatctaatcaccatttcgatgagaattctttatgatttttgattgaaaagttttcggttattctgatctccaaaattatgttcataattccgacctcagagctcttatttgctaattatgctatttgtgataattgtcctaaaaagggattacaatttttaaaataagttaaaatattaaaacaaccatttgtttttaacttttaaagggaaagaatacaatttatttcaaaataaattgggccttaatctgagtagctcggtccaataagaaaaggccttgattagagcaggtctggtctaatcagaaaaaggtaaactcggtaacgaaatcagaattcgtcggagaagaagaagaagaaagatg

SEQ ID NO: 32669 - DNA, 3003 bp, Unknown
  misc_feature (1)..( 3003): 2750-1469P.txt file - cDNA_ID_3059853; gDNA_ID_1620342; Annot_ID_154001
aaatatatttacccgatcattccataagtttttatcgaacccttaaattcaataatgtaactagtgacacataccaaaaaacggtcacacaagatcttataaatttaagagatattattagaataagtaaaatttatacgaaaagtgaaaatagatatttaaaaattaaatcatatgagaactaatacgcaattgcaccattaaaccattcttcttaattttgaaagtcattttcctcgatgtatacttaactaagtgttttattttctccctcttagtatgtgtatatatatagtacggtgttgtcatcttcatcgatcaacttcaataataaattttagtacatccttagctaaaccagtactataccaaaattcaagagtcaatttttttgcttttttaaatagaagaaaattttatatatttctttgtttacatgaataatttctaacaatcccattaactttgactagtaagaattaatttgaataataatagtatatatacatatatatataaatatatatttgtttgtttacgtgaataatttctaacaatcccattaactttgactagtaagaattaatttgaaaaacaataatatatatatattaaaagttatactaaaacttttaatatttgtaggaatgccctacagatataaaacatttatgccctttatttgttttttgcataatcaaaaaattaatagtatataaaagttatactaaaactttatagatttttttttttgaactttataagcattttgtaagcaaaaaaataggaaaaaaaaacaaaattatattttttaaatatacctctatttagatttttacctccaaaaccattcatcaaattcacgtaatcgagtttttcaaacataattgtcttaatggatagcaaagccaactcatttatttgattaataaaaacaaagtttttattttgtaatcaaagttcaagcaccttacattagaaagtctttgactttttttttgtaatcaaaattttagagtttaaggttttatttttcttaaatctaaaattttactaaactaaattcattaataagacattttattaatttaaaaagatgaaaaaaagatagtaaatgaaaagtttaacaaatataaatatatagaaaaatgcttataattgattttttttataacataaaagtcttaaaacttttttataaaaatatgctcctctactataatgtcctaagccgtggcttcacttgattgtgtagaatgtcgaacctggctacgaagcacctaataatgttagacattttgacgtggtaggagttgtgaaacgtctgactttttcttcaggcattggtattcctaaaaattatacatgtggccgcaaaactgcacttgttccgcccagagtatacaacacttgctaaagatgtaagtgagtttagtttaaattaattttatatcgtgtgaactaagatatcttaaaaataattatttcagtgaattccatccttttttttaagaaatttatcgtgggtcaaaatatatgagctctttttacaagggagtaatagatgtgatggtttgtaagactagaatagcgaaaggggagtttgttgcgttcgtgaagttgccttgctcaaaagtggaatctctatatgtctcattagacattttgctaatccaagcgaaacgaaaggtgcgtggtggtcgtcgtcttactgatcccgacacaaagttagctacgcatacgcgtttgttaatagattttgtagcttttgctcctcctaaatagtcttttgctcaaatgttacccacgttgaggaaaattgtagggtttaacagaaaattctaacggaacgttaactctgtttacgaaaatttcacggcatgtccgaattggcccagtcaataaaacttgaccattttatcaaagaataaaaaaaatatgatttaaataacatttcgaaagttcatgtttttttcgtcccaaatttaaaaattagcgattttttcaatatttttcccgtaaatcaaattatccgaaaagttttgattttgactttgctaaaagagaaaatctattttattttacaaattgatcgtgtaggaaactaattcaagttcaaagaatttggaaatctccaaattcgaagtgctgagagacattcaaagagcacatgaataatttatcctttttcaactttttcaaagctacaaattctgatctcactacaccaaccagattcggaaaaacatattatatcctaactattgagcatctacgttgcttatgtttagttcaaattttgacatcatcctagttgttcatttgatttaaatttttgatacctaatacagtaatactaatgccgattataatagagaaatatattactttggcatgttttaacgtgttgaaatgtgaaagtattttatatttttaccttttagacatgatcaaatgtttatttctcgaaagtggtaaacgacgaatattaaaaaaaattgtattaaaataaaatcgtaaaaaaatcagaaatttactaagtttaatctctgagtatatatgtgtgattatttgtggaaacgtattcagctattgtgttccgtctattcaatcattttactattccattcatagtcaaatcccagtgtttcaatcctaatcaaatttggatctcgaaccaaccttccaatacgttattagtacttacaagaaaggtgtagtagaaatttgccagtcggataagatcatgtcattcattcgacaaattcattgaccaagaccaagaccataagaaaaaaataattccaccaactcttgtttttttttgtcaaaacgtgaaccaccaactctttacttggtcaaaaggttatttggactttttaaaaactccaaagtagtataggataaacgaaaatttccaggttcaccaacctagacgtttgtctcctctcctgtctatatattcactcatgcaaggccaccagacctcattcttccacaatg

SEQ ID NO: 32670 - DNA, 3003 bp, Unknown
  misc_feature (1)..( 3003): 2750-1469P.txt file - cDNA_ID_3059857; gDNA_ID_1620342; Annot_ID_154025
taaagaattccgcaaatccaaaataagcaacacaaaagaacatagagaggaaactaaaacaaaattctgctcaatgccacacacctcattccagaatccagatcaattccactcaacatctgtgctgcttttgaccattcctgctctgattcatacaaacccgcaagtttttctctgataacaagtgcctgcaaatacaccacaaacagtttcatctcttagaataaagagattgaaaaacaacacaacgtacattgtctcagttatcccaaaatacagcatccttagtaaacaaatatctcaaattagctttcagtgtagatttcacataccaaagcggtacaatagcaaagcgactctacatacctctcaacttatgttaagtaggtaaactaattagggtttaaaaagtacacgattgctgctaaacagtaaggtatcacgaagagaaaacaaacctgttcctcaaaggaaacaactctaggctgaatctgggtaagagtaaattgagcaatctccttctgcgtctccggttctaatctcccaagctcttgtgcgaaagactgcaaaagctgcctcgaaaccaccaacgggacatcatcggaaagaactggaaaaattgtgaggaagcaaaaatcaaaatcaaaccagaaattctgatataaaccgaattccataagaacaaaaagcagttgtcgaatctcttatgaagttgaaaccatgagaaagaagggagatgcgaaattactgtgatcgatgaatctctgagcttggagaagatcgttggaagagagaacagaggagaggatgagtttgtactgttcgattttctggcgttggtcaccgattgcagaagcgttcgtcaaagcttcatccatggcttctcttctgagattttctctcccgcttcgattgaaaccctaagaaaccttacaaggttttgatttctctctcgctttttttttttttttttttggagtttgctctctttttatattaaaaaaataaacggggactagattctgtgccggtgatcggagaggcgctttacaaaatttacttaatatggtcacaactcatatgagattagtacccaaaataaattaaaatatatatatatatatattaagcataaatactatatttttttttgttagttcataaattttataattaatttgtgatggtaagtttaccaaattgattgtagattaaaaaaaaaaatcaacaaataatatattgtttagaaatatttttatatgtgagcctaaattactacagtaaatcttttacacaaataaaaaaacacgtcgtgatttggaaaacacgatgatgaggtattttatgatgacaataccacgtttaatattatgataccagatcggaaaaagatgatatgttatgtgttttagagcttagggagcaatttaagatggaaacgtaaataattatttgttgagaaagaatcgactagaagcaatcgaaaaattgatcgaatggtcaagatatgaccgagaagtcatcggaaaagttgtgagcccaaatcttgagagcaatgacatgcaaaatgttttgaaagtgctctcatgaattaaaagtgaaaaaagaaccactctctcgttacatagagggtagtatataaagaaatttacctatctcagactaggaaaccaagtctcgcattggaatacgactttggtttaaacatgtgagctgactgacaaatcgattttatgtgctttacaacttagatataactgaacatattggtattggatgaggttggacgatagactcatagacacaatcgttgtctcgaaaaatcacgagtttctctcgcttaaaggattttttttgatgaagtttatggtgatcccgttcgagaacatcacaattgtttttgaatcaactttacagatccatattgtaactaatgattatagactacatagtttaccaaaattacatttactcaaaagaacagatgcggttgttgatggcaaaacttttttggaatggtagacatcccattgaaagaaaacaaattgccatggtatggaattcatgataatgatttaactcgttatagtctggacaaattgtcatggtagggtttcattgctctttctttgggtagttacctcaagatatctctttgttcttccttgtgatagttccaccttgatatgtacaaccccacattaatctgctcatttcaacattaattttctctattgtttttaaattgtgtgtataagattatttcactaactaggaaaacaatccatttctttgacacatgggctttacttaaacaaaagcccaataacttgtgtttagaagtcacatgatcaaatctcaagacctattataaattaacaaatttcatattgataaattttaaaagatttcctattacaatatttaaagttgctacaaattatagattcttttgatcttttctgatattgtttctcaaataaaatataggaataccaaattacaatatgaaagttgcttcaaattatagattcttttctgattttgtttctcaaataaaatataggactgaactaccaaaggcaataatattcaatgtgaccaacaaaaaaaaaataaaaaataaaaagaaatactcaaatctcataacctttttgactaaatatatcaatttcttctattttcaatgagcataaattacacgcgtcctcagaagctgaatccgatttgcaattcttcaatctcaaccgttagatcaacaaatccggcatcgaattcctccgcgtggtttggtccatttttttaatttgagtattaattcttttcctatttgacaacatgttttattaattattattattattccatttgcattaaaatataataaaaagatgtaagattctctccgcctccttctctctataagaaccgacacagagacgaagaagaataatcactcgaaaactcatcaaatcaaaaatcaaacacagagaagagaaaatg

SEQ ID NO: 32671 - DNA, 3000 bp, Unknown
  misc_feature (1)..( 3000): 2750-1469P.txt file - cDNA_ID_3059859; gDNA_ID_1620342; Annot_ID_154024
agtctccttgatctctccttctttcatgaagataaacgttggcattgcctgaactttaaactcctcagcaacagtctgcacaacaacataacaagcaagataaaggctcagagaagtcaaaaatccctaagtttggatattgggatagtgtaagattgatgaaggaaactcacgttcaattcgtcaacatcgaccttgaagaagactacgtcgaggtgcttcttggctaagtcagcaaagacgggtgcaatgaaacggcaaggtgggcaccatgttgcagtgaagtctatcacaatctgtgtcatttccacacaaccatatttaagaaaacaagctacaccgatcgataattcaaacaatagatacgacatcggttcatcattaagataacaaatgtatgcatttcatgtgcttcacagaacatggataataatacaaacatagatacaaaatgggttcactaaagacaattttcatgtgatctctagcagatgattcataaaattgaatatgcatagttgagagattcacataacatgtttttatccaatgatgcttctatcaagttcttagggtttcaatttctgagattctgggttcctaaacaatcaattaaactattagggttcataaatttgacattaaggagctcaaaaattcgattggggacaattcaaacctaattctgaatccgtcatattctaatcaaaaggaccaagatcagaaacgataaagcagcgaaatcaatcagaaagaaacatttaaaaccttagatcgagagtttttaccagtttcttggattcgttggcggctttgagcttctcggtccaatcttcaacggtgtggcaagcgataacttctccttctgcggccattttctcttctctgtgtttgatttttgatttgatgagttttcgagtgattattcttcttcgtctctgtgtcggttcttatagagagaaggaggcggagagaatcttacatctttttattatattttaatgcaaatggaataataataataattaataaaacatgttgtcaaataggaaaagaattaatactcaaattaaaaaaatggaccaaaccacgcggaggaattcgatgccggatttgttgatctaacggttgagattgaagaattgcaaatcggattcagcttctgaggacgcgtgtaatttatgctcattgaaaatagaagaaattgatatatttagtcaaaaaggttatgagatttgagtatttctttttattttttattttttttttgttggtcacattgaatattattgcctttggtagttcagtcctatattttatttgagaaacaaaatcagaaaagaatctataatttgaagcaactttcatattgtaatttggtattcctatattttatttgagaaacaatatcagaaaagatcaaaagaatctataatttgtagcaactttaaatattgtaataggaaatcttttaaaatttatcaatatgaaatttgttaatttataataggtcttgagatttgatcatgtgacttctaaacacaagttattgggcttttgtttaagtaaagcccatgtgtcaaagaaatggattgttttcctagttagtgaaataatcttatacacacaatttaaaaacaatagagaaaattaatgttgaaatgagcagattaatgtggggttgtacatatcaaggtggaactatcacaaggaagaacaaagagatatcttgaggtaactacccaaagaaagagcaatgaaaccctaccatgacaatttgtccagactataacgagttaaatcattatcatgaattccataccatggcaatttgttttctttcaatgggatgtctaccattccaaaaaagttttgccatcaacaaccgcatctgttcttttgagtaaatgtaattttggtaaactatgtagtctataatcattagttacaatatggatctgtaaagttgattcaaaaacaattgtgatgttctcgaacgggatcaccataaacttcatcaaaaaaaatcctttaagcgagagaaactcgtgatttttcgagacaacgattgtgtctatgagtctatcgtccaacctcatccaataccaatatgttcagttatatctaagttgtaaagcacataaaatcgatttgtcagtcagctcacatgtttaaaccaaagtcgtattccaatgcgagacttggtttcctagtctgagataggtaaatttctttatatactaccctctatgtaacgagagagtggttcttttttcacttttaattcatgagagcactttcaaaacattttgcatgtcattgctctcaagatttgggctcacaacttttccgatgacttctcggtcatatcttgaccattcgatcaatttttcgattgcttctagtcgattctttctcaacaaataattatttacgtttccatcttaaattgctccctaagctctaaaacacataacatatcatctttttccgatctggtatcataatattaaacgtggtattgtcatcataaaatacctcatcatcgtgttttccaaatcacgacgtgtttttttatttgtgtaaaagatttactgtagtaatttaggctcacatataaaaatatttctaaacaatatattatttgttgatttttttttttaatctacaatcaatttggtaaacttaccatcacaaattaattataaaatttatgaactaacaaaaaaaaatatagtatttatgcttaatatatatatatatatattttaatttattttgggtactaatctcatatgagttgtgaccatattaagtaaattttgtaaagcgcctctccgatcaccggcacagaatctagtccccgtttatttttttaatataaaaagagagcaaactccaaaaaaaaaaaaaaaaaaagcgagagagaaatcaaaaccttgtaaggtttcttagggtttcaatcgaagcgggagagaaaatctcagaagagaagccatg

SEQ ID NO: 32672 - DNA, 3003 bp, Unknown
  misc_feature (1)..( 3003): 2750-1469P.txt file - cDNA_ID_3059863; gDNA_ID_1620342; Annot_ID_154022
aattgaaattccaaactatttttaagtatgaaataaatttattttttaaaatataagaagcctaactcacattgtatctaaaacatattatttatttttaaaaaatctttttttttctaacaataatcttaattaaaaagactaataaatgttagtaaaaatgtattggacatacaactaattgaaaggatttcaaagtttctctagactaatatgaggttcacaagagcaaatagataaatttagaatatcaagtatagttttgctataagatttatgttaaagatacaactatcacacctagacaaaatttaaaagcatatcatttgaaattgcatatgagctaaaacttatagtaaatatataccgatcaatagaattaaagaaaaaatgctttaaatttatatattaacgaaggattcaagttgtttacgtaaaaaaagaagaaggattcaagttaaatggtaaagacacatatagatatctaactagttttatcactaatcattagatatgatttgatactaactaagatacgtgtgaactaactgatccataagaaaatacaatttttgctaaatttttaaaattagaggatttaatagatattatctttaaatttgtctcacccttcaatttttcaattttgcattgaaattcgaattaaaattttgtaaatatgcttgcttatttgtgtgagctattggtctaaggtcattaaattatagtataatgataaagattgtaaattaatctttcctgaatttttaaaatgaagatctataaatgctttgaaaaaaagttaaactttgttgaattatgaacaacatactactctaattagaaagcaaatacaaaaaataaattccctaaaaataatatttagagctcctcttaataattaagtattgaaatattctttcactattcataagaaactatgttttaagttcaaatagaaaatcacaaatttatgttatattttttgagaacaaaattcgttttggatgaaattgtagtaaagtgaaaatatataagtttgtgtgaagaaatcagtaataacagaaaatatcaatttattggctcaaaatagtaaaagcattccatatttgaagcacttttggaaattgagacacaatgtttccacaagtcatcactcttcttcaagtattctctttcgtgggcaattaacatgggtttatctgcaatatatttaataagcgtatcgtgacacatttttccttctttgacgagatccttgcaacaagggtcaggcatggttccattttcaaacacagcagcgattatatccaaagcacacttaggagtgattttaacaaaacaagtattccataataatgttgcttcagcttcttcgactgagaaagccggaacaaacgcacacaccaaagctaaaacaatgaacaatgtagtaatctgagtgttaaatttagacatatctacttatggttgaaatatacaagaaatattcttattttactaaagaaatcgtaagaaagaatgattagtatttgttatttaaaaaatggggtaatctaacttttatataggaaatcaaaatcacaacgtaacttctaaaaaaaccaaaaaagattaacgttatatttaatggcaattaaaattttgacaaataaatatactaccaaacttaaatttaatagtttctattaacgttgcaaaattaaacaaaaaaaaaccctaaatacatgtaacaatatccaattcaatagatagaagaaagcaatggttaacttttttatattttgatatctaacaccaaatagttaatgggtataaggttcaaattgacatattttatggtattcagccaaataaattttaatttcaaactattttaagtataaaataaatttatttttaaaaatataagaaacataactcacattgtatctaaaacgtattatttatttttaaaaactttttttctaataataattttaatcgaaagactaataaatgttagtaaaaatgtattcgagatttaacttattgaaaggatttcaaagtttctctagactaaatttaaaaatattaagtataaggttcacaagagcaaataaataaatttaaaatattaaatatagttttgctataaatctgttgagaatataactatcaaataacatattatttgaacttgcacatgagctcaaacttatagcaaatatataccgatcaatagaattaagatcaaatctttgatgaaaagatcgaacttttgatgattccatcaggactccaattcgcaaaagtgctacttcgcacacgtgccaactcgcacaagtgccacttcacacacgtgccaactcgcacatgcgaacgaagaacacgcaacggagaataataaacaccgtcagcttttatcgtcatttttcgccgctctcaccgaacctctgctttctctctctctctctctctctctctctctctctctctctctctctctctctatctctactgtgcgaaaatggcgatgaaggcttctatcaaaggcaagtacgatactgacaaaaccagtggaatcggttcacttgctttcaacgccggcgatattaagctacgcgccaccatgaccgatgctactctcgtcgccggtcctactttgaccggtctcgctctcgctgtagagaagcctggttccttcatcgtcgagtacaacgtccctaaaaaggtcagaacaactcttttgatttgagtcaaagcaaacaaatcttagaaatttttcaattcccatggaaatgagattgattgcttacgattaaacctaggattcaagtcaaagcaaacaaacctagaaattacgcagctaatgcttgaattgaagtaggatttaggattctggagtttagggtttttagattctccacaagtttaaagagatttgcaggcagacatttaagaatctatgtgcttaactatgttggtgattttggtttacaggatgttaggtttcagttcatg

SEQ ID NO: 32673 - DNA, 3000 bp, Unknown; identical to SEQ ID NO: 963
  misc_feature (1)..( 3000): 2750-1469P.txt file - cDNA_ID_3059866; gDNA_ID_1620342; Annot_ID_154021

SEQ ID NO: 32674 - DNA, 3000 bp, Unknown; identical to SEQ ID NO: 962
  misc_feature (1)..( 3000): 2750-1469P.txt file - cDNA_ID_3059879; gDNA_ID_1620342; Annot_ID_154015

SEQ ID NO: 32675 - DNA, 3000 bp, Unknown; identical to SEQ ID NO: 969
  misc_feature (1)..( 3000): 2750-1469P.txt file - cDNA_ID_3059887; gDNA_ID_1620342; Annot_ID_154013

SEQ ID NO: 32676 - DNA, 3000 bp, Unknown; identical to SEQ ID NO: 972
  misc_feature (1)..( 3000): 2750-1469P.txt file - cDNA_ID_3059894; gDNA_ID_1620342; Annot_ID_154004

SEQ ID NO: 32677 - DNA, 3003 bp, Unknown
  misc_feature (1)..( 3003): 2750-1469P.txt file - cDNA_ID_3059928; gDNA_ID_1620343; Annot_ID_154079
agggcttgcccctaagacctgtgagtttttttcccatgctgttcttttgtgctagcattaggaagccactgagaaattttgtttgtagtgctacagaacttgatatttctggtgaatttgattcaggacaaaaattatgatcaatcacacacttctccgattcacacttaaaactcattttcctttattttgttatactttcaggatcagagcatgtgcacacactacagccgatatggcatctgcaaatttggtccagcttgtagatttgatcattccataccgcccacattctcgcccagcagctcccaaaccgtagaagctcgtcaagttggcgctaacggaaatgaagatgacagctggcattgacatcacatgttgagaagcctgcgtaagggatactttttttctttaccatgataggcttttcagttcttaggaccaaactcttcttttggctttggaatttatgaaaacacatttaggtaaattatagtctccaaactacatctatctggcaagtcaatgcttgtttacaggattctcacctaataactactgttatgccgctttaactgtaactatctactctttcactaaggttcactctaatggaagcatgtcctgtttatgctttgttcttcttccgttggtgactctcctctgataaaaatttccttgatttctgcctagttttgttcatatctgaatctcaaaagaattgctagaacggagaaccaaacaacgacactatatgtacatagattgttttgcatacttctatgtcaggactcaggacacatgtttctgctatgattgtctggtgctgtgtggttaccctcttacaaggagttcacttttctgaaatcgaagccctaaacatggcctcgggttctttcagatagatggtgggatcaaatcttgtgatcccagtttcagcagactctgtttcaacatctttttgcccgacagattcttcttcaggtgtcagcaatctagccttatagagttaaagctcgcgacttcctcccagtaaaatcgaatgttaatttggttagggtttagagaggttgaagctattggaacgatgtacagaaagccatgtcgatatgaataatagctaatagcattatgtctgcgaaggacaattactcaaaatcttatttccatagttcttagatggagagtcaaaagatacaaattatatccattgtgcgcaaaatgttggcaaacaaaaagaaaggaacaaaaagtatactgaacaagtataatatcagcagaagagagaagaagaagaaagctgagatatatgggtctttaagcgttaacccttttgtttcactttgtttgagacctctctgcaaaactgcttcagcttccctacccctcggattcttcagaagatggcaggatttaacggaagcaaaaccatttgttctgcgcagaaagcataaatcaggtgagcaaatctatgttcttggataaagagctaagaagttgaatgtaatgagaaaaagaaaacaaccttagctttagggttttgggaactatggttattgttttgatcggagttttggtttctctgaggtgaaaccagactattagggccagcgccggatgctttcttggtcttcttctcgtcactagctttgctgaaaatgactgtgaatccttcggctgatgccggattgttcacatcccattccccaaactttggcaatggtttccctttgttttcctgcaccaaagaaacagagattcatcaaacatcaagaaagctatagagactttttctgaaactgatcatcgtggtgatgatgaaaggagagagacttgatgaagacgttgtttgttcttaccgccattgttgttgagatcaaagcaaaatgaaatatcaaagatctattgagagagagagagggaggtgggaggagagagaagggaaatgcagttgtaatatagagagaggaaggagaaacataagagggaaacacgtcgtcgtcgtcgttgacaacagcattaaccaaatcaaacaacattattacacctcttcttctttcccgcgtaaatccctaaccgtactacctaacaaataattttaaaacaaaacatgattaaaaaaagtgtcaagcatcccttaatacattttcctctagaacgtgcgttataaacgtgctattgagaaagtcttttaaagcagatttgcttattaatatgcttaggtcaattgatttttcaaaagacagaactgttttttttttaagatttgcaagaagtgtttgttaaaaatagtaaaaaatttatgttttaaaaagataaaacacaatcgtttaacttaaacatgttaattgttaagagtataaaaaacaatcaatcgctaacggttaattaagacaaatatatcacaaaagttccaataatatcaaaaagaaattccaacttatcagttttatttatttagcaatcattttcaaatatataacgtagaattactataattttattttatcgtttataactcgcacatgcacagtaccgaatttaaatctagattaccgtactatatcactagtacaaatcattgtattatataacctcaatcacatatacccagtcatttatcaatcattcaatcccaaaacaatgaaaaaacaaatttgatacagcttagttacttactactagtagccaaaagtagtagctcgagcacaataatttatgagaaaaggaaaagtatttcatcactaaatatgcatgtagtttatttactctggaaagttgtgagagcccagcccaagatagttttgtaagtagagtgattgggcctagcccagcccaataaagttttgtaactatattaggcagagagagttggacctagaataatgtctcaaaatccatctgtttggatgcagtgatatctccattcccaattgcctaaacccaaattagaaattttgcagaaatcaaattttgtcgctaaaatccccacacagttcgatg

SEQ ID NO: 32678 - DNA, 3000 bp, Unknown
  misc_feature (1)..( 3000): 2750-1469P.txt file - cDNA_ID_3059930; gDNA_ID_1620343; Annot_ID_154073
ccagaatatttactcttgaacaatatcaatcaaacaacaaatcatatacaagcaattatggtcacaaaaacaaaaacaatgtctctatcattgacactcctcctcttcatccttgtttctaccgtctccgtgacctcaacactagaaaacctttcaccggcagctgaaaacaaaggatattggtgtgtagcgaataaaaaagcaacagatgagcagctacaagcgaatatagattggtgttgcagctacgaaggaggattccgtgattgtacacagatcaatcccggtggagtttgctatgaaccaaatactctacgagaccacgcgtcgtacgtaatgaacttatattaccagaaccttggtagaaccaaagaccaatgcactttcaacggttctggctctgaagttactaaagacccaagccatgacgcgtgtattttcatatcttatgattaatgtatgtgtggtagatttttaagccgaatctccaaataagttgaaaatgctatatattgatcaaatatctctaatctctgtataagtttatatgtaactatatattggagtatattctcaacttatagaacatcttcatatttctcaaatgttgttgatgaattaatcatttttagtacatgatcagatcaatacttgtattgatggctaaagacttcataaacgcaagatccaactcataaaatgactttatgtatcttgaaagagcatttcaagttttttgaggtgataatatacattaaacctgatgctaataggaaaggtttttcttgctggactcgtaacaaaaaaaaaaataggctaaaatttcgattaatcctatgaaaaagaaggtatggaatctttagcacgagagtattacattggaaaggagcacatgctgtggcttatcgattagagacaagtggactgaaagttggattacattgcagttacgtggatgtgacaaaaaaagagtcaagaaagttgaaaatttcagttacgttgctagaaaatgtgattttcttaaatgatgcattaaactatattgaattttcctttataccttttaaattttacttataatataacaaaagaaataaattttaataatatatatatatatgacgaggaaaaacaaacaagtgagaagttacacatttttgcataaattatgaccaaaccttcttttcttcttatcaccttttgatttagcgtataaattgacacaaacacataaaatgtttagtctgtgaacaaatatcaatctataagcaataatataatggtcacaaaactgatgtctctatcattgacgctcatcttcgtcctcctcgtatctaccgtatccgtgaactcgacaccaagaaacctctcgcaggctgctgaaaacaaaggagtatggtgcatagcgggtgacaaagcgacagataagcaactgcaagcgaatatagattgggtttgcagcgacgaaggaggattccgtgactgtggagcgctcaattccggtggaccttgctttgaaccaaacacggtaagagatcacgcgtcgttcgcaatgaacttgtattaccagaaccttggtgccaccaaggaacaatgcaatttccataacactggcattgaagtttctaccgacccaagccatggctcgtgtattttcgtatcttattagaattctaattccgcttttatgtgggaacttgttaagcctaaactccagttaaataagttgaaaaaaaaactatataccaaaagtttctctaacctcagattatatcagttcatttcatcttacaaatgtctaattttgccggccaaaagaccaaaccggcaaaagcaaggcttgcggccgctaatagtagtatatggttttctttggccaatgttacaaaaaaaagttcttgcagtctagtgcttaaaacctcaggggttttgtcacctttacatgaatttgaaccttgaaaatagcttaaacatattctctttaacaacaaaataattaaataggtaaaaattatgtggccagtttttaattttctctcacttgtaacattgtgaaactctcggccggctctgtttgtcgttatgtcaatctgaacatagatgttacaaacgtccattaaaagagattatatagtgacgaaaacaattaatgtcttaatgttctcgtgaaattgcaattttctatgtggcaggtagactagagatatgagatggtaacaactctaattaaaagacaaaaacatcgctcaagagtatattcacttttacatcgctaaatatatactgaagttattagctcaagagtatttaatcatcgccaaacctccttatctctctcgcttacttagggttcttagtatttcatcaagaattcagcatcaaatatcatacacctttatacactttggtctttgtgtaagcaccaaagcgtctttcgtcaccatcattcactaaatgttactcacttaatacattcataggtgtcttttttctccaaaaaaattataggtttcatataagcatttattacatttttaatcttgttcaaatcaataactaaaacttttaaaagtagctaataactctttacttttttaattaataataaatatttgagttagttgtatatagttattaactcattaatttttttaaaaaaatatagccataaatgaaagatatctaagttaattatttttttggtagatatctaagttaattatgatatatcaaaaaatctaccaaatattataagaagaaatatatcataatttttttaatggaatacctttagagtatttttatttatttattacttcctctaactatctctccctagctagtatatatatacatgtacttgcacaaaaagataacacatcaaaactattgaatccttcaccacttccaatgtcgtcgttgcaacttttaacacttcttcttctcatatcaactgtctctatccccgtcgtgacttgcagacaatggtgtacgccaatg

SEQ ID NO: 32679 - DNA, 3003 bp, Unknown
  misc_feature (1)..( 3003): 2750-1469P.txt file - cDNA_ID_3059934; gDNA_ID_1620343; Annot_ID_154072
aggagtttggggaaaaaggaagagtttttttggttggttcgagtgattatgaggttatttctgtatttgatttatgagttaatggtcgttttaatgttgtagatggcatcgggtgagggaattttgacggatggacagtggaaaaagcttgaaatagcaactcataattctggaagtttgtcatcatcgcctaaatctcatactctctttgctgatctgaacattaagtctcccactggtggcaaaggaccagttgctgggattcctaataggcatgtgcgacgtactcactcagggaagcatattcgtgttaagaagggtattaaactttcttcaaccttttgtgcttgttatttggctaatagatccttttagggagtgatatgactctttattagttcctttcaaatttgctttagtgaaaagacttaagttttcagtagaagagttcaagtgtgtaggtgatatatggtttacttatgtggcaatgatatctgcagagggtgctggtggcaaaggaacttggggaaagcttcttgacactgatgatggtgactcctgtattgataagaatgatcccaattacgatagtggagaggtactttcatatttgcgccttttgttttgtgttggatacttttccttgtttctttagtgtatctaacatcccttgattttatcttttattagtagtttgcttttttcattcatatactcaatttaacaggacgcatatgatggacttgttgattcaccggtatcagacccgttgaatgattacaaaaagtcagtagtttccatcattgacgaatactttagcaccggggatgtgaaagtggcggcatctgacctcagggaacttggttcaagcgaatatcatccttacttcaccaagcgacttgtttctatggccatggacagacacgataaggagaaggaaatggcttcagtgctactctctgcattgtatgctgatgttattttacctgatcaaattagggatggatttataagacttctcagatctgttgatgaccttgcggtggacatccttgatgctgttaatgtccttgcattgtttattgcacgggccatcgttgacgaaattctccctccggtttttctggttagatctaagaagattcttccagaatcttgcaaagggtttcaggttattgtaactgcagaaaagagctatctctcagctcctcaccatgcagaactagtggagaagaaatggggaggtagtactcacactacagtagaagaaacgaagaaaaagatatctgaaatcttgaaggaatacgtggaaaacggagacacttacgaagcttgtagatgcatcagggaattaggtgtctcgtttttccatcatgaggttgtgaagagggctttggttctggcgatggattctccaaccgctgagtcacttgtactaaagctgttgaaggaaactgctgaagaaggactgatcagttcgagtcaaatggtgaagggattcttccgagtagcagagagtctcgatgaccttgctctagatatcccatctgccaaaaagctgtttgattcgatagttccaaaggctatttctggaggctggctcgatgattcatttaagataacctctgatcaagatggagaaaaatcgagtcaagacggaaagctaagacagtacaagaaggatacagtgaacataattcaggaatatttcttatcagatgacattcctgagctaatccgcagtcttcaagatttaggggcacctgaatataacccggtgtttctgaagaggctcataactcttgctctagacaggaaaaacagagaaaaggaaatggcttcggttcttctttctgctcttcacatggagctattctcaactgaagatttcataaacggtttcattatgctcctggaatcggcagaagacacagctttagatatcatggacgcatcaaacgaacttgctctgtttttagctagagctgtgattgacgacgtcttagctccacttaaccttgaagatatctcaaccaagctgcctccaaaatcaaccggaaccgaaacagtccgctcagccaggtctcttatctccgccagacacgcaggagagagactcctaagaagctggggaggtggaaccggctggatagtggaagatgcaaaggacaaaatctcgaaactcctagaagaatacgaaacaggaggagtaacatcagaagcttgtcaatgtatccgcgatctagggatgccttttttcaaccacgaagtagtgaagaaagctttggtgatggcaatggagaagcagaatgatcggttactgaatctgcttgaggagtgttttggtgaaggattgattacaactaaccaaatgacgaaagggtttggtcgtgttaacgacagcctcgatgacttgtcgcttgatataccgaacgcgaaagagaagtttgagctgtatgctagtcatgccatggacaatggttggatccttcccgagtttgggatttctgcaactcagtgattagtggttctcttatcagtttcttgtgtttgtgcttacgatactttcctcactatctacatatatgtatggattcagttagtagataaacatgagatgtttatatgttcatgtgtttctgtctggttgttgtgttttgtctttgtactgatatcttttagtgtgttctaatttctgatggatttttgttacattgaaaataagttattagcatggttaatttgtgttaacttattactcttgtgatattttatgaaaattatttataaatatagaaaatatggtaattaaattataaaaagataaataaaaatatatttgttcggtcggtgagataattatgactccggttccgggatagagcaaacaaaaggatagaccaatactcgttgccaaacagctttatcctcgtttttatatttgttttgattctttcttcttctgctcaactttactgtccggcgtactcagcaccatcaatg

SEQ ID NO: 32680 - DNA, 3003 bp, Unknown
  misc_feature (1)..( 3003): 2750-1469P.txt file - cDNA_ID_3059938; gDNA_ID_1620343; Annot_ID_154071
atagactatatagcatatgaacacttcgggtgatttattgcgcatgcaacttgacgttaattggacccaccttgcttaacctttttcctcttcttgtgaaattattttggtgtgtgagaatggaatcaacccaagtcattttagagaagaagaaataatgcaaaatgtttcctaagattcaaatttcatgatacctgataaaaagtgtttggctgaactaaaaagtgttgttcagaaatgtaattctgatcaagctaaacggagctggttatgatttaaaaacggaaggagtaatatcagccatcattacaaatataattggctcaacagttctaataattaagattatcaaaccgatagcacttaatactgtattcaacattcaggtaacgctaggaatgagtcacgtggcttaaagaaaaaaaacacagaactcgtaattaaaatctcaacgaacttaaagctgaatgttggtgaaacactaagtacggtgcaccaaaagtcaacactgtgttagtaatgtactttagtactaatatttaatattacggtttaatttttgtacctttatcattacttttacgttttaacggttgaatattatcaatagcatagcagttagctcaatttaactgattttttttttttcctttttttttttttttgttaaagctcatatagtaaagtattacatttcgagatactttagtgtttctgctatctactaaaccatattttgataactaaacgtatatggattgtaattgtaagaatacgatatttgatacactttgaattgtttgataagttggttttagagtgtttgttattattattatctttatacaaaatgaatttcttttggtgtctcaaagagatattgcttgcaggaaaagagaaaagaatagacccaccaaaagcaatagaataggagaactgagccgacactggcccatagaggtttgattttgggaccaccgaaccatgtgctcgagtccaatctttcaataaattctacacatataattttcttaaattcatataacgtttttagaatagtagtgtattcattcatatctaacaatcagaccctatgttgaaattttggctggtacaaaatgtgttgacaatcaatgcacatgggaagtatttgcatcatcactctatatcctcctcctcctccacactttaaaaagaacaatgtctttaaaaacttaatcaactattcgattacaagtctcgccgacatttttctttttgctagagccattcatgttgatgaattttcacttcgggcaaaaatatggatcatgagtttaagtctagttttttttttttaaattactgttagtagcaaattattttatacattaagcaaattgtgtattctggtacataaactgcagaaaacaattaaatgacatttctcactacattttagacagttttggacattcattcgattagtaaatgatttcgttctcgtacgtgatgaaacacgagaaccgatcgacattaatgttcctttttcagaatattctcaacgctcaaaagctaatctatatacatttttcactactttttacatgattcatagaatacaaaaataattgaacgcatttgaataagtaactaaatatagagtatgataatatctaattcaaccattttaattattgactacattggcttatcaaactgaaacttgatcatttggataagcaaacttaacaaattaatgttttgaacaaatgctcaactttacaagttttttttgtcttctatacgaaatcaattcaagtttcatgacattgtcttgtgaaaaaaaaacaagaaaaaatgtagagaattgacctttctataaagaaatagagtcgttagattggatttaaggtggtagatataaagaaaaccgtcggatcagaaaatagagacaaaagggcatgtgaccggtttttgcttgaaaactacttgctaacttcttctctactcatttatcagtgttataatttttttgttttttttatacacatagtacgttcactaaaataacaatttaaaatgaatattgatataatttagtcataataatttgaaaaatataaaatacaatatccatatctgttttaaaactataaacatgatggccatgatctaataatatgattccatgaagcataaaacttttattaacgtagtcaaccattggatattgtccagcccaaaatatctaattcaatgggccgaacctacccaatacagcccattgttttggattaaaatctttaaaaaaattggaggctaaattaaaaaaagaaggaaatattctaagccctccacgtattacgttgatgacgtgtaccatcgtatataaacaaatgcacaaaactttattatattgttgtaaagtagtacttttattggcgatcctcatccatttcctctctcgtcgttgtctgggaatcggtgacttttgaatctttgcgactctcttgtagtgataaattgatcgttatctactttgatactctccggtcgtttttctccggtgctggagatccgattccttatcttttctgtcttggctcgagatccgagccaagcagtaaagaagacgactttgtttcacgatttggaatttgattcctgcgatcacaggtatgacaggttagattttgttttgtatagttgtatacatacttctttgtgatgttttgtttacttaatcgaatttttggagtgttttaaggtctctcgtttagaaatcgtggaaaatatcactgtgtgtgtgttcttatgattcacagtgtttatgggtttcatgttctttgttttatcattgaatgggaagaaatttcgttgggatacaaatttctcatgttcttactgatcgttattaggagtttggggaaaaaggaagagtttttttggttggttcgagtgattatgaggttatttctgtatttgatttatgagttaatggtcgttttaatgttgtagatg

SEQ ID NO: 32681 - DNA, 3000 bp, Unknown; identical to SEQ ID NO: 979
  misc_feature (1)..( 3000): 2750-1469P.txt file - cDNA_ID_3059942; gDNA_ID_1620343; Annot_ID_154067

SEQ ID NO: 32682 - DNA, 3000 bp, Unknown
  misc_feature (1)..( 3000): 2750-1469P.txt file - cDNA_ID_3059953; gDNA_ID_1620343; Annot_ID_154063
caaatttgtttatagtttgaccaagttcaaagattattttaaaaggctagactagcaccaaacaaaactacccgccacgccacattgagaatttgtgagccgcacaaagatctgttttattttgttctactttaatttatttactttgttgtgttccaaatagaaaatacaaacttatttccaattaggcaattagcataaatgtttagaaggaaaaaaaatgaagaagataagtttctaaatattccgagtcagcgcctcgtcaacgtgtggttagggttggctccgaagaccatgggaagctggtcaggtcaacggtcatcccgatttttgagttagtcaaccatttattgtaaaaattaaaattttaatcttggtaacatatttgatgaacaataataataataaaaaaactagatatttaaactgaatgtgttgagcatgttattttttcgtgttagacttttatgtcaaaccataaaaattatttattggagaatgtatatggaaatatacactaatatacatctttctccaactagactatacacacaattaaaaacattaaaaatctactgttttcagtttttataagtacatcgctgattcatgatacttcatacttggctacttgcattatataaatgggcaatatatatccaaagtccaaactcaaaggataagatcggagtataaacatgcacatcaatctccagtgcttcagagttcaagtggaatacaaacaattttagaatagaaagtgttcagtaatattttaatttctaaacccttaaatgtgttgggaagaatcttacatgaaatcatcaaatccattagtttattaacacttttcacttttctcttccgtcgaaacttatccacaagttttggattttgatgtttcgttttcttaaagagccatttgtgaatacttaaagttataacaacaacatgattaatatatcgaatatacatatacttgtagagttaatgaaaggaaaacacccccgacatcttataataaaatgttataaaactaaaaagtgtacataaactactactctgaaaccttaacacattaattttccaatagttagaaacttagaatagttatatggccttatgagatgtctacactagttgttaaatgtcaacacggatattgaaatttcttggaactgattctgaattcgtttaagtacttcgtttaagagcttgatgcgcaacataaagctcttatttgacacgtgtcatgatgttaatggttaagcttgactgccatattggcctagactaccagatttgccacgtgtaatatatgcggcgaaatttatttcattcttcgataagttcttcaacatcctatgatgttcaggcattcttaaaccacaattaacaaaggccagtggcagaaatggataaatgagagaatgacaagtggatagacaagagggcttgagagtggatgaggatcaacaagccacgtagacgaggaggtgggctcttgggaagaggcaagggtcggtttacttcaataaccaccctttctcaaacttagaataatactactatcagcactttttctacatcacaaaggcaaatttcttgaccggttttatcacttttcccacgtaggatcaataaaaaaagataaacattcgtgacttcatgaatcatggggacaaacatcctacatggtaccaaaagtaaaatacattacttgttttattgtcatcccaaacattacaaagggccaaaggcaatattatttctagatactttcagtggaaagtattaatatatgtgtgtaatgttgggaataaaatatagtcgacattggtgtatcgaaaggtccatttaaaaacataatatattgtaatgatctataggttagatcctgttggtatatcaggttgggaataagaaaatacttttgttatacaatgtattatagaatatgttgtgttagggggcactgcggctatttgacaatgtttgaggcatattagtcctagggaagtttataataagctgcatcaccaaatcctttatacatatctaagcgtagtaagatgaatgtaactgatcatagattttaacatatgatatgagctctgaatggagaaaatatatttatctaattaaataaaatatgtcattcgggtccaaaaatgatatgcagacttaaattttcaaactattcaaactaggaaaataaaattgaacttatcttctggagatttttttttttttaaattgtgctttgtatatttattagtccaatataaacataaatgagataagtacacataggctttttgttgttgggtttgttcacatttgttagttctttttttctgtcaaacagtagtatattttcagtttttctgcttcaaattttgtaagcaagaagttctgtttcattttagtttataaaaatttataacaacatgtaactatatgcttttaaagtagactcaaatactgggtgttatctgtgtatagattaagatacaactaattgtatctgtgtcttagtgtctatatatacgattatctatttatcaaaacggaaaaaccatagccaattacttgcatttgggttggtgttaaagacaaccgcaaattatttatcaatgaatcataacttatctcagagaaatacagatctgagaccccaaaactcctgaatatacagttcactacttttatttccaattattctggttaccaaaaaaacagagattaattgacatacacgcatctacaaaggcgcgtagggtaaaacagaaacaaaaacaagatatttatcataaaaaaatgccacgtgttattaacaagtaatcaaaaaggaccagacttcgttgagctgtgtctataaaatccagagaagcaatgccctcaagcttctccatcatcaaattaaaaccctccagcctccaacaacaaaatttaccaacactctctctttctctttctctctgaaaacttaaaacgatg

SEQ ID NO: 32683 - DNA, 3003 bp, Unknown
  misc_feature (1)..( 3003): 2750-1469P.txt file - cDNA_ID_3059957; gDNA_ID_1620343; Annot_ID_154061
tcggcctcaagattatttatccggtttcttgctcaaactcttcaccatctgattcctctgcattatctgcatcatcatcctctgcttcattatcatcctcttcttgttcgttgttgacgactggttttccaattaccggtaaagcaggactcatctttctgatctcgttgcactgcaccaaacccaagacaacaagaatttacttagaacttgtcttaaaacattcataacaacaacactgaaactgacaattagctctactgatctctctcacttttgagctcccacgtctatataatcacacaatctaatatatttaagaagaacatataattagaggtaacaccaacacatcacacgacaaggagacatgttgtctaaagttcacaatggctaaattccaaatctgcaaattttgtctttgcttctttcctttcacttgctagtgattcaggaaacggaactagttttcaaacattggaaaacatgtaacaataaactcaaatccttttccatactaaatctagaaaccaaaaatctctccaatttaaactcgaagatcacccttggatctttatacattattacgggtctaaagctataagatgatagtccaatgaacacaaatgcatatatccatagagtctacactggaaaaaccactacactagaatcacaactcgacattggtatccactaaaattctcacttttgtactaacttaaaactcaaacataggacccaaaagaatatgttccaaagcagaaagattcagaaactcatattcatcttatcaatatgaagtagagaagaaagtgatctgcctaaaaccaaaatcatcaccacggatcgaaaaagattgatcatttacaaagtagaaaccacttataatctcgaacacaatcaataaatttcactcataatcagctcaacttacatgaaactaaagatctaagattgaccttttatgctgcctgtagtgacagtcgaaaactgaaaatttcctattcagcagattccgaaggagaacgaatacataaataaaaaagaaggaagctaccttttcttcgaactcagcttcttccatggcgagaagaatctcctcgttctgcggctgaggccattgtaacggaagcaaatacgatgccggaatcgtcttcgtcgacgacggaaattgggtcatcaacgtcggaaactgtaacattcttcttctcttcctttttctctcttaacgaaaattgatggaaaagtaaataaagaccaaaaacacagtgcatttattattgggcttttatctgtttagcccattgttattgggtaaagataaatataattttgactatgagtagggactaaatgttaaatttgggcttgtaaaattacaaaagcataatttgaaacccattgggccactccctaccttccgcgcgtgacttaaatttgaaactaactaacaacgtcttaaaaattaaaactctaataacaaaaacgtaaataggcatctgatcttttgattggtgatggaatagtaacattccaaatattttgattacccataaaacatcgaatcttgcgaattcatagtactttttgtattattttttgaaagctatattaacattttcgtttatcatttatggtagtatttatgtatcttgttttaggttttcgaaataaacttgttcatgtcaaaagaaattgaagaaattcaaacgaataaaattaatcaactctaataattttcttatatttcaccagtctactatcataatgaacatacttaattgtaatgtttgttagtatgttttctaaaatccactatttaacttgcatgccattgctgtttatatacggtctctaacccccaaaggagccaattatagataaaatactgactatcaattttgcaaatttggtggtgtgaatagttgtaaaggctgtacattgcgtaaaaaaacttagggtaaaataaaaaagcatcacatagttattttaaaaaggccaaacacacctttaaaaaggataactctttacacctttatcccacaccccatttccttgtgagaaagaaactatgcatgcgggaatataacaatacggctttgcttctcaatacaacgacataaaaactctctttataagactctcacacacacatatgttgatatgtataatacacgtctctaaatttgtgtatctatctacattacaatatatatagtttgatatcaatctacaattgaaagcatatatatataagtatgtttcttgcttcagttcttcaccaaaaacttgtgttcttaatcttggtttatcacgatgaaattgttgtcgatgatgatgatgatggaagctattgtcctggctaactcaccttgaggtcctcgattccattgatgacgctaaatggggaataagcattcctggtccgatccatttcatgtcacttaaatcttattatttcgtataataatcaaattcaatgttgttcaagtttgtattcgatgttttaatcacttacgtatgtattttctcatggaatgtatcgtcgaactaattattcaaaacgacctttattttgaaaggaatgcttttttattaattggaaattacaaacgaaaacaaacaatttgtgtccccaactatattttttggaccaattaactaatcactaaaggtctcatgtggagacttaataaaccttaaatgtaattgtcattatgagtttgaatgacgttatgctgagttcaatgagaaaatatggttggtaattggtagttgtgtgtcataactcgtaattaaatcacgccacaaataattaactcgatgctaattaagaataaaacctcttttcaaaataaacaaaattaaaagctttccatgtcaaagttgcttcctttggcttcttcctacacacttgcttcacatgtctactacactgactgactgacacaacgataaagtacacttatcgtgtttcttggtctcatcataagttcaatg

SEQ ID NO: 32684 - DNA, 3000 bp, Unknown
  misc_feature (1)..( 3000): 2750-1469P.txt file - cDNA_ID_3059961; gDNA_ID_1620343; Annot_ID_154057
gtgcacaacctcgattaggtgagtattacagcactatgtgatattctgatttaagctgcattcatttttccggcaacttttttatttgcattgttggggtgtaatataggtcaggatgatggccccattgtgttaatattagctcccacaagagaactagctgttcagattcaagaggaatcaaggaaattcgggttgaggtctggtgttagaagtacttgtatctatggtggtgctcctaaaggacctcagattcgtgatcttagaagaggtattttattttttaatagtgtagttttcatgtctggttcttggatggaacatcaaagtttatgaatcatgattggcttgtcaggtgttgagattgtaattgctacacctggtcgtttgattgatatgttggaatgtcaacacactaatttgaagagagtgacttaccttgtactggatgaggctgacagaatgttagacatgggatttgaaccccaaattagaaagattgtatctcaggtatgtttgtactttctccaaagctatcatgtagtgtctttaaggaaagggtggttgaccaacattattagtcgatagattttatcttcccagtttattgttctgttgctaaataagaaccatcacggcttttgttcagaacttgagattgttccttatttttcacagatccgacctgatagacaaacacttctttggagtgcaacatggccacgagaggttgaaactcttgccaggcagtttctacgagatccatataaggtttacttgctatttagtttaacttattaggattgagtatactgttgttgaataaagtaggggatgttttatgttgtgcactgaaaacagttgttattttgtaggccattattggatcaacagatctaaaagctaaccagtctattaaccaagtaatcgagattgtaccgacgccagagaaatacaacaggttcttaatttttctgtcattagataagaaacgatttatatatatatttatttgccttcttatatgatatgatacttatgccttttttctcgtttgataggctccttacactacttaaacagttaatggatgggagtaaaatcctaatttttgtggagacaaagagagggtgtgatcaagtgactagacaattgagaatggacggatggccagctcttgccatacatggtgacaagacccaatcggaaagagaccgagtcttggcagaatttaagagtggacgaagcccgataatgactgccactgatgtagcagcaaggggacttggtaggattaactgtgatacacaataggagagattatacttagagcatttcgttttcttggggttttaaagataataaaaaaagtcgcctggctgccgctttccacagtttcctctggtattagggaaaaaagcacatagaaagaaaaaaggagcttctttgaagaatttgtttcctgcatccatctcccgggcatggagctgattggtttttgagcagcctgggcgactgacacctgcatgcattaatagtgttataacgccgtcccaaacactccttatccctgcaagttaaggtgggcacatttacttgggaaaaatgtgttgctcttagtttcttgatctttccagatctgcagttgtagggataaggggttcttgttctctatcctctccttagctaggctttaaacaccaaactcatttacacaaagaaatttctgttcttcttcctgcatttcatctcagtctatgatttacttctcaactgtgttccttctttcttcttttgttttgttttacagatgtgaaggacattaaatgtgtggttaattatgatttcccaaatacattggaggattacatccataggattggtcgaaccgggcgtgcaggagctaaaggaatggcctttacattcttcacacatgacaatgctaagtttgcgagagagcttgtcaagatccttcaagaagctggtcaagttgtacctcctactctctccgcactagtccgatcatctggttctggttatggaggtgaaacctcatttctcttctctcatttgatgagttcaatcaatcttgctaaattttggtacgaggatctgattcaattttgttgatttgttcaggttcaggtggtggaagaaacttcaggccaagaggaggaggacgtggtggtgggtttggagataaacggtcaagatcgacttcaaactttgtacctcacggtggaaagaggacttggtaaagagaatcccatcattttgattctatgagaaaacctttaattatgatgatgatgatcagcgtttggtttcgactagaagttctttgtcgtagagaacaaacatttactatataactatttagctgatttcgctgcttcttcttcttcttcttcatgatatttctaaacattttgcctttttcttaattctatcaactaaatacactttactactttactctcaagtcaaccgtaacactgtaatgaaacttgtttttaaaaatcggatgtggattattaggttgggagattcaagtattgcgaatagaatttagacaaatgtaagcatctataacatctagaacatgtatatcttctcttttttcccaacaacatctagttacgaatccttaaggtgaaatgtgtaaatagatcatacttagctaaaaaaccctttacatttatttgtctaacattgtctaccattaggaaaacaagttaaaaataattcgctatgtttgaatcgaatttggaattatataatcgatcgttagtttaacattcagtaattattaaaattaaatttttaacgcaaagataataatgtaagtaatcattaatgtgcgtgtatatataagctgtgcccacaactcctagtaatgactttctcaggcattgttgacacaaattttgctctgagtaaaacttgggaatagagagagactctgagtgagagagagattctgagtgagagacggagatg

SEQ ID NO: 32685 - DNA, 3000 bp, Unknown; identical to SEQ ID NO: 984
  misc_feature (1)..( 3000): 2750-1469P.txt file - cDNA_ID_3059994; gDNA_ID_1620344; Annot_ID_154098

SEQ ID NO: 32686 - DNA, 3000 bp, Unknown
  misc_feature (1)..( 3000): 2750-1469P.txt file - cDNA_ID_3060002; gDNA_ID_1620344; Annot_ID_154095
ccagtaacactatagaaaaaatagactgaactatcgaattatatactttacaaatcattaacttatggtaaaaacgtttataatttttttgttttatggtatatggtaatagcttttggaacccgcacaactagaagtaaaagaaaaaaaacacactaaaaaagttaacttttatacattttggtttttggccgattacatttatgatttatcattgaattgcaaaataatttatttctgtaataataaacgcgtaattagatctatataaaccctaaaccccatcactcacttactctacccctggcttctccttcaagctatactctcattctctctcctccgaccaaagttttctgttcctccgcttctccttcccctaccggtgcgacttctcctctcttttatcttctctctttgtttattttaacgccggaaatgtttctcacttgtacgttttggtttccgatgtaatctctcgtcttctctgtttcttgaaaatggggttttgatttctgggtttgatcttagctccatcaactttgatgcttccccttgatcaaaggattaaattctacagtggagattatctatctgcttaccaaattttgatcagttacaacaaaattacaaaatcagaattagccctagaatttgttttttgttgttacagtcccattcattgaaaagtgtcttcttctatgtgtaggtgcttcgttttgtgttgtacagcagatgtctgttgatatctgcaagaagaatccatcgtttctttggtgtgactgtggatatatgagcagaggaaggttgtggtgctttcagaccatcatgttttcttcttcttcttagctttttgtctctgctagatcttgttattgtgagttttttgctttactggtgagggaagttacttagtgtagtgaaagttttccccttgtcttccaatggggaaaactaacttggcacctggttttcggtttcatccgactgatgttgaacttgtgagatactacttgaagaggaaagttatgggaaaaaagttccaagttgatgccattgctgaggtcgacatttacaagttcgaacctcctgatttacccggtaactaactcattctttcagaaatctttgttctgtttcatgctttcttatttatttcctgattactaacagaggtttctttacattgtacagacaaatcatgtctagggactggagatcttaagtggtacttcttctgtccaagagaaaagaagtatcccaaaggcggtaaggcaaaccgctctactgaatgtggttactggaagaccacagggagagacagagatgtttcttataatgacgaagtcactgggaagataagaactctgatttatcactacgggaaaatacctcgcggtgatcggactgattgggtcatacatgaatatagacttgaagacaaagtactggctcaaaagaatgttcctcaggtaatgacgattcgttcttgtctttttttaacgttttgattccttgcaagtttactaaacatgcttgttgtgccctgcaggatacttatgtgctttgcgttctctttaagaaaaatggacttggaccaagacatggatctcaatatggtgctccatttaaggaagaggattggagtgataaggaagaagaatatactcagaatcatcttgtagctggtcctagtaaagaaaccagtctagctgctaaggcctcacactcgtacgctcctaaggatggtttgacaggagtgatctcagaatcttgcgtctctgatgtgccgccactaactgccacagtgcttccacctctaacaagtgatgttatagcttacaatcccttttcttcttcacctcttcttgaggttcctcaagtatctctcgatggtggcgagttaaattcgatgcttgatctcttttctgttgacaatgacgactgtttacttttcgacgatttcgactaccataatgaggtaagtctgtctctgcatcatcatgcttttgatgaatcagatttcagtgttcctgaaaagaaacttgttttgattgcttctgaaactacaggtaagacatcctgatggttttgtaaacaaggaagctccggtgttcttaggagatggcaatttcagtggaatgtttgacctgagcaatgaccaagtcgtagagctacaggatctgatacagtcacccactcctcatcctccttctcctccagctcaagctagtattcctgatgactcaagaagcaacggtcagactaaggacgattaagtattttgtgctgacttatgctctttcttgctttggtctgatgctccatggaaacagagaccaaacatgtgaagctttagccagaacgtttctattgttgccatctctgtctgcacgaaagaagagacaaaaccatgaatcagtaacttgaaaccgtccagtagtggagccagctttctatgttatgtttctgcaactgcgttgtctgtagtcttagattttcatcatcatttatgtatgtggcaaagaccttcgctttaactagtgtaataccatggattcttagcttagcttcaatgataatgccattaaaattcagtcacaggctataaggatgaatgtgaacgaacgtcgtcgtttggggaaatacaatgccacaattactttgactttgcttcgcaaacatagtacgaggatgtaagtagaaattaacaaaggttatggggtcttttagaacaatgttactttccagaccagacgacaagacgacgtcgttcctcaaatagtccacgtgtctttcctaataagtgaattttagcattacaattgtcaattggggagtaaataggttgaaaatataatatggggatgtaattttacaattaaaacagttatgaggctttaatcgaatttgttgctttgctttgcgactttcatctttccgattaatcaaatccttttatcctctgaaaaatctcaactttcgaagaaaacgaaaatg

SEQ ID NO: 32687 - DNA, 3003 bp, Unknown
  misc_feature (1)..( 3003): 2750-1469P.txt file - cDNA_ID_3060026; gDNA_ID_1620345; Annot_ID_154144
atttcatgaccttaactattgctttaatacaggactgaaacttccaaacatgtcactagattagcaaggtttacaatatagcctaaccaaggcatcttcttaagttatccatgttccaagagtaataacctatctgagaaaactgtatatattaaaaacaagcacaactttgctaacatgtcaaagcttcccaaagcagccaatccaagataaaaccaaaagatactatctttatattaactaatagtaccacaaaaattaaaatctcagacataaaatttaagagcgaatttgtagagaaaccaaacctgggtttgtcacgtggggtattgaagttgtcatagaaccttcaatatcacgattcagagcagcttggaacgcgtctacgtcagctcctgaatgcatcgattcatcctaaaataatacaattcgaccggaatcaaaaaccacgaagacgattccagatacatcacacaaaattggattttgaaacgagtgagattagaaacctaacctcatcttcttcaaggagcttgaaaattgaaggatccattgaaatagctggggaaggcaaagagagaaagagagctctcggcgtagatgaattaataggaaacagatgttataagattagtcctaaactaacctcatgtcgtttattagctttgttttagcactgtatgtcgtttttaattttgatcgaaaaaaaacgataccgtttgttatggatgagtaacctcatgttgtttattggtgttcttttaaaaactgcatgacgtttaatggaatacgaaaaacgctgtcgtttgctttattgcgtggagagatatatcaaactttatgtcgtttattggttttggttaagcactgtttgttgtttgcgtgtattgagactaaaagttctggtacagagagagagatacatcaaaagtacagtgtaagctgccgccattaacgaagcatcggcgaaaaaagaagatgaatatcgttggattgagcaaacgtttcttctccgatcgtcgctctcttcacgggatcaacaatgctctcttgaaaacagtgttcaccggtcggaaaccgattctcggattctccggccgatcgattcacgagctacgcaaaactgggaatttcgtaatccctcgtgttttctccgtgtcgcgaaatctaacgacgaaggcttcgtcttcttcttcgaaacaacctgcgtttctacgatggtatttgagaaagctcgaatcacatccttttatgactaagagtatcactacttctgtcatctatatggctgcagatctcacttctcaggtttttttttgaatctttgtagtttttggaatttagggttctttctcatttcattactaattagagaattttgttaaagttttgaattttatctcttgatttaggaagaaaagactaatcttcatttgttattataccaagacaattccaaatttgatttgaaactagatcataatcttactagtggaagaagttataatactttagtaaagaataggtggagatagcactaaaagttggtgttttttaatgaattgttattctcatatttttggtttagtctgtgttctcaactgttgttctttgatgtgtgagactgtacttacagtgtttactgaatctgtatattgtactcttgtgaatttgaagtctttctgtactgaataatggatgaatttagtattggtttgattactcagaaaactcacactccaatccgaatagtctaatcttcttgttattatctcttgtgaatacttattgctaaggtgaaaaaagctttaggtgtgtgtgttggggttcttgtaaactctgtttttcttcttgtcattagtggatttctcttttgagtctttttatgatcatgttgtggtgctcttcccccagtaatatgttagagcgaaactagagaaccttttgttttgttttatttgtgttgactctctaaattcttcaacagatgatcacaatggagccaactggttcttttgacttgataagaacagcgagaatggcgagctttgggttgatatttctcgggccgtctcagcatctgtggttcagttatctttcgaagatattgccaaagcgcgacgtgttgacaacctttaagaaaataatgatggggcaggttcttttcggacctgttagcaacacagtcttctattcctacaatgctgctttacaaggtacataacataatcaaacctctatggattgaacggatttagctttttacggtttctctgcctgtaaatttatggtgctcattatgagattggttctggcacgttgttggtcctttttaaggcgaaaattctgaggaaattgtggcgagattgaagagagatcttctgccaacattgaaaaatggacttatgtattggccggtctgtgattttgttacattcaagtatgtgccagttcatctacaggtaaaccaaatatctatcttattactttctctattgtttgggatgtttgaagacacttcttaacttcaacttgtaatcttctggttgcagccactgatgaatagctcgtgcgcatatatatggacaatctatttgacatatatggcaaaccagacgaaagctgacagctgaacaatgacaagtatgagtgttctgggtcacacgcaatcgcattctttttattcaattgaaccaaccatcagtactagtagattttttttgtttttttggtgtctacaatgcagcaaaagtatcgcatagatatggacataaacatgtatgaattttgatcatctaagcatatatttatcaggaagtctcaaagttccatcgcgttttactgcgaaaacttgcttcaccatcttcttttactttttgttactttcttgtaacattttgactaaaaaaataatttggtttatttttgtttatttaaattaatgccaaaaataaattagggtaggtaaaactagtatgaggttaaccacataattcacaaatg

SEQ ID NO: 32688 - DNA, 3003 bp, Unknown
  misc_feature (1)..( 3003): 2750-1469P.txt file - cDNA_ID_3060034; gDNA_ID_1620345; Annot_ID_154140
tccattggagggaagaaatggaaaccaattaaaatatctcagactgagccgaagctctcacacatctgttttgcagacgatctgattttatttggagaggcttctgttgaaaaaattcgggtgatcaggggcgtgctggaaaggttttgtgttgcgtcgggccaaaaggttagcttggagaagtccaaaatctttttttctaagaatgtctcaagggagatggggaagttgattagtgatgagagtggcataaaagctacacaagacttgggaaaatatttggggatgccaattcttcataagaggattaataaggatacttttggagaggtgcttgagagagtctcgtcaaaattggcgggttggaaagggcgtacattgagtttggtgggcagattaacgctaactaaagcagtgttgaattcagtcccggttcatactatgagcaccattaaactgcctcagtctacgcttgagaatttgataaaatctctcgctcttttctttggggcagcacagcggagaagagaaggcagcatttagttgcttgggacagagtgtgcttaccaagatgtgaggggggcctaggcattcgttcagcagctaacatgaatagggctttgatcgttaaaattggatggagagtattacatgatcgttccagcctttgggctcaagtagttcgaagcaagtatcgagttggagaagttcatgatggatcttgggctctcgctaaaagcaactggtcctcgacttggaggagtgtaggcctggggctgcgtgatgcattttgcaaggtgttaaatgggtaatcggggatgggagacagattcgattctggacaaatatgtggttatctaatactccacttattgatgaaattacagctccaattccaccgaatttggttaattgtacagcccgacatctttggcagaatggagagggctgggacatgttgagagtagcgccgtttgtcacagagaataagtggttggaactcttggcagtggtagtagatggcctcacgggagttttagacatgctagcttggggagagtcctcagatgggctctttacggttacatctgcttatcatatgttgactggaaatgaggctccgggtcaagatatgagtagtttctatgggagtgtgtggaaagttctagtgcccgaacgggtaagagtctttctctggctagttgtaaaccaagtcattatgacggattctgagcgaaaacgaagacacttgtgtgagtctgatatttgtcaagtttgtaagggaggcgttgaaacaagtttacatgtgctcagggattgtctggctatgacaggtatttggctccgcattgtacctaggcgcatgcaaccggggttcttcactatgtctttacttgagtggattcacacgaatctgcgacagagtggtaataaagaaggtagtgattggtcgactttgttcgccttggcgtgttggtggggatggaaatggagatgtgggaacgtttttggtgataacaggagatgtcgagatagagtgcgtttcttaaaggatgtagctgccgaagtttctttagcgaattcaaaaaaaagggaacttaggccggtggtggatcgagtgggcaggttaatacaatggacggctccaactgtaggatggcacaaactcaatacggacgatgcctcacgggggaacccgggcttaacttcagccggaggggtattgcgggatagtgagggcgtttggtgcgggggatttgcggtcaatattggtagatgctcggcccctttagcggagttgtgggggtgtactatggcttatataccgcttggggaaaacggattacgcggttggagttggaagtggattcggaggtggtggtaggttttctcaaacaagggataggtgagactcataccttgtctttcctggtacggttgtgccatggcttcttatcaaaagactggatagtgcgtatttctcacgtttatcgggaggctaatagtcttgcagacggtttagctaaccatgtgttctctttgcccttgtgctttcatatttttgattcggttctttttgttgttgatacgctgtttatcgaggataataacgggcctgggcgcctgaggcatgtacgtttgtagtttttttttctttagttttttttaatacaattccggggatttatccccgggaaatcaccaaaaaaaaaagatattctagaagattttatactcctaattttactccgagctaaactcggatctttgtatttatatagatacacaagagcaaaatttttagtattagcacgaaactccattcgagctaacacacctccgccgtttttgtctcttcttccgatctcatctcatctcatctcatcgatcacctactctcaaggttaataacctaagacttgatccttagaaaaaaacaccaaagtccatgttttgattgttcggtcaatatatagtcatggttaattgattaagatgtaactgatctatatgcttcggttcatctgttattgttatatttgattatcgatcatcgttattacgagttgcttgtcaatcgttactacttattagttctgtgtcataattaagctttattagggtttttatttagaataatcgttcacaaactgacatagttcatattgttttactaaaggcacgttttatagatttattgattcatgtattgtttggtttggtataaatcgttggtttaacctagtttgagattctgatgcttaacggtttttttttccgatattcatcatcaagattgtttataattatacataaatgccttcaccatgattggagcatgttacaatacattcactgcataatattgaagattcacagttatagttttactcatgattactctttcattataaatatacaatataaatctctaattaattaatatctctctctctttttctgtttagatttttcagctcctccttgattttcaaaaccatg

SEQ ID NO: 32689 - DNA, 3000 bp, Unknown; identical to SEQ ID NO: 998
  misc_feature (1)..( 3000): 2750-1469P.txt file - cDNA_ID_3060052; gDNA_ID_1620345; Annot_ID_154128

SEQ ID NO: 32690 - DNA, 3000 bp, Unknown
  misc_feature (1)..( 3000): 2750-1469P.txt file - cDNA_ID_3060085; gDNA_ID_1620346; Annot_ID_154181
tatcttttaatagtggaaaaaagatgttttgatattaataagttacaaactcataacaatctgcagacaagatcttaacatgttcaaccattctacatagcaaaaagatgggtttgcgctgtaccttcaagcaattaccaatggcagtgagatgatcagcagaaaaaaacttcccggaactgaaaggaactggcagtagcttgctaaatataggatgatcgactgaaaccttttcatggagtttcagcgctaagagcaaagcatctgggtttcccacctcggtggcttgttcaaaccatttataaagttctggagcttccataacatgagtaacaacaggttcagtaggcaactgcacaataaaaaagataggatcacaaaaaaacttcacaatgtgtaataaacccgcactaaactttgcacataagaatgaatctattataccttgtcaacaaagtctagaagaatatgcacagctggttcctgcaagtaacgcttttttgcagcaagaccaataagagcattggtaaattctttgattatcggagagtctttatcagattgccaatcttcaatcagtcttccagaacgtgcaagcgcaccataagcaaacaatcgacccaataagcattcctttatatcctgtgtcaatttcaattcaaagcatatgagtctctataacagaatcacatgaagaacgaagcatataaaaactgctacttacttgtcccgtcatggatgaagatacagacaaagaatcagcaatgagattcagcaaagattccacattaatgctagaaataacgctaacaggtaatgtcaaccccaaagcaaatccttgtcttgcgcactgttaacgaaacataaacataaacaaaaccaaagaattagtaattgctagacaaagcatgaacatttcgatatacgaagtgaaactgaagaatagatacctctcttgaagaagagactccacgaataagcctgcgtagagcatatctcagatgaggagcacagttatccaaaccatcgtttttctcagcttcaagcatcaaaccaccatcaacagattctttatcaggtaacatttcgtattgcttctgaatctcttgcaacctcaataccaacgactcagcagctgcttctctaacggaagcatcagaagaagccaaatctgtaaaatagttcagaggcaacgaggaagaagaagcggctgcggagggaagagactcgtcgtcggcttcatcggagtttgaatttacagccacaggtataggcttaggccgcgaagctcctacaccattgtttttcttcagagcagcttctagtctcctctgtttatcagaagcttttctcatcttcttcttctccatatccttaccggagctcgcaacaccaggaacttccgccgccgccgccgccgtatcagaatcataattagcaacggtattcatcttctcagttttagatttcttcttcttcacaattgaagaatcggggaggttgtcgttctccaccaactccgtcgagtcgtcgttgcttctcttcttactacccattaaaaaagcttcgattttgaatttgggaattggggcgagaagaaagaaaccctaatcgactagtgaagctttcctctgtcccctctaactaaaagggttttagtttagggtttataattaaaaaaataatattatttatacaactcgccgacaaatgatatttttctcatcaattacaatatatcaatttgcaggaactcaaaacgtttaatttcataattcgtaattaaacagcatcatattttaatttttagtaatggtttttaataattatttgcaaagaaaatcatcctctcatttttctccatattttttagtgcaatcattctctcactaatattaatgaaatctttatcaaatataaaataaaataatgaatcatgttttattaaataatatataaacattttttgttgatattgttttttgttctcaccgatatgtagaacgaaaaatgtcatgaagcccaacttcaattagaatcctgaagcggtaaagcccacaaagacaaattttcaaggagaaggaaataagtggtaacaataagaacacagagctctaagcccaaatccaacgacaagagtttataaacccatatgttttgaatgctttgtgttatcccaaagaatgagtacttttgactgtattacaaaactcataataactgatttagtaaccgagaaaaaaacgattcattttgttattcaagaatttaggtttgacatatttaacactaaccaaaattaacatattattttgacgagtttttgaatgttagtcttccatgaatgaggaggttattcggaacaactagactgcatcatatatatagataaggattgctatgtcatatatactaggaagacaaagaaaacaatttagttgatatttcttctccttttgtaaagttttccacaagaagtcaattaaacttaaaagcatgtagcgttggtgatacacaaattaaatacaatgtgaaagcttggaaaattcattgtctatgccgtattctaagatgcaaaaacggagactatcaacgtcaaaaaggttccttcaactctttaaactttcgtattttattacaagcatctaatttctaaactaaaaacattattttattttcacgtcataagcaagcatcatgcataattttgtaattctatcttcattttggccactagtcactactaatagcaaaataataacaaagtttcattggttcaaacatcatatcttcatatagttgactcattagattccaatcaacaattatatcaaaataatctaaaaacaatttctctttattaaaaatgaaaacaaatcttgattagtataaaaatagagatatggttcttgtcagtctcacataaagattcctagtcttatactctgtctctctctctctctctctttttcacactcacacacaaactaaaccggaatg

SEQ ID NO: 32691 - DNA, 3003 bp, Unknown
  misc_feature (1)..( 3003): 2750-1469P.txt file - cDNA_ID_3060089; gDNA_ID_1620346; Annot_ID_154178
accgagtcggagaacggcgtaccagtctggcaagttggaatcacctaaacgagtctctccggcgagaagaatgtcgcagattgcgaggatgtagtctgcagcttctgctcgggtcgggtcagcttcgcatgcgcggatcgcaaatgtctttgctccttgaagatcactagacgctagaagcttctccgatgttacaagccactgatccgcctccactctgttaccaccaccaccgccaactccgccgcgtccgcctaccatatcccctatttctttttgttccctttcgtttttcctctctccccgttgaatttatttattattttatcggtaaagagtaaatacagatctaaaaattaaaaggacgaaaacatgatggatcgtcaatgggccggaacaacaacatgatggatcgtcaatggcattttggtccttttcattttatataatatgtgcaatgtgatggatcgtcaatgggccggaacacttttttctaaatttttcacttacaaaaaatattaataaaataagatgtaatattattctcttaggacagtttctctaaacaattggaaaagtttcttgtaatctctcaaatgagagactcactcatctttactgagagatttttttaattaaaaaaaacattatttactattttatttttatttttgtagatgagagatttgaacgaaaaaccaccaatacagatgctttttaggatgttgtaaagcccaataattcttttaagaattaaaatataatctggtgggctttaggtctggacagcctaactaaaataaaatattacattccgattcccagaaaataattcgtaatcaattgaccaaaccgatcgatcactgttgtcataaaagtcatcgccatcttggtttcgtgatcgaaaaagactcgtgaaaaaatggatcatatgatatcagaaaacggagaaacaagtgccgaaggatcgatttgcggctatgattcgctgcatcaactcttatcagcgaatcttaagcccgagctctatcaggtgacgtatccactccctccaaactaaattactcttctagtgtgtttgatctcgcttttgattagcctgtctaattcgaatgatgatattatggatcttttgttctagtggtttcaagtgtttattttagttatgttgatcagctttaaaaaatatggattgttgatgattggatttgcaggaggtaaaccggttgctccttggacgtaactgtgggagatcgcttgaacagattgttctgccggagtctgctaaagccttgtcttcaaaacatgattttgatctccaggtttatacttcgttagttataggatcagatcattgaacttaatagattgagacaatgttttgatttgatttgatctttgtataaatattgtctaggctgctagcttttcagctgataaagagcaaatgagaaatcctcgagtggtcagagttggtctcattcaaaactccattgctcttccaaccactgctccattctcggaccaaacaagaggaatattcgacaagttgaagccgataatcgatgctgcgggtgttgctggtgttaacatactgtgcttgcaggttttgcctccatttgctttcttttattgaaaagttgttacttcaattgtttttgaccttttctttgggggggaatgaatggttttatcgataggaagcttggaccatgccatttgcattttgcactagggagaggagatggtgtgagtttgcagagcctgttgatggcgaatcgacaaagtttcttcaagaactcgctaaaaagtataacatggtgattgttagtcctattctcgaaagagatattgatcacggtgaagtgctttggaataccgctgtgattatagggaataatggaaatatcattggcaagcatcgaaaggtatatttgtgctaacacgtcttttgttgctctgtcttttctcttgtcagctaatttctattacttgcttggtggcagaaccatatacctagggtaggagatttcaacgagagcacctattacatggaaggagacacaggccatcctgtgtttgagacggtgtttgggaaaattgcggttaatatatgttatggcagacaccatcctctgaattggttagcttttggtctaaatggtgcagagattgtcttcaacccttcagcaactgttggtgaactcagtgaaccaatgtggcctattgaggtttaacttctgattctccactttactcaatttgaagctttctttctttagtaacactgtctaacaatgcaatatgttccttaaaacttgcaggcacgaaatgccgcaatagcaaacagttactttgttggatccattaaccgagttggaaccgaagtattccccaatccttttacgtcaggtgatggaaaaccgcaacacaatgatttcgggcatttctatgggtcaagccatttttctgcaccagatgcttcttgcacaccgtctttgtcccgttacaaagatggtttattgatctcggacatggatctcaatctctgccggcaatacaaggacaagtggggatttagaatgactgcaagatacgaagtctatgccgatcttttggcaaagtacataaagccagacttcaagcctcaagtcgtctctgacccattgctccacaagaattctacataagaagaaaatttcactctgtgaatcttcaaagaagaaaagtccaataatcaatgttcaatcatttgtgtaaatgtaacggtaactgaaaatctgtttgtagctgaatatatgttgatgccaaaaggcagctcctttgcttttataatcgaaccggtttataattgaaccggaatccaattccaaaaataaccgtaatcagatactatgaactgtggggttttctactcctcgtcatcttctattcgttatccgttttgaagcgtactcggatgggattgagtttcgcagatgctttaaattctagaaaataatg

SEQ ID NO: 32692 - DNA, 3000 bp, Unknown
  misc_feature (1)..( 3000): 2750-1469P.txt file - cDNA_ID_3060111; gDNA_ID_1620346; Annot_ID_154158
ctttgggagttacttcctttgaccctgttcccatgagctgacgtccaaccatctcgatttcctaggaagagaagacaatctcagcaaacatgcaggaatttggtaaggcaaggaagcttgtaaaacagaaagcaaatgaagtacccaaaacagaggttgtattgtaagaattgattgtgctagcattctgatgatgcataatctgaggaacaacagtttgaggttcaggattttgttgcaaactggaacttgcttgacgactatcccctgcgtcaaaatgatattagtttgtgttgaagcagaaccacgagcagcaatacaatcaaccacaaagtctcatcactgaaagatctacactcttaaacaaaaagatactaaagcagattatataagagagaaattatataccagaatcagcatcttcacataatggtgacaatatgctggatcgggttgctgtggaatcaacatttacagaacccgtgccactcagagaatttgaatggttttctttagttccactggtactcattcggttaccctgtataatagcatgacgtacaatataagatgactataacaaaaccacacataggaaagacagcatccacttaaaaaggaagatatagtgttgagcgatggaagttcatattttaagaatatattagtacagtacaaaacaaaagctataccttaacctccaagtagtgaacgaaaacaatgtgcatcagatccctgtatccatgtaacacacaaacagtggacatgagcactaacactgaaaagtgacaataaatgaagaaaagtaccaacaagcacatttcattccagaagatagggattttagagatcacgtgaaatgcctttggttcagtcttgtcttgtataaacattatcctcgatttcatctcacaacttagaaattgatgttttatagcagaatctcggaaattataataatattcctttctatagcccttctagctcattttctgctaatacaataaaaaggccattcccaggacactagcagactaccatgcacactttatacaaagcacataaatgctgaaaaactaacgcttatgatactaaacagagcaaaacatatgaaatgtggacaaacatagatagactcactgttcaagcatccagtagcaccgcctctggaagttctcattatcttctccatgtgcatagtaacaatgtaacacatcaatgcttcctacctgtgtatacttacacaatcttattactctctaacattgagatgttgcattatcagctagaaaaatcagtagtaaaaccaaggaattggtttcaaggtcattgcattaatctgcactaatatttaacgaggacacataaatagaaatattaaccttcagcttttcgtgagcctctttcactgttttcccatctttcttcttcctccaattgtgcccgtcttttcggaaatatctgagcaccttcctatcgaagagaaagagtgaaccacctagaagagcagggaatttctgttaattagagaagacaaaccgcaataaattattgtcaaggcacacaacacgcaaaacttctgaactattcaggactaacaggataaacgggggagtgaacacgtcaagcataaagttcgttaaagcaagacagaaataaaacccaagctaatgtaacttattcagcatctattgattgtacagctcaaaaaataagaatatattgcaaacaaaaatgaagaaaatcagcaagaaacatactgggtggtcggttgggaggctctgacgcaatatgaaacttctgatgattccgaagaatttcacaaatctcagcaggtctcagccacctgtgttgtgcttctgacagcaattgcttgatatctacaagttcataaaagggtaagaaacacattgatactacaactctgtagctaaacatccactaacactctcttgcactaaccaacatcaatcaaaatatcaaatgtaacagagcaatacaacttaagcgggaacaactaagaagcaaaatataaatcgtaattcaacaagctagaaatccttcccttcactaaaatgcaacaaaacgaaaaactagtaatgatcagatccaaaacaactaaaaaggagtacaaaacacgaaaaggaagatagcaaaaaccctagatatggcgaaatggtagagagacctaatcgaggagcaaatccgaaagatccgcgatccgccatggaacataaacccaaaatccaccagagatagatctctagctgtcgcaatcacagaaaaaaaaaaatcaaacgaaccctaaatcgatctaggtgtatgaagtgagcttgataagctctttagaatttttttcctcttttcgagctttccaggttgtgaaagcgaatcgatgattactttttttccttttttcctctctattttctgggggaggacgaaatcggaaggaaagcgccgatatggtggaggttgttttataaatttagtgaaccaaaacatttttatccaatacaaaccttacacgtggacacgtggatgaaatttttattcaatgtgtgtacttttgctaaattgattcatgaatgtaattataattaatgttccttttaggaacttttcttaaggagacaatctattaatccgaattaaaccaaaccaaaagatattggaccggacagttcagtcaagaccagattcacgtgcgctctgtctgctgaacgccacttcaagattcggacaaacttaaaaaatgtgcattcgtttttttaaaaatagttatcttaaaagtaaagcaacagttggatatgagccacgtgtattcagcagtattcgccgcgtatcagctgataacgtcattttttatttccttcttgtttcccctacttacactttctttcgagaaaaaacagagttgaatcattttctttcagtcagagaacaagcctcttatctgagaagtgaatctataagtatacgagagagtgtcgtaagatg

SEQ ID NO: 32693 - DNA, 1949 bp, Unknown
  misc_feature (1)..( 1949): 2750-1469P.txt file - cDNA_ID_3060115; gDNA_ID_1620346; Annot_ID_154156
gatccccagtggagaaattttcaaccacatctacgtggccaccattgaaaccatgatctgaagtatttgtatcctccaatgtcatatcctgaacatcttttcctgttcccgtatcacgagaaaccgaagagccaccactatctttctcaggccatggattttttcctaacatgtttgcctctctcttgataaaagtattactctttagatggtttgttccactacccatatcatcatttcttcgtttcttcctgttactaactagaattggaaactgacctccatcctcatacgctgagtctggcactataccatcatcgttcccatgaaattcatccgaaagataatcgcctagctgaaaggaaaagaaaggaaagaaaacttcagccaccaattagaaatccacattaccaagtcaaagaaaaaaatgactagggaaacatcaaaccgagtagactaacaaagtatccccaatcctgcacagaacacatccaagtggtagcgataacaagaagtaaaatatgagatgcaagaactgtcctatattttaaacgattttgaacccaataaaaaaaggaaatttcacaacagttcattttccgggaacatacgacaagagcaacaacgaaagatctaaatccatagtctcatagaaaaaagatacacacacatatatgattgtgactccactcacctcatgaatgtacaagtccgacattcctcccaacttcagactctttaatcaccactaaaatcatgcacattaccccgatatgtcatctctattgcaaaacatgtaactcccacaaacactatttctggttctggataggaaatataaatatattaaacagcttccaataatagagaaatcgaacccagcatataagaaaacttgacttttcttatccagaatcaaatcccatgaaacccgaaatacatgtaatccaaaccctaagagttaacccattctttcaactattcatgaattccagaaattagactcaaattctacagccaaaaagtcaaatctcatagcaagtagcacaaaaacaaagtaggagaaaaatcagatagtaggattcaaccattttatgctcgtaatttctagcaaaatcgagttaaactatcattattaaaccgagagtttacaaaaacaactaaaatccagtgaaatgaggcattcaatgaaactaactgcaacaaaaaaaaaaacaatcaaatctgagaaatcctcagctaccgctgctatggaaacactgaggataagaaccaaattttctaattaaattcaatcgaaatagattccatcaaagccgaacgaaataagctcacctgtgagacagattcttccactagcaactccagaaaactccacagataaaattgtttaccagaaaacaaaaaactcagcagatagaagagattgtatcaattcatcgaagctagatcgaaaaaaaaaactgtgtaggactttctagagatgttcggcagaagacgatgaaggcttcctatttttttttttttgacaaacattttaaattttaattaaactattgtttttgtttcgggagaatcaaaagacaagtgaccatgatatcaacacgtggcaactaaatcaaaaggtttaacaggcttgggtttttaatatcagaattcgtggacgagagagcagtgtgagatcctatcagttccagttttattattggtacacgtcattagtaccttctcgaaactgggcacgcctcatcttcttattggcttacatcgtaatgatgacatcagcctttatttacgtataacaaattaccatgcggttaaaaaaaacaatagttatatgggccgaagaaagcccaaagaatctttagttgtttttccgatcgatctgcgagtcgagtagtttttttatttgccggcgccgggagagatcctttgatctttttccgatg

SEQ ID NO: 32694 - DNA, 1915 bp, Unknown; identical to SEQ ID NO: 1012
  misc_feature (1)..( 1915): 2750-1469P.txt file - cDNA_ID_3060141; gDNA_ID_1620347; Annot_ID_154214

SEQ ID NO: 32695 - DNA, 3003 bp, Unknown
  misc_feature (1)..( 3003): 2750-1469P.txt file - cDNA_ID_3060145; gDNA_ID_1620347; Annot_ID_154213
caataccttaattctatatatgtgtaaaaatattcagcaaagtaattaaagggacaatatgatttttagggttttatggatcaataaaataagaaaatttgtcttgattgacctgaaataagaattcctcaacccattggataaactttaaaaagtcaagatttctcaaatagatccaattagttttactgacttattgaacattattaatgtactgattaagaagtagttcccgcactaaagtataggctatatgcaatactaagactgataaattggtagacaaaaaaggtaaacaaaaaatgcaacaaattgtcaccttaacacaattttgtactaagcttttacttttacgactctccgtcacacgcgttctcattctcttgaagttggacctcttctacgggttttctagttaagccatctcttcttcttcaacatcagaactacattttccggattcaaagtgtttatttcaatcggcggcgttgaatatacgagatggtacgttgtctccggatgtaagagagccttttttaaacgagttaagaggaatgaatataatcaaatcaaactgaaggattaataattggttaaattatgagctattccggtttggttaagtcccaccgttatattcatctcctctgaattaatcaaatagtcaattattctaattactgttgattgtctcattaacttggaatagaggaggtttggactctatttcagttttaaaaaactgctaattaaaccagattaaaaaacgaaactactaattaaatacagtaaaatttcgaagacgtttcaatacacaattaataccatagctcaatttcttcccctataaaaacagccaaggatcttactattattcatcattcaaagacaaactcgagaaaaataaactttgaaacttttttttttgtgttttcatcatggctatcaaaaacttgatttttattatagcggttatgtgcgtttttgtctccgtaaatgctcaactaccacaatttccttttccattttcattctaaccgatttctggtatgccaggattacctgatattacaaaatgtttgtcatccgtgatggatattccgggatgcattgcagagatttctcaatctattttcacaagaaaatttggtaacttaggtccggcttgttgcaaagcatttttggatgtcgaatccaattgcatgccaaaaattccattcattccgttatttccgccgatgctaaaagaacaatgttcaagaattgccggtgctactcctcctacaccaaaatagagtcttagtttatttttaaaacatataaaatatgaattttttgtcttttcaacttctttcttaaattttataattctcagattactcaacatgttttacttaaaaaaaaacgatgatacattaataacatttgagaagtcgtatttgtgtttaatttttagtcgttctttatttctaatgaataataccttcaaacatcgagtagataattaatttaatattgcaatatttcagaatttgttgttttcataaatcttttagatacgtcgtatagtaacacaaaatctgtcaacggtttataactttttatatacgacccaaaaccattctcaagatcaacacaagtaaatcctatttttgtaagtttctaataaggaaatgaacaagaaagacccaataattcaagaatgatgaagcccaaagtatgagtcttcttgcttcttgggccgaaccgaactgaactgaactgaactgaactaaagctaaactaaaactaaagttggtacggttccttctcttctctctctctctttctccgtctgtcgctgtctctctcgtcctctcctctgtttcgtagcttctgcagcagatctctctttgtccttctctctccctcagatcactgtaagtacacgacacttcacttcatttcctaattcgatctgtttcttttactctttctcgatttgcttccaatcttgatctcttttctctttctatatcgagcttgatctgactcattctttattatatacttctcttctcgattccttttttgtgaaaaaaacatctttaaaatttcatttttgttagttgcttcgtgtcttgattagtgttgttcttgtaataaatgttgtgatcttatattcattctagggttttgtgtgtgtgtgtatgagcttaatttcatacagaacagtgaaatcttagactttcgattagatcgttgacttttatctgaattattggaatttaggttattgaatcagtctttaggttattgatcaaaatgatttacttcagagaagattgtctcaataattactaacacagtggttgattattgataatgttattaatcctgagctatgtaaattttgattctcaccgtatatatatatattgagtgtagatggcacagcaggaagctagtccttcccctggtgctgaggttgttggtcgtgcctttgtggagcaatactatcatattcttcaccaatctcccggtttagttcatcggttttatcaagattcgagctttttaacccgacctgatgttaccggtgctgtgactactgtcacaactatgcaagtgagattatcattaagtctattactttaacaagattgctatgatgttctcttttgatttatattaacttggtttcgctatggatttcaggcgatcaacgacaagattctgtcgttgaaatatgaagactacacggctgagatagaaactgctgatgctcaggagtctcatgagagaggtgttattgtgctggttacaggacgcttaaccgggaacgataatgttaggaagaagtttagtcaatcttttttcttggctccacaagacaaaggatactttgtcttaaacgacgtgtttcgattccttgaggagaaagaggtgactgcacaagcccgctctgtccccatcaatggaaccactagggatgttcaggctcctattgaaccaggtaggatg

SEQ ID NO: 32696 - DNA, 3000 bp, Unknown
  misc_feature (1)..( 3000): 2750-1469P.txt file - cDNA_ID_3060154; gDNA_ID_1620347; Annot_ID_154201
gtcctaataagagacctcaaagaaaaaatagtaaagtttagcagttatgtaagatacatggagatccagaaagcagacctcgtgcatcaagtgaaagcacaggttagtagaaaacatcttctactctttttgtataagacagtaaatgtctgaaatttagcatataaaaccattggcattccatattacagacctctgcaatgaagaaattgtcagcagatgagaacctaaagaacgagcatagtatgaaaaagcaggaaacccgaaactcgactatagttcttgaggacatggatacctctgattctgaagcgtcagaccatgaacgggaagatccagatcttgatgatgaatggaaacctgaacatgaatcagagcgtgagtccgagcaggaatcggttataaagctaaataggaaacgaaacttcaaagtgggaagacggcgctcgagtgtggtcatgaggcgttcatatgaagagaattcggaaactccttcagatgatgcagtgaaatctgacgtgtgttgttgcacttgcagcaagagctcctcttgcaagacaatgaagtgtcagtgtcgagctacaaagggatcttgtggtccgtcatgtggatgttcttccgtgaaatgctccaacagaaacgcagacggaaaggagaacaattccatctcggaatcagaggccttggaaaacggggagaactcgcaagaatctgatgaaaaggacaaaggccaacaacaacaagttcttgcttcacgtggagctatgctgctacagaacgctcttgctgacaagccagaggaggagacaaacgatgatggaggaacacgaagaagaagaaaacctctatcagacataggaaacacaacggtaaaaaactctctaaagtttccactgttttggtcatttcaacatatctgtgttcatgtagctaggaaacaacagctttctgatttaatgaaattttggtttcagggtaaatcgaatgtgccaaggccaagccaaagaaagaaatggaagaagactgtgcttcagcttgttcctgtaggtccaccagcactaccacccacacacacaaacacacacctgattccagaagctaattcagtgactgtggactcggacacagcgagaatgccagaaaacagtgactcaggagagtctaatagcatcaaactgaagctaccgagggcaatgaggtcagcgtcttcaaatggcagcaacttgctgagagaaagaaacgctgatcaaaacggaagtgagtcgggaggcaatagtggttttgtgcagagcaattcgggtagggcaagtggaagtagaacttcagatgaaaaggagaaccacactcgtcgggtctaaagaggagacgtcgcttgaggtgcaagaaagatgggtttgaaatcttttcaagggtttgtctttttgtttatggtgtgattttagaacataacaaacgtaaatttagggttgtgaattcaggttcctgttgtgaattttctcagacagatacagttgttaaagtttgaagtttgattaagatttgactgatttaagtatggtatttcttgtggtaaagtgaaaagggtgtctttaagattattgttgatagtgtcggcaaaataaagttatactctgtatacgtaataatcagccaggatacacgtaatcacaggaatttaataatttggaatggtagtcttaattaacgtcttcacatattgataatgattgcttactaaccatgtatatttttatacattgagggactaatttagaaatataatttcacttttgattgagttattagtccaataactttcacagttttactataatataatattgaaagtatggttaattgacaatagggtatttccactgataatcagtcaccagtaataataatttgttgggactagaatcaatcacttgagttttaaattgatatatgcctagatggttgttaggaccaatattcctaaacaataccaaattttaatatagaaatgtaaaataattcgccgacacattatttcgttattgacattgaatatttcaatgatatcaactctgtttatttacatctatttagtataatttcttgagcaacaaaaaaagtagttttaaagttattttccctagatttttctattgtaaaagcctatatatcacaacaaaaaataaccattttctcttttggcaagtttaaaatttttataatgaatataccatttttaaaaaaaaattatccaaactaaattaaccattttctcttttggcaacaaaaattaaccatttaaaaaaaaaaaaaaaaaaaaagtttaaaatttttataacaacagaaagtaatattatccaaactatgaataattaaaaaatctgtccacatacgatcatatatttctctccaccgacagccgaaaacactgtcaatggcccacgttcctctaaaagctgtcgtcttcggtaatattttccggtaataaactaacttccgatcacaattacacaaaagcccctttctcgtttataatcataggctatgattcatagcaaacttacagagttggttattaagaagtcaaaaatacagattccttaaaatattttttttctgttcatatattttttatcgagaaacaattacttaaacataagaagcaagacaagaattaatgttcttattaacatgatgctaatataatcggaaaacaaaatcaaatcatgatagaagggtaaaatggtcaaatcatcgttcccggctcaaattttactaaaacagccactagccagccagatcccaaaaatgtctcattgcttctctcgttctaaaaaaaatcttgctgctatctctctataagtccactcctccttcaagcaaagcaccttcctcttctttttgctcctctgagattggtttaagattaaaccagacccatctaagggatctggaacaagcttcgtctctggttccactctgatcatcagagtattaaaaatg

SEQ ID NO: 32697 - DNA, 3000 bp, Unknown; identical to SEQ ID NO: 1014
  misc_feature (1)..( 3000): 2750-1469P.txt file - cDNA_ID_3060162; gDNA_ID_1620347; Annot_ID_154198

SEQ ID NO: 32698 - DNA, 3003 bp, Unknown
  misc_feature (1)..( 3003): 2750-1469P.txt file - cDNA_ID_3060176; gDNA_ID_1620348; Annot_ID_154234
agcgatacgttgagagactctttcactcgatagcaataaactccgccgtgacgtcaaggggagatggtcttcctcaaggaatgtaaaatcagactccgatgaagagatgttggtaggttcatggcacatcttatacatttgaattagagtaatacagaggaaaagtacatggagactgaagaaaattgctataatcgagatttctccaaatttgctaattgcgtatagagctacaaaagcgaattagataataagagagaagggtttgttaagaaggtaaggagaatgaagaaaggaatctcctttggacatgaacacaaggagaagaatctcagattgtcgaaaccctggtaataaacatgaagaagcttttgtgtcactcacttttatgaacaataaaaaagttgtttttagccaaattgaaacataaccagtgaaacggagaccttacctcagcatattcgatgaaacactgaaattgagacgctcttactgattaacaagttaagaaagaaatcgttttttttttttgtgtgtgtttatcatcgaaacagaggggaaacaggagggagcgaagagaaaggttattttatttgggctaatgggccaataaaaatagaacctaaaggcccatagatgtaaaccctaagctataaataaaagacttcgtctttgatttcgccgcaagatattatcttcacgaaaagatccgatttttttgttctgattttctgttaaaatctgaatttttcgctacgaaatcttaggttaagaatagcatataaggaacagatttgtgataggagtctttaagcttagcactcatgtatagcttaaaagaaatcttatgttccgatgctaaatcaaacatcttcattgatggtttggagtctctggacatgtagcattctgggaattttttttcccgtggattctagcattttctcgagattcgacatcttcctatgtttttaattctgatcttatgtttggatattttagatcttcgaatttctatgataaagtgttaaccttttctcaaataaaggttttgtgaaaatttgctttttgatgctgctctatgatgattctttttgctttaaccacactgaaaagatggggttgagaatgtgattttgctcttcttgattcaaaccagagaaagattagatttgatctcggagtttcttgatgacactttgatctaagttgcttgaaggggattctttttctcctttgtggtttagattaaggtagagagtaatgtcgagctcttatcaacatttttcatggtttgaggcttgaagaacattcacgtttttcaagctcactcatgtggacaaccttggcccttgtctgagaagcagctttttctcatattcagtttttctaaatttgttgttttaaaaaaaaaaattggtttgtttttttggctgttctatgatgattatattgctttaaccacactgaaaagatgggcttgagaatgtgatgtggttcttcttgatttaatccaaagaaagagttcttgagctatatgtattgcttgatgacactttgatctaaaatacttgaaggggatttgtttccctttgtgttttagatcaaggaagagatcagtgtagagctcttgttcgatatttttcttagtttaaatcttgaagaacattatcattttctcaagcactcatatgtggaatcattgtgccctttgtctgagaagcagctatgaattctgtttttgtcttcgatattgttaaacgtagctgatttgtaagattactttgtgatcttttttggatgcttgatatgtatccaaccaagagtgggtttcttcttacaaagatattgagttaggaattttaatgtcattttatgttcgaattggggaaaattcacaaaaaattgggaaaatagaagagagcattattcgatgtttaccacatggtggaataatttgacagaacaatgtactttgggaatgacatatggaacaaactgtgtaaaccaatttgatgatgaaggtgaacgagttacatataggagacttacacttccataataatattcagaaactatatgaaagtgtatctttctttattactaaaactcttttctaataagaaatgtgtaaactatgtaactcggcaacggttccagactctctaatcctaaatcaatgttaaaggcgtaaggctcttgaacctgttcattgtgagctttgaactaagtattcaattttttggacaatccgaaaaacacaacagtataactacaaatggattagtcccatttgggcgtagtctcattcgtttggacgagaaacacaacgaaaaacctagccaattttgttgttctcatgtatgggcttaattggggactaatccatctgtggttccccttgtttccatagttcgtaattttattcgtttttcgtcttaagttttcccttctttaggtttagtttccggagatatttttgttttccgccggctttgtgtttcaaatttgtattccaccctttgtatttcacaacctataatacaatggaaaaattctggatgaaaaaaagaaaaagaacacagtatatagaaaaatctgaatcacagtactaacatcattgattttctgctacaaaaatgagtgtacactgattcttaaaatagatacgggctataacataacaaaaagaaaaagtgggggatggcttttgcaataatctcgaaagagtttctcactcacatcacacccttggtttataaataaaactcattgatcttgacggtgaaaatatcgccacctgttaatttgtaaaaaggtttcagtacacttagctacactggatccaagtctagtgctaaactcaaacctcgtggttttagaccaaaatctcttcttcttcgtttccttcttcctcatcatatctttcatcttctccaccagaatttgttttaggctctccttcttctgtttctttttctcccaaagaaacaattagatatg

SEQ ID NO: 32699 - DNA, 3003 bp, Unknown
  misc_feature (1)..( 3003): 2750-1469P.txt file - cDNA_ID_3060181; gDNA_ID_1620348; Annot_ID_154229
aaaacttatataacacagagatttgataattttttaattgttgaatactttttttttgtgctaatttttatatgattaagatttaattgattttgtatattaaatattaaattgttttacgaacttatttgtttataatttggtaacagatagatatttgagtattcagtatattttgcttcagtttaggaaatctttgatgacccgtctttagatccaataagccctataatctagatattaacctgtagtataacgcaggtaggctaatattttagttaaactaaaaacttttattgtaaagatgatttaaaaatatatgatattattttatttgattttaaatgtatagtaaactgtgagttgtatatgttttgttgatattatctatattgtttagtgtttaagattatacacttgtagtttgattgttaatttaagagtttcacctgtagtataccatcttgtattaatatcgatctaaacccgtcaattctaggattttccagcttgtattaaaaaatgaatcacatcatacacataaaaaatctaatatgttattaattattatagtatataagattataaattttcaatataatatgtatgaaattaaatataaatatttcaaattatgacccgttactcagtagaaagttttcttaaatctatttttcacccgttataatattttttcatgtattgaacaatttatattcgtttttaaaaattctaattatggcatatgcgaaaaaattctaattatttttttataatgatgatattattttttcgcaaaaatagaatcatataaagatgagaagtgaattataataattaataaaaaattaataaaaaattaatacaataatttagatatcaaatctaatttgttgattttaattggttacttttttggaaattaataatgtatttcatttttctaattaaatcaaattaattaaaatttagatatcaaatcttatatgttgattttgattggttattatttttgaaaattaataatatatttcgtttttaaattaaatttaattaattaaattagtatttgactttttaatccttaaagagatacattaatttactctttaaaattttatttctaatggcatacctatgtaattacttacaaaaattaagattatatttaaaatgtatttcccaaataatatagtaggactaaaaagctttgaatcttataatactttaacgaaaaaaaatttgaactaaaccaaatatcataactgtctgtgagctattattgtattcgcaccacccaattagaattttgataggtactacaatattaagtttgtgataacagccaattattacaattgtttggtgggtcattatgttcccgtgactctgggctattttgtatatatgtcactatttttgcctttcttgttgtaaaatttcgaaagctctttattttcattggtgggagagtcctaatcttcttaatttcttatcatatagtcccaacttgtatgttttgtaattgtaataacaagttggaccgacgggatattgtgtaatatgattggtaatacgcaaacgcaaagtaacatcacagaacaatgctcacacggaaaatatgaattcataaaattttatcattatatgaatggaaagtgggaaaaaagcatacattacgaaattgttttttgcatgacataagaagaaccatttaaaaacttggtaacgtcaatttatgctagttaagtactatactctttcgtcaaataaagaaaaatgctagtagtagtagagtagactgatattgttgtcccatgaaataaaaggggcttcaaatatatagtttgatttaagaacccattcttgtataagcctattttatgggccgtaatcaataataataatgggcttactttctacaatgtactcttaactgaatatcaattatagtttgggccgaaataaaaacgttggtctcatcaaaatcctaattgttttactttaatatcatgtcttcagtactaaaatactaatgaggtaatctaatttgtatattttcttcccaaaaattttcgatatgagttattccattttaatacagaatatattcttacttttagaggaagtaaaattttgaaactactcaaatcctattctatatatgtacaaacacattttttttctgccgatgacttagatagacacaaagctaagaatttcatattgtaaaaaaagttaacacgtaaatatgttccacatatccgaaaggaatttaaattagtagtggttcagtattattaagtcagacatttttaggagacgttcaataatataacatactttcccaagagttgcatgtttccatcgtacataataaaaccataactaaacaatttaaattattcattaaaaataaaaaaacggatagtatttgtttaattttcacattaaagtatcttttaattaagtatttattattatcttttatctacttatgtaatgtttataacacttcttacaaatctctccagattccttcataaatggaaacaaaagcatttaaatatgtaaatcatatgatttgttactgaaaatgctaaattacacaataataaaaagatgtaagaatatacagcaaactcatttcttcttgctgtaaaaataatcgcacggaatatttaaataaattaataaaagattctgtatctcactgtaaaaactaaaaaggtaaaaaattgaacaattaactttttctttccattcactgcagtctgcaattaatagcctctctctctctcctccttcatcatctccccatagccgtcgagacagatagagagagctgaaatttctgtgagaagattttcttccgacattttctctttccaaacactgttctacacgtagtcggaaatctcggaaaaaccaatctccgagtcagagagagagagagaggcgttcactgttgtaaaggattaagctttgggtaagaagaagatg

SEQ ID NO: 32700 - DNA, 3000 bp, Unknown; identical to SEQ ID NO: 1023
  misc_feature (1)..( 3000): 2750-1469P.txt file - cDNA_ID_3060206; gDNA_ID_1620349; Annot_ID_154259

SEQ ID NO: 32701 - DNA, 3000 bp, Unknown; identical to SEQ ID NO: 1027
  misc_feature (1)..( 3000): 2750-1469P.txt file - cDNA_ID_3060218; gDNA_ID_1620349; Annot_ID_154256

SEQ ID NO: 32702 - DNA, 3000 bp, Unknown
  misc_feature (1)..( 3000): 2750-1469P.txt file - cDNA_ID_3060230; gDNA_ID_1620349; Annot_ID_154245
gaactcatctaaccatctatgaaacttgattaaaaagtgttgtagaatgatttgtgtatgtttatgtaaaagttctatcgctcccaatcatacccgtaactggatacacgttgcaattgatctttttattttttggttggccgcgcactgcattgaattaacactaccttatccaaacaaatagtattaaatatctacttcaatcgaacactcttaagcctctctttgttcacaataatgataattagattagtgtcagcaacgttgacacatattcgtatctacaacacacatacgcatacatttatatataaattaatttcgacaagaataaattatgacttgtatggtcaccaataagtctcacatttttgggtacacaaaagagtaataatgaaataaataaaaaagataatgtggagtggtttatacagtgagtgggatggtcaaatctgaattttagataagatgcaaaattcaggttgcctcaatccgaccacgtctcacacgccctgtgccagacctgcccatctctgttttccctatagtatttttttctaattgaaaaatacaaaaattccattctccatatatttgaagttatataaaatccgtggcaaaatatgtgatttgacttttgagtgccaatccgatatgtgagccgttttgtaaacacaatttttggtttcagtaaaagcaagatattaggatctgatttcatatataaatttttgaagataccttattatatcacccaaaaaaaaagctgtgtattcaagaaagtgtagtattttaaaaataaatatgtaaaatgttcatgagtgagactccctactagtttaagattgtcaaattcacctagttaaagttggatcacttatttatccataaatagataacttaagagattgtcaaattctatttaaagagtctatctaaaaggcccattctcttttttacataaaccaaaaccgctcattaactattttgatcagtccagtccaatagtttgtgttttccttgtttttgggctactagcccatacacatttccaaaaaaaaaaaaaaaacttttttttccccctattttactacatttttgttaatttaatgtttgattcaaaatttacctcaccaatttatcccctcttctaatttcctttctatgtatttttttcaattcagaaatttcataccttctttttatcatccaataatcgccccatatttttcatactcacagttattttttttgatttttctgtatttattttcccatatttttgaagataatatcaaaacttgaaacatatggtagcagataaaaagcttaaaatagcaagagcttagtagattttatttggaaattggaaagccaggtgacgattaaacaagaggccacgtcatgtagatgcaccagtccgatgccaaaaagtatcctcgcaaaacaattggcagaagacacgtggctcaatactggtgaagagtcggtcttggcgtcttggtcgacttcgtaacgtatccacttcatatttgcaatccaattaatttagtaaaaagtgtgtaaaccatttttaaaaacaagtaaagtaaactacgtgtgaagaaagaaacaagtacggctaaaaaaatactaaaaaaattagttgaagttgctttgttttcttttgttgaaggtcgttgagaacatagtttaataaatacaatgaaactcttccgataagataagacaaatttcggtgttatctttctctacaggagtatttaataaaaagtataaatcgaactattttataacacgttcgaaatcaaatatactcatgttttccacttcccacgtttacgctgacaatctaacattatgtgtttcaacaagtaataatgtaacactcaccaaggcatgaactgatggaagtgctatgaatagaatatgattgattgtagtgtgtgtttggagcttttactggtcaatacacttaaaacagttgaggattggattttttgactaacattaatgacccaactgtcaaaaattagtcaaactttgcggtacataatttaattaacacgtcaaatgttggaccatcactataaaaaaaaatatttgttcatcatgagaatcgtccttggcccaaaaaaaaatccgaaaacataacaagaattataaggttagtaaaatgaaaaaatcataaacagatggaaaatcacagataaccataattacgaaagtgaagttgagagaggattggacaaaaatagtgacaaggaagacgtagacagtgcagtgctgtgattgattcgagaatgtgaaacctaaataaaacaagtctttctagattgctttttcgtatttttaggcggttggtttttttttttttttttaaatagctacgtgttcccattttattggaaaaacaaagtggcatttccttttaaataaaaatttttaaagataaaaagggagaaactgtaacaaactggtagcaaaaaatcagtaagtcaggtcaggtgttaaccctaaaattaaaattgaaaataaaactgagagaaagagagagacaaaagacatcccaattgcagagaaaccgtgttgaagttggtctctgagctgcttcttccttcccttttttatttttatttttccagctctttattttcttatttacaaaaaactttcccaagaataaaaaccagaagaatccgtataaattatcctaacagtttcttccaatatccaacaaatttcagatttttgtttttgttttcttcttctctacttgagtaatcatcaacgattatggcgtcaagtcagtggacgaggtcggaggataagatgtttgagcaagctttggttctttttcctgaaggatctcctaatcggtgggagagaatcgctgatcagcttcataaatctgctggtgaagttagggagcattacgaggtcttggttcatgatgttttcgagattgattctggtcgagttgatgtccctgattacatg

SEQ ID NO: 32703 - DNA, 3000 bp, Unknown
  misc_feature (1)..( 3000): 2750-1469P.txt file - cDNA_ID_3060230; gDNA_ID_2926256; Annot_ID_143124
gactcgacgctttaagatgaagaagaagcaatggattgactgattttattttcatgggtcgaactcggagcctttgatgctgttcactgaaatccaaaatccaaaatcaccaacaccaccaactaaccgcatgtgtatatgtaatccaaaatcaacactatttttaccacaccaaaactcactataaggttaattcgaatagaactcatctaaccatctatgaaacttgattaaaaagtgttgtagaatgatttgtgtatgtttatgtaaaagttctatcgctcccaatcatacccgtaactggatacacgttgcaattgatctttttattttttggttggccgcgcactgcattgaattaacactaccttatccaaacaaatagtattaaatatctacttcaatcgaacactcttaagcctctctttgttcacaataatgataattagattagtgtcagcaacgttgacacatattcgtatctacaacacacatacgcatacatttatatataaattaatttcgacaagaataaattatgacttgtatggtcaccaataagtctcacatttttgggtacacaaaagagtaataatgaaataaataaaaaagataatgtggagtggtttatacagtgagtgggatggtcaaatctgaattttagataagatgcaaaattcaggttgcctcaatccgaccacgtctcacacgccctgtgccagacctgcccatctctgttttccctatagtatttttttctaattgaaaaatacaaaaattccattctccatatatttgaagttatataaaatccgtggcaaaatatgtgatttgacttttgagtgccaatccgatatgtgagccgttttgtaaacacaatttttggtttcagtaaaagcaagatattaggatctgatttcatatataaatttttgaagataccttattatatcacccaaaaaaaaagctgtgtattcaagaaagtgtagtattttaaaaataaatatgtaaaatgttcatgagtgagactccctactagtttaagattgtcaaattcacctagttaaagttggatcacttatttatccataaatagataacttaagagattgtcaaattctatttaaagagtctatctaaaaggcccattctcttttttacataaaccaaaaccgctcattaactattttgatcagtccagtccaatagtttgtgttttccttgtttttgggctactagcccatacacatttccaaaaaaaaaaaaaaaacttttttttccccctattttactacatttttgttaatttaatgtttgattcaaaatttacctcaccaatttatcccctcttctaatttcctttctatgtatttttttcaattcagaaatttcataccttctttttatcatccaataatcgccccatatttttcatactcacagttattttttttgatttttctgtatttattttcccatatttttgaagataatatcaaaacttgaaacatatggtagcagataaaaagcttaaaatagcaagagcttagtagattttatttggaaattggaaagccaggtgacgattaaacaagaggccacgtcatgtagatgcaccagtccgatgccaaaaagtatcctcgcaaaacaattggcagaagacacgtggctcaatactggtgaagagtcggtcttggcgtcttggtcgacttcgtaacgtatccacttcatatttgcaatccaattaatttagtaaaaagtgtgtaaaccatttttaaaaacaagtaaagtaaactacgtgtgaagaaagaaacaagtacggctaaaaaaatactaaaaaaattagttgaagttgctttgttttcttttgttgaaggtcgttgagaacatagtttaataaatacaatgaaactcttccgataagataagacaaatttcggtgttatctttctctacaggagtatttaataaaaagtataaatcgaactattttataacacgttcgaaatcaaatatactcatgttttccacttcccacgtttacgctgacaatctaacattatgtgtttcaacaagtaataatgtaacactcaccaaggcatgaactgatggaagtgctatgaatagaatatgattgattgtagtgtgtgtttggagcttttactggtcaatacacttaaaacagttgaggattggattttttgactaacattaatgacccaactgtcaaaaattagtcaaactttgcggtacataatttaattaacacgtcaaatgttggaccatcactataaaaaaaaatatttgttcatcatgagaatcgtccttggcccaaaaaaaaatccgaaaacataacaagaattataaggttagtaaaatgaaaaaatcataaacagatggaaaatcacagataaccataattacgaaagtgaagttgagagaggattggacaaaaatagtgacaaggaagacgtagacagtgcagtgctgtgattgattcgagaatgtgaaacctaaataaaacaagtctttctagattgctttttcgtatttttaggcggttggtttttttttttttttttaaatagctacgtgttcccattttattggaaaaacaaagtggcatttccttttaaataaaaatttttaaagataaaaagggagaaactgtaacaaactggtagcaaaaaatcagtaagtcaggtcaggtgttaaccctaaaattaaaattgaaaataaaactgagagaaagagagagacaaaagacatcccaattgcagagaaaccgtgttgaagttggtctctgagctgcttcttccttcccttttttatttttatttttccagctctttattttcttatttacaaaaaactttcccaagaataaaaaccagaagaatccgtataaattatcctaacagtttcttccaatatccaacaaatttcagatttttgtttttgttttcttcttctctacttgagtaatcatcaacgattatg

SEQ ID NO: 32704 - DNA, 3000 bp, Unknown; identical to SEQ ID NO: 32702
  misc_feature (1)..( 3000): 2750-1469P.txt file - cDNA_ID_3060230; gDNA_ID_2926256; Annot_ID_204561

SEQ ID NO: 32705 - DNA, 3000 bp, Unknown
  misc_feature (1)..( 3000): 2750-1469P.txt file - cDNA_ID_3060234; gDNA_ID_1620349; Annot_ID_154243
gaggtcttggttcatgatgttttcgagattgattctggtcgagttgatgtccctgattacatggatgactcggcggctgcggcggcgggttgggattccgctggtcagatctcttttgggtctaaacatggcgagagtgaacgcaaaagaggaactccttggacagagaacgaacacaagtatgtttctttatcaatcatttcaaaaaaattagggttttggttggtttgagaatttaggaattaaatgcaattttgctaaatttaggtgatttaattacattgtttgatatgaattttattgatgcagattgtttctgatcggattaaagagatatggtaagggagattggaggagtatctcgagaaacgttgtggtgacgaggacaccgacgcaagtcgcgagtcacgctcagaagtattttctgagacagaactcggtgaagaaggagaggaaaaggtcgagcatccatgatataactacggttgatgctactttggctatgcctgggtctaacatggactggactggccaacacgggagtcctgttcaggcgccgcagcagcaacagattatgtctgagttcggtcagcaattgaatcctggtcatttcgaggattttgggtttcggatgtgatgaagaaagggggagacaaattgggatggctttagtttaatagggttttactcattttatgtgaatagggaaagaaataggattgggtattttcttatacagatgatgatgatgatgatcaaagaataaaaataatgtatagggaagctttttgtaaacacaaatatgtttggtaaccattttggtattttgaatcaatgcatatggttgtttttctcgattattttaaacttgatttcttacaacacacaaacacacacatcagaaggttaaagatctctgtacaagtacaagatctctcataccaagagagaacataggtcaaaggcattattgtttttcactactgcttgccttatgaccggattctgtatactgtgagtgataaactcatggcttgtttgtctcaggtttctgcacaagagagtgaaaagcaaacagtcaacgagcaagttcatttctttgctatgttaagttagatcatcatttgctgtgacattaaagccaaattcaggttcagaaatgcgcttcttctgaccacagggcatttcgtacgtaaaactgaacacttgaatgaaaagagaccaatggaagttgatggtatgatgaaagtttaccttgttggcacttcctttctcaccatctagcttatcttgctcgagtttcttcttcttctccagtctctccctctccattttctacaacaaaaagatcggtttcttataagtgcgtgaagagaaatagcttccttcattaatttcaatagtcatagccaaatattctgagcctgagtaatgcaagtgagatgcaacgaagctataaaattgtgtttaaactgtaactatgaggtcaacctcaaatcaaaaaggaacacaaaaagctatagagattgcttaacaacaatgtcaacaacacacagttcttcccctttctacaacaaatacttttcgtagaggcgtaagttggatcacagattcacacagacaacatttacttcaattattttccatctgtatgaactaatacgccttgaaaaactcatccacacactatttgaccatttattatcaaaagacgactttacaatttgatagacaacaattggattcaagtcttatgataagaataagcctcggatctttatcagtgtatctcataagcttaaaaatcaatgctaacgcaatttcccaaacgatatttcatataatttgattgatttcctgagatcagatttttaccagtattcgctaacttgaagcaaaatttcgacaaccaaacattgaatccaaataagcaacagcggctaaacaaactattatagcatcgatacataaatcaagagttagaaaaagtcgacgatgaagaagaacctggatatacatgctctctttcgcgcgttcctcttcgctgagcacacgacctttatcgtcactgaagtaccgaatcgccggtcctcgagtcgataccaccgaacgcgatgcaccaatctgcctctccccaaaggatcgagccagctttagctttgtgatcgcagaacgagccgacgacatcttgctaatcagtgagatggttttctcaaaatcgttttttttgggtagaaaatgtctttggagtgaagagacagttaggcagcttcgggtccggaccgggtcgggtatagattattgaagaacccgctagaacattgcaccggcgtaattgttagctaaggactttggtctaatgacccaatgggctacaatagcccaatagtgagaacctttccccagactcgtctacaattctttggtttaatggcccaagttgacatacatgttttcccctgtttttagatattttttccttttctttggtcaacgaataaaagtttttaattttttatacaagatttttttactttaaactttttattagagacaaaacaaaatattttttaaaattctttagcaggtttaatttaaaaaatctgcaaacagcaaaccagtccgattggcttggagggtaaaagaatagaaaagagaagatatttggtaacttgcagcgtagaagtttgaacgtcagcaagcaaataattgcatctacattcgtctcactatgatcacattattctatagcaatttgcaaatattcaattagttacttgtagaaaccatataaaataaaaataaaataaaagcttagtagatgtataggtggagcatctcgatagtgacgtcacacatcacatcagcagattcagcactccatcatctttttgttatcactaaacgccaatttctctcgccattttatagattaaggtgttctctctgacttcggaggagaaagaaagaaaaaaaatattcttgtttcaaacttcaatg

SEQ ID NO: 32706 - DNA, 3000 bp, Unknown; identical to SEQ ID NO: 32705
  misc_feature (1)..( 3000): 2750-1469P.txt file - cDNA_ID_3060234; gDNA_ID_2926256; Annot_ID_143122

SEQ ID NO: 32707 - DNA, 3000 bp, Unknown; identical to SEQ ID NO: 32705
  misc_feature (1)..( 3000): 2750-1469P.txt file - cDNA_ID_3060234; gDNA_ID_2926256; Annot_ID_204559

SEQ ID NO: 32708 - DNA, 3003 bp, Unknown
  misc_feature (1)..( 3003): 2750-1469P.txt file - cDNA_ID_3060244; gDNA_ID_1620350; Annot_ID_154302
catttataatgaacctgcaatattaggcccatatgtttattatgatttcttacatctttaggcccagattttaatcgtccaggctcaatattaggcccataacgttcggtttgtagttgtacaatcgcaaaaaacgtaggtagtcccgctagttcagctactgttacttccactaactatccttcgtctctacagagcatcaaagacttccatgtctttacaattcagtcctcacgacacctctgtaattacccttttgccctctgtcctccataactatccttgtctctcttccctctctatttctcgcggcttcaccaaaatcaataccccaagcgttcggatgatgatcattttctctttttattactatcatacacggccgctagtcccgctactgttacttccactaactgtagcatcaacagtagtgggcttttactattttaacatcaacttcaactaaagataatcgacaagttgtaataacgaaattgtacaaatgtttatgtcagtatgtaataaagccacaatattctctggcgaattattggtaaacaacaaaattgtggcaaagaaaaagtgatcctgttacagttatttggaaagttagaaaaaaaaaataaaaaaaatccatgaacaaaaaagaagatggctggcgttttcattgaaaaagtgatttgatttgatttttcttttttaaaataatactttgaacgtaagttaatgaataacaaaccattaaaaaaaaaagtaaaaaccaatatgatctaatatcttataaatatatataatacattaaattataaatgaacctcaatcttgatacctaaatctatatcactagattttaacccgcggtataccgcgggacgatttattttttaaaagtaatatatattaaaacttgcaaattttatttttacataatatttatattttacagtttataattgttattaagtaacgctataccatgaattcatgagacaattgttaaaaaaactgaagttttaacccctattaaaacagtatattaataatattttaaaattttataaatattgattcaaatacatcaaccatataacccaattccaaaataaaacacgttctttaatttatttacccgtcccatgattttttttaaagtagtaatttttaaaatttaaaaattattttttttatataaaagttttgcaaattgtatcattctctaatacatttatattttataatttaattttatatatagtaacattatacatacgacataacatttttggttttatataattttttctaaattaggatgatttgatatgtttaatattagtggtcttaaaaataataaattaaagatttaatccatattaaaatggtggattaattatattttacttttttattaatgttgattcaaaaacccgcccctccaaatccgtcttgccaaaaagtcatttattttattaatattagttttattaatgatatgactctgaattataatctaaatattttagctaataacataggagtgcactttatttatttaataggagaatgtaccatatgacctgaatgcacttttatccaaatccaccaaaaaagtcttgcaaaaatactatagagataagaaaacattgatattgcgataaaaaattaaaaactaatttttatgtgattaagatttaattaatttcgtatataaaatattaaattgacttatttgtttataatttggtaacagatagatatttgaatattcaatatattttgcttcagtttaagaaatctttgatgatccgtctttagatccaataagccctataatctagagattaacctgcagtataccgcaggtaggcttatattttagttaaactaaaaacttttattgtaaagatgatttaaaaatatatgatactattttatttgattttaaatgtatagtaaactgtgagttgtatatgttttgttgatattatctatattgtttagtgtttaagattatacacttgtagtttgattgttaatttaagagtttcacctgtagtataccatcttgtattaatatcgatctaaacccgttaattctaggattttccagattgtattaaaaattgaatcacatctaatatgttattaattattgtagtatataagattataaattttctatataatatgtatgaaattgaatattaatatttcaaattatgtctcgttactcagtagaaagttttcttaaatctatttttcacctgttataatattatttcatgtattgaacagtttatattcgtttttaaaaattcaaattatggcatatgcgagaaaactctaattatttttttataatgatgatattatttttctgcaaaaatagaatcatataaagatgagaagtgaactataataattaataaaaaaattaatatgataatttagataccaaatgtaatttgttgattttaattggttacttttttggaaattaataatgtatttcgtttttctaattaaattaaattaattaaaatttagatatcacatcttatatgttgattttgattggctattatttttgaaaattaataatgtatttcgttttttaattaatttaattaattaaattagtatttgactttttaatccttaaagagataaattaatttattctttaaaattttatttctaatggcatacctatgtaattacttacaaaaattaaggttacatttaaaatgtacttcccaaataatatagtaggataattataaaaaaaaaaaacttaacaaaaccaataaaaatgtgtattatatatttgttttcaaataattgttttcgctaggggatcaattattttgtattaaatatggaccaaccaaagtaatcagtctacccctatatttacgttccctatccattatcgacaaaaagcaatcactcctcaagcaaatcactcctcacaccacagaaaaacaaataattgaagaaatg

SEQ ID NO: 32709 - DNA, 3000 bp, Unknown; identical to SEQ ID NO: 1036
  misc_feature (1)..( 3000): 2750-1469P.txt file - cDNA_ID_3060263; gDNA_ID_1620350; Annot_ID_154288

SEQ ID NO: 32710 - DNA, 3003 bp, Unknown
  misc_feature (1)..( 3003): 2750-1469P.txt file - cDNA_ID_3060267; gDNA_ID_1620350; Annot_ID_154287
ctggaaaaagtagcacaggtgaaagttaagataaacagactttaaacatatagccatacagtgcaacatatacaaatacagcactagaagaccaaaacatatctttctgaattaaacatttgcctgaagcttaaccctcctttctccatatcttcaaattaacaagaagaaaccagcaaaactagacatagaaagcaacctgccgttcaaggagctggttgttagatccttggaaatgagtatctgtgcctatcttcccgtttccattaaactgataactcaaaggggagctcacatcagaagaagaattgtctgttacacggttgttctcaaacttatacctgcaaatagattgacatccaattgcttatgttagtccaaagcaaccctggaacaagaacttaagaaagcagagacgaaaactgaaaacttataagagacagagatacaattatcattgatcagacatatcttaaagggagtccaggaacttcagcataagtactaatttgctatatgagtttcataatcttccacttgtgtgtcaagaaaattagcaaaaatagcatgcaaggtgcatttgggtgaaccataccctgcagaatcaggagtgcacaataacaaagagtggcataagaaggaaagtcaggacacaccttaacatttcagcatctgctctgacatcaatcttctccatctctctggatatcagagtcttaatgcgtaaagtgtatgcagcaatagcctgaagcagcagaggaggacccctcagggaatttactataacagttttcatctcatcagttatttctccatcatactcaaaacccagcttggcagtttccagctctggaagtgaacaaattccatttccttcgtatgcagggaaggagttacgtattctttcaatcatgcgtgatgcaagcaaatcacatactatcctgatatttcgttctcgggttgtttccatgagaatgacatcatctgcagacttagttcctttgacagtggaataaacagcttccctctcactgttagcactgaggctgcttaacacttcattcgatgaattgacagaccgttgtgcatcatttgcttgattaacatagacttgtagccttttgtgatactctgcaaatattcttgttgcttcatcacattgttgatcatacgcttccaacaatgcttgcttgtgtctgaaaaaaggaaaaataaaactcactaaacaatttgaaagatctactgaacataactacaacaaatattttgatttgttgtatgaacagaatcaatgcatttcaacatagataaatgctgttgattgaggttcatgaagagggcaaaaagacaatcaatatcgccatacaaaagtgagaatcttaagaatgggcgatgtggcatatccatgaaaccagagaaacaaaatagcctgactaaatcccatatattccattctagggtatattaaaatcattggagaatcaacaaaacgaaagaagaatacttcagggctatatatctatggctcctgaaatcatagagaaacgaaatcgaaataccaccaaaactctaagcagctaaccatactacacatagcaaccatacttgtaatggttctgttgaggacttaacactaacgataataaagcataacaacaacaagagaaaatattaaatgaacctgagctgagtggtgcaggttatttctattgtattattttacaagtgagaagcaatgtatccaaatacagtattcaaaattgaaagattcaaaacaaacctgtaatttgctctttcatcaagcatcctcttccgctctgcttcttctctagagacctccaacattctagctttcaaatcttttctttgcctcctcactatgttcctcaatctctccacttcctttgcagctaattccctttcctgcaatgcagcttctctatcctccgcataactcgaactctcaccagtcactgtcttatccttccgccttcctttactcttactctcctccttcccaggatttaccgaactcccaatgctagcattactacttcccccatgaaccgtaatattccgcctaattctctccactgtcttctccgatttcactcggtttatcaaaaaattccatataggtatcatattccctctacaaatcttccttatagcatcaatagaaggaacatgagatttgctcgatccattatacggacctaattgcctgtaccccatttccttctgtaaccattctaatatcgcctccggtgtcggagccgagctcgataaactctgcattctctctacaactacaatacctaactcaatccctcaaatcttcatgaaacttccgaaatttctactcatactttgcgccttttcttcaaatccaaacaatcaacgtagagaaatacctaggttactcaaatcgagcgaaaacaggagttcatagacgctataaacctaatacaattcgcgaaatgcagcaacaatcgagcgaattggtactctgatgaacacagagacagaaggaagacgtagacaaacagatctggaatcccgacgactaactcgccggttccggtgacggtagatggaagattgtgacggagagatggatctggataaagagatttcaaatcgaggtcccgcttgtttattggattttcaattaaaggaatcaaactcgaatttttctgcaagtgtcgtcgactgttgaaagttgaaactgggtaataaccgcgtcggactcgggtatgagatgtatccgggtcggactaaggtatttaagtctaaccgggtcgaattgggtaataagaaaacactatgggtcaaaattagaatagtttaaaattacaaccagaacatttagggtcaaagttgaatttatataacactaaagggatggattccgaattgttttaattttctcaatctaaaacccagaggttccttcctagggttttgtttgatactctcaaatcggaaaattttgaaacaatg

SEQ ID NO: 32711 - DNA, 3000 bp, Unknown; identical to SEQ ID NO: 1039
  misc_feature (1)..( 3000): 2750-1469P.txt file - cDNA_ID_3060275; gDNA_ID_1620350; Annot_ID_154283

SEQ ID NO: 32712 - DNA, 3000 bp, Unknown
  misc_feature (1)..( 3000): 2750-1469P.txt file - cDNA_ID_3060311; gDNA_ID_1620351; Annot_ID_154317
aaggatcatctgccctaacaacatataaattcttgctttccaactcatgtgtacacgtaatcatttcggcaacatcactatcaccacacaaatccttacgattctgacctacttctccagatgggaagtaagaaaacttactcatattttctgtataaccagcactcaaaaccatatttgtcaacattgctaaactaggaacttcaaaatcaagctgtaaacatcttgtctcaccgccatggtatgaaccatctgctgcccaatatcctcctacatgcaatcgaaagaaaagtgtcctgacaaatacaattatcaaaaactctctaaaattctgatcaatctcctaagtttttaatattgtatcatgtaatgcaaggaataagatatacgtctcaaaaccaatttaaaaaattgaaaaaacaagaatattttccaacaaaattcaaaagatataagaagtgggcacgagtatacatgtagcatctctaagcatgaacgccatcacataaactcaaagacgtggctctatagtgcaccaaagaaattaactccccaaggtgagtttaaaagtcaaagtatggatcgaagcaaaaaaaaaagtttttagagtacgtgaaaaggaaaactaaaaccaataagaatgtcttgtaacagttaccttaacatcttgcaagctccagccgcattcagtctacaaaatttcgcgattcaatgtcgtcgatttaagagctaaagtggatttaggggtttataataaggtataagaacttcgtgttgttttttgattatttcgtgttgttttaagcaaaaaaacatgtcatttttttatatttaaaacacatcgttttattttgacggtactgtagacggcgggtggttttcacaaataattttaaacttcaggtgttttttcattaaataaataattgaggggttttttcacaatatatctttagttggggggtttaattactaaaaatcctattttttatatgaagaaaagaacgataattaaagagttaacaactccaaacaatatcatatcattttgaggtttgtactgttttatcggcgtgcatggcttgaaattactattagttcattgatcgattatatatcatagctactactagtgcctagtggaatacaaaaaataagggtaccaattcaattcagtggtattgcgcatgtcagacctaaatctcactttcggcttcacgttgatatcaattcaagggcttatgcatgtcgtatccaacaatcggctaaaaaagaataagattattggtggtgcatgcttttaaacatttgggagttcataacgatataaccattggaattaagttttgttcacgtgtcaacgatccaccatttgtttgtaccaacacacgtgccatacgatacaccaccagcatatttatcgatgtggttgttctatgtaacgtgtgtgggagtgatcgggtaaatttatcctgacacagaccattttttccttttttgggcaagaaacatatccattaatcaatctcaccatcttactctagttcgacaaaaatgtctttggaatgtccgaattgttaataatcagtttatagaaagaggtgataagtagttagcccgacgaaaataatttcaatagttatcaacagattttgataacctcaagcaaacgataaataattttactcacattattaaagttcttctctttagtattttatttttacatcttagttcttatctggttataagcaatcaatgcaaaagaatagtaaaagactcgtctaaaaatgtcaataaagaacttagcttacggaaatgaaaaatgtacaaagaaaaccatttagttcaaacaaaaacaaggattgtatgggacatttagttttaaaaacaattcaaaaaggcctcagagatcttggtggtaaatatcatcaactgaagaaattcttcatcaagagtagcaaatattttgattacatcaccggccaaaacaacttagtaaatacatagcaaacaaaacttaagaaccaaaaaacataatgatggatgatgagtcaaaagtagctggtaaataatcacataatttcccgtacgtaagggaatcattgggaatccgaatgatttttttcatcaccctcaccattccatcaaccactatcaataacacagaatttcacaatttcatacactacatatatctaatggaaaaaaaatcaacaaagcaatttcgattcagagattgatagatgtatctgcctctattcaccgagtatccttcggtcaagaaaaagaaaactcggagttttcagaagcagagcaagcttacggaggttcacgtaagcttaccggagattattacaaatccatcatctctttcgcctaacgatagattcctcaatccattacaaataaattgtatagattaagaaatttgcaaattaggctttctttgaaaaaaatcgaatcaacataagatatctaaaccatagcacatcaaataagcggcggagagaataaaatttgatcggacaaagtaactgagcagagaagatgagtttatatatgcaattatgatagtggtggactttcgaaaaccctagttcttaaagcgtgacgaaaggccattttattcggtttgggctagttataggcccattagtttaaccaaatttatagtttgagtgacggctaataaagaaagaaagcgacgacgtttcgacaaaggacagagttaaaaaattgatggcccatgcaggtttcgaacctgcgaccttcgcgttattagcacgacgctctaaccaactgagctaatgggcctattttattactaagttgaatcaagctacctaattttaattatacaaaataggatgcataaccaaactgtgtcgttttatcaaatctgccaaactttgtctcacagacactgcacttgatctttctcgtggccaaatcttttgattctccgttcattctccggttccgatctcgaagaagatg

SEQ ID NO: 32713 - DNA, 3003 bp, Unknown
  misc_feature (1)..( 3003): 2750-1469P.txt file - cDNA_ID_3060345; gDNA_ID_1620352; Annot_ID_154361
aactgcttttcaccttataatttccagattggagacgtcaataaggacatatactatagagataaaagcggattttccaacaatgactatctcacacttggagtcgatcaacttcctttgttcggtggccgtactgctgttcaatgctatgaagattttatgctcagtttttcaacaaaatttgagccatatcttgggaatgtgattgaagaaataagtataggtcttggtccttcgggggagcttaggtacttctgatcttctgtggactaccaccggtaaagccacaatagctacaataggagtttcttacacagttatctcttgcagatatcctgcacatccttctggagatgggaggtggaaatttcctggaattggtgaattccaatgccatgacaagtacatgtgagtgcttatttattgaaaatttgtatttgcctgtactaatcacacttacagatttatactacttggtttaggatggaagacttgatggcagtggcatcccaagaaggcaaacctcaatggggaagcagagatcctccgaataccggctgctataatagctttccatctggagttccgttctttgaggagggcaatgatagctttctctctgactatggtcgtttctttctagtatgttctatatcatagcctctttggtgattctgatataatatattgttatgatataaaagtggctagtaggctggattatagataacaacgtgaactgcttttcattgtaggaatggtacagtgggaagttgatttgtcatgctgatgctattcttgcaaaggcagccgatgtcttgcggagacgtcaggaagaagagaaaagctctgtaatgctggttgcaaaaattggtggaatctattggtggtataagacatcttcacaccccgctgaactaactgcaggttattacaacacctccctcagggatggttatgatcctgtagcttccgtcttgtctcgtcatggtgctgctctcaacatcccgtgagagcctttttctgaagttttcttttactatgtacataattctcagaagctgcatggtccagtttcactaacgagagaatctatcatatcttttcagctgcttggatatggcagatagtgaaatacctgagaaatatctttgcagccctgaaggattacgtagacaggtactttctttcgtaaacccttgatccagaattcaattatgttcatatgaagtatgtatgttacttgtatttagaccggtcactgttgaagcactatttacttccgtagagacacttcaaactagtctagtctctgtgttcttactgcgctgctacattagacaattaagcatgccttataagaacatgaacaaatcagcattatcacattttcttttgctagatacatgatgtttcgaagaagtggacaatacatgtgactggtagaaacacaagcgaaagatttgatgaggtgagttatttgcacatgctttagtcttatacgtctgaggtcaaagtggtggttattaaccattttctatatgaattctgcaacagatgggactaaggcaaatacgagagaactgtgtgcaaccgaatggcgacactctaagatcatttacgttttgcagaatgaatgagaagatctttagggtcgagaactggaacaactttgtccctttcattagacagatgagtgcagatatgtaaacacactcaccacccattggtgtgtttgtcttttgttacagaatcgatctttcctcaccatattgctttttcagatatgtgatgaggagaactaatcaaatcaaaaattgttatatgataaaatctctctctgtttctattcttcattttgttctatctctattgcaaaagtcttgcagaaacctttttcattggatcaaaaagttacattgtatgttttgattatcagaaagcgatccaatacagaaggtttaatcacagcaaatgtgttacatacaaagatattattgaatcaaaggacttgcctatcagcagcctcggcaacaagaggcaacctcggggtcagaccaaacaagcaagcagagaatccatagatcaaagagacaagcaagaagaggaacactgtgctgtccaaactcatcaccacatctaaaccaaacccatctctaggattaaagctcctctcaagcaaatccgggaaaatcaacaacacatcaagcacaatcgcctgcatcgtgttgaacctgacgtacctgctgaaattagggttcctcacaacgacgaagtagagagtgatgaagataagaaacccattgaaagggaagctcttgaaagctctgatggcgggaaacaaaggttggatgagaatctgaaaaggttggtactgtgtgatgatgaatttgccgtattgaatcccatcgaagaatgggtagaagtaacagacggctgagattatccgatccgatgcatcgacggaatcatcacccttggattggagtacgagtgtggcggctctgtccctggaaagtctaggttttgggaattgggtatcaaggtttagagggagaaaagaacgaccggttagggttagggttccggtgagagatggtaatggagcaaaaaactgagatattattgccattttgctctgtttttgtttcacttcacacaaaactgaaagactgcttaacacatgatgagaggataataaactaaactccactctgttttaaaagtttagcttaaaacattgtgtcgtcttcttatctttctaatatgataaaacggtacgtagttatttgaagtaaggtaacaattaaatagcctctgttattgtctttgttttttgtgtatatttaaatatcaaaatccaccggtataaaacggcgtaatgcctttgtattggacccaattctttcaattttcacctaatttaattacctccgtatttattttttagtgcacttcaatgtctcttgcatatatatattggagcaaattataaacataatg

SEQ ID NO: 32714 - DNA, 3003 bp, Unknown
  misc_feature (1)..( 3003): 2750-1469P.txt file - cDNA_ID_3060353; gDNA_ID_1620352; Annot_ID_154350
ggctccaaataagaagattgtcttagttagaaaatggacttccctctttaatataaatattaaatactttcacctactttctccttgcacaccaagccacaactgttttatacttgtccccacctaagataatgaatgcatgaatgcatggttttcaacaccctgaaaaagtaaaccggtaaaattcatcgtgggagtcaaaattggtagagtttaacatgcttattattaatttgcacacccatttctgttgtatgagtgtaatccacacacaaaaaaattgtttagcaaattgttacacaaaacagagcttaggtaataagaaaattagcaaattgttacagaaaatatattctcctaagttgtctagcctctagtatcccgataccatacaatccacaaaacagaggatggaataaagtgagagaggaaggaacagaacaatacataagaaataaaaagcaacataaaagattgggtgttcttgttagttaattagaagaatgttaaattgtcattataaaatattttttaaagaatgttaaatttctagaaaacttatctttgtgggatgaagagaatattattttcttttaaaaaaagttttgtattgttaaatctaaacatatacatcaaactttaaaaatcaaagcaaaaaaagaatatctctccttttgcatgcttttgacatattgaatttaataggtaattttcttaattaagatgttaaacttatggattcatgatttgaacaaaactgaaaaaagtatatggaagcgttggtgagattcatacctatcaaaatgaacaaaaggatcaccaaccgaatagtaaaaccaactactgtatttatcatggccatttttcttcttctttcttaatttctctctttattaaaaatttgttaattatatcataatcttaactgttttatataaaaagtgttttttcctagaatatacaaggtattccgcaaaaaatgccaataaaaatggttttaaattaaaaagaaagaccaaaactcatataacctcaaaaacatagtatgttatttttagttaatataaatattaaatactttcacctactttctccttgcacaccacaactgttttatacttgtccccacctaagataatgagtgcatgaatgcatgaaccatcattggccgatgcgtttcctggtgcatgtagctcacagccgtcgttctcacattttgttatttatgatcatacttttttttcattaaaaggaaaaaggtttactggtttggtttagaacaagaactactcgttataatcatacttttgtttaattaaaaaaacaaaaacaaataatttctagtacatcttatattacatactatagtttgatgataaaaataaaattcaaatgacgattatcatgtcgaaaagacaaataataattgtcttactgacctacctgcctgcctctatatatatactagtctttggtcgcctttactataaccaaacatcgagcttgccttagagtttgtctcaagcttctccttttttggtattttgtcttaagcttccttgcttctctttcttcttcttctctactctttctctctatttcaaaccttcgttttctttccttttttgtataaaatcttaaaatcaaccaagacaatggaaatgaaattgctctttacatcggctttcacccaaatgttcggctactcgaaccatatggatcaagccagcaactgccaaagcacccgcaacaaaattataaagatgatgaagaaagaagaattcccaagtggattccaagtccctcttcactaccctaaatactccaagtctgattacgaagttatggatgatctccgccttgacttgctcctcaaacaatatggattctcctttgaaggatctcttgaagacaagagggtttttgcaattgaatcatttctctggcctgatcagctttagatggtctatgttggtgttgaatgatcttatatcgctctccacatgcatatcaatgagcctatactcgagtggttgaatgtttttaaaattatgtcaaattaccatgtatatcaatcacttagtaatgttttagaactatgtcaaatactagtgtgtgttatatttctttgtgtgtggggatgttttgaagtatgcaattcttcacatatatatgtatcatatgagtgcattaataacatctttgatgtcatgtataacactaaaaaaatgtgatttatcgacttataaaaatcttaacatattgacattaacataaaacatatagattattgtatgatatagattaaacatgacgtcatgctggatattttggcttattggcttgtacattacttgtgattatgagtgtataatataaaactaattactagatttgcacaaaaaaaaaacagaaggatagaaaactaactagaaaattaagacattacatacattcttctatatgaaaaaaaacatttaaaaaacaaaacaaaacatttttatactaagatactaatgaaaaatcctatcaagaaaatgaagaagatcataaaaacaaaattatcggatttgaagagaataaattttgaccaaaaaaaaagaagataattaaaataaaataaaaacaagaattggccaactgtgagaacatcatcaatgaagaccaattgcgagatccgacaacaccgcttcttttgatttcgatcttactttcctgggtatgtctcaattcttcttcctccttcagttcgtgttctgtgtctgattgattactctcacaaaactcatcttttcattgtctaaaggtctaatctttagctataactcaaaatctgtatctaagttctgacaagtttctgttacgaaattcaaattttttgatacatatgttcatttctcagaacaggagatgtcaattttggcgatggttttcgtaacataaacatgagatttgattgttctgtgcagatctcatagttaatctggtttgagtctagaaatg

SEQ ID NO: 32715 - DNA, 3003 bp, Unknown
  misc_feature (1)..( 3003): 2750-1469P.txt file - cDNA_ID_3060369; gDNA_ID_1620353; Annot_ID_154395
tccacgcactctcaagcattggatccatagcaaccataggtctagtaggcctctcttccactcttgctgcatcaactctctcagccaccacagcgaaatctccctgatatcgaagaacctcaacttcctctatcatcttcattactctcttcccataacggtagcttgagacaagattcttggaacaaaacccacaaagacacaacctttggacttgaacagatctcattctgacgagttcgttaactcgaggtactattgcttcaacttttgaaacccatccttgcacaacagaaagtcgttgtaaacctcgtctttcttcagacaaaatctttctcaacaaatcttctcgtctttgctcaatctgctcaagagctctctgcagagctgtcagattctcctctaagccatgaatgtaatctccattcctgtttaagcaactacaaacattcttcgtcaactgatcacatgatattgatacagagacacaacctcccatcctgcgtttacacaaaagaagaagtaaacttgtggcagagaactagaagaagaaaaaggataagagctgctgagttgtgaaaattgacaataatccaaactctaaagtcgtcgctattgtaaactttaaacaatattctgaaaagagaaatttctacgaaaaaagactaaaagagtatcatttcagaaagataactttttttcaacgcaaataactctttaataaatattgactgaggtttgattgaaagagataaaaacttcatttgccagcaagattggcacaaaactcgagcagaggacatctgtaggagttgtgtcgtggtcgtctttggttaagagaagaagaaatgggttcaatgttcagtggaaaccgaatgagcaaggaagagatggaggtggtggtgaacaaggctaaagagatcgtctctgcttatcccgttgttgtcttcaggtttgttctcgttgaaatctcccatctttttcatctgggtattactcttttcgttcgtgattatgaatttgttgagaaaattggatgttgttgccttgaggggttttgaattagtcaaaaagtttgagtctttaccatcagggggtagagtctgcttctatttgacgcagaggcaccaatggatcattgtctgcttgttttgttgtttccatctgtgaaattaggtcgtgaatgaaagatcgaacatcatcttatattagtgattctccatccaattcagagattatttgtgggttccctagacgattagggatgtgatcatgtaatatatactgatagatccagttctcaaatttgattctgactagtctagaaatctttgaagaagctagagtttttgaagattgatccgtgcaagctcctatgactgatttggggatgcctttcggagttttgaaatgaagcttaatttgttgttgcttagagtcttgagtttgattttgcttagtcttaaaaggaacgtatttctttccactttttgagatggtctaaaggttacttttcaaatgtaatgtcttagctctgatccatattttctctttcgcagcaagacatactgtggttattgccagagggtgaagcagttactgacgcagctaggagcaacttttaaagtacttgagctcgatgaaatgagtatgaaaccaaatccctgtcaatacctgtatattaatatatctcaatgaacctgaattatctcgatgctatgtttacttcaggtgatggaggtgagatccaatcagctttatcagagtggactggacagaccacagttccaaacgtcttcatcaaaggaaaccacatcggtggatgcgatagtaagtgaaaaacctacacaaattctctgcacaataatggaaattcgggttgccggaaaaactaactgcgtttttcgtgttgcttctatattttgcaggagtgatggagaccaacaagcaaggcaagcttgtgcctctacttactgaagctggggctattgcagataactcttctcaactttgatgaaactcgaaactagtgtgtgaagagtgtgtgttgtgtttagatcatgaaaaaagaggtatcgtcacatactcaataaagaaagatcattcccgttgtttaatacagaatatctaagtgtatacttttcatgttggtgtttcggttaatggaataaaacttgagaaatctgctctagtttcttgctctaaattactgaagattactggttgcatcccaagttgactttgtagcaggccggtcaagtaggtggattaaggcttttggttgaaccaaacttatctagtaaccggccgtgtaggtgccttaaaggctgaaaaactaatattagccaaatcgatcaacggaaagttacgattgaaagagaaatgaatattcgaacagcagaagtgcattttcactgatttgtgtaatccaaattcggattcgaacagcacaagtacatttttcactgatttgtgtaatccaaattcggagaaccaatgtccaatggcaatgaataatgtcaatttggttaatctagatttattataaagtatagtgcaaaatcgtagtttaagagaacttgtggggtcaattagtaaatattatctagagccggttaaagaagagaaactgaggaaactgaatttgaccagagagtgtgttcaagcgaagcgttgtagaagaaaagacaaagttttggaataagcggagcaaaacctagacaggcccgtgtaagatggagatttgttttaaagatttatcaaatcaataactactaacctaagcaagtaacgaagccgtggctctcacaaattagcccaaatcctcaaatttcaccaaaagtcttcgaatttattctccagtatcagtttctctgggaaaaagttctacttttgcggactctgaggaaatcttttgtatctgtacaccattcatgggttaatccgattaaacccgtgttgctccgttagggtttaagagaattgccgccttcaccggccatg

SEQ ID NO: 32716 - DNA, 3000 bp, Unknown
  misc_feature (1)..( 3000): 2750-1469P.txt file - cDNA_ID_3060371; gDNA_ID_1620353; Annot_ID_154391
agggtgtcattgatgtttaacaacattgaaagtatacgtgatgctcctgaatctccccaacttataactttgctcctccgaaagaacttcttggggcatatctcaagcagcttctttcggttgatgccaatgctagttgttcttgatctatcaatgaacagggatctcagacatttgccaaatgaaatatcagaatgtgtctcattgcagtatctgagcttatcacgtacaaggataaggatttggcctgctggtttagtagagttgaggaaacttttatacctgaatttggagtacacaaggatggtagagagtatctgtggcatatcaggtttaacaagtttgaaagtgttgagattatttgtttccggtttccctgaagatccctgtgttttgaacgagttgcagcttttggaaaacttgcaaactttaaccataactcttggtcttgcttctattttggaacaattccttagcaaccagaggttggcaagctgtacacgagctctgcgcatcgagaatcttaatccgcaatcatctgtaatctcatttgttgctactatggacagtcttcaagagcttcattttgcagactctgacatttgggagatcaaggtaaagaggaatgagacggttttgcctctgcacatcccaaccactaccacattcttcccaaacctctcgcaagtgtctttagaattctgcacaagattgcgggatttgacgtggctgatctttgctccaaatcttacggttctacgagtaatttcagcgagtgacctgaaagaagtaataaacaaagagaaagctgagcagcaaaaccttattcccttccaagaactaaaagagttgcggctagaaaatgttcagatgctaaaacacatccaccggggtcccctgccatttccctgtttacagaaaattttggttaatggatgctcagagctgagaaaacttccactcaatttcacgagtgtcccaagaggtgatcttgtcatagaggcacataaaaaatggatagaaatccttgaatgggaagatgaagccaccaaagcccgtttcttgcctacactcaaggttctttctctcgcatttatctgccaaaacttctttttaattattcattcctttggatcttactctcttttttggatgttttaggcttttccggagaacatcgacgctgacggctatgagatttccttctgagacgatgacttcttgttgctgatattgagtgacttaaatattcagacataagtgttattgctccaactcaacatatgttattaaattcactttcattaagtatggggttcaagttgtttcaaccatatcagatggttcttgaaacaacttcaaccaaataaatattccgggaaataaggaaaacgaagtacaacaacatgacccttcgaaatcagagctcaaagaaatttcctaattcaagtcggagcacagatgaatctaccttaacagctgtgttcttaagtttaggaacatcgtgtggaaaaatcagttatcggcatccatacccgaagaagccgatcataaaacgaacaagttgccacaacgctttgcttctgatctttccctctgtaccaatctgctccataagcaagagaatgatgcttgttataactctccaacacttcacctttcccatcactaaccttcgctaaagcaaaaccgttatgcatacaagccgccaatacaacaccgctcagagaaggatggtgcttgattctccacactccaccacctaaagacactgatgtttcgttcagaggtctcgaaacagacctcgtgtcccaaactcttaaggtttcatcataacttccggtgaatatagagtaaggatcacttgggtttgatgaaatacagcaaacacccattgtatgaactttggaattctgaaaaacccgattgtcagccggactatctctgatatcccaacagctgaacttgcaatcatctgatccagtatagaccaaattaggattgttgagatcgaatgacgccgtccaaagctcaaagtcatgccctttccattcttgaactgtttctagattagaatccgtgaatgaaacaactgaagcagagccatctgataaaccaacaacgattgatgttgatgatggatcccaatccaaacaaagacacattgatgagctgattcttttcccggagacttctctcagagtacctgtttcaagcataaaactttactcagatcaccaacaagctaacaaaacaaagcttagctgcatattaagaacaacccagcaattgatcctttacagatctccctttggattacaccaaagttccaatttttatttcacttaattactgagtccattgattcagaagtttccattacaagataaaaaaagttagtacctttactttcagtctcatctatcttgtaaactatcaagcatccatcagcatcagcctgagcaagcgccacgtctcctccatcgccaccacgactccaccggatatcgaaaactccagcagtgtcaattttctggataagattcaagccaacatcttcaacatctccgacatcaaatagatacactgacccggatcgagagggacaatctccttcttgaagtgtataagtcgaagctgcgagcaagtttgcgtaagactcgtgaggacagaattctacggcgtcggcgtttccttcgagatagcaatctgctgcgtccatggcgactctctctgctcttgtcaccaattttttccccggcggctaaaataaagcgttttaaaggaatacgaagacgttccgcataagaaaacataaattggtctatgcgaccggttatgacaaatttaaccggtctaggaaaatttgatcggttaagatagatcgccgatgattaattaaaccgttctggtcgtcttctacctttagttggactgaaggagaaagagactacggcggagaaggagattacggcgatagtgtttgatcagtcatctatg

SEQ ID NO: 32717 - DNA, 3003 bp, Unknown
  misc_feature (1)..( 3003): 2750-1469P.txt file - cDNA_ID_3060411; gDNA_ID_1620354; Annot_ID_154421
ttttcttttatggatgatcttcgaacatctactgcgaaccgtcactattatgaaataaggtcttcagaaaatttcagtaaattgtgtgtattgattacttaacagtgctttcttacagttttcacttatatttctcaggttacttcaaattccaggtgctgtgattgttgcggttctcggaattcttgttgatttcccagtgatttcactcttagcattgtgtaaaagcccgtacatgttgttcaaagggtggcaccgtttgtttcatgatctcattggacgtgaaggtcctttcttggaaacaatgtgtgtcccaatcgctggccttgtgatcttactctggcctttagctgttgttggagcagttttaggatccgtggtctctagtgtcttccttggtgcttatggcggtgtagtctcatatcaggttattaaacaatgacttttttttttgaggaaaatgtgaatgctgatgatactgaattggtttctcttgtcataacacaggagtcatcgttcttcttcggtctctgctatgttgttgcttctgtttctatttacgatgagtatagcaacgatgttcttgatatgcctgaaggttcttgctttcccaggtttgtctccattggcttatctagcaatctttacctctctctctttcttttcattctaaaacagtggttttatggttttgtaacaggccaatatatcgaagaaacgaagagggcgctagtacggcattttctggtggtctttcaagaccgaactccttcaagacaactccatcaagaggaggatcaaacaaaggcccaatgattgacctgaaaccgcttgatgtactcactagtcacactcttcttttggttatctttgtatttaaacctgaagcctattcttttgatctttgcagcttttggaggctctatttgtggaatgtaggcggcacggagagattatggtaacgaaagggattataaattcaaaagacattgaagaagctaaatctagcaaaggcagtcaagtgatcagctttggcttacctgcttattctcttcttcacgagcttttacgctctatcaaatctaactccaccggtttattactcggtatgtttcaacagttttctgtcaattttcataaccgcattatctagtaactatttgaacatcatcaagaaacaaacaaaaccgtttctgtgtttttgtttaggtgacggtgtaacggagataactaccagaaaccgcccaaaagatgcgttttttgattggtttctgaatccgtttttgatccttaaagaccagatcgaagctgcaaacctatccgaggaagaagaagagtatcttggtaaattggtattactctttggagattcagagagacttaaaagctccattgttgaatctgaatctcctcctctaactgaactcagaaaagccgaacttgatgcctttgctcgcaggtaaaaaaggcaaaaaaaaaaacacacacaatcttgttacggctttctacttcggattctaagatgtgtttttggttttggttaggcttcaaggattaaccaaatcagtatcaagatatccaacattcagaagacattttgtggaactagtcaagaaactatcaaatgatctagacaataaacataaccgttttgaaggcggttcgagatcagttccacgtcccgggaaaacggtgtctcggattttcagccaaaaatcgttcaagaaaaagacaagtagcaatgggtcagatcaagattcaccaaacagagggttaagagacattgatattgtgtaagtaaatgttatgcgaccagaattagaccgaaacttcgtctgcttttagctctgtaatgataaatttatacagattccaagtgaatatgaaactgtttcatttatctaacaaatgttttacattcagcttttgcttgatgatgtgttgtttctcagaaacagcagaaccgtttcttctgcaatagaaatagcaagcttttagtttttctttcactttagacctcatttgatctaaaacataacaaacataggctgatgttttcgttagtcataaaatcttgagcaattgggattagaaatgttaccgtaggttcatcttgagatttgttattgtcacggcgttgtgaggcggcacgaccacttgcgtttgtctttttgtcgtctcgagctttagcgaatataaccgtaaatccttcggctgatgctggatcgttcacgtcccattctccaaattttggtaatggtcgatcttgttgttgtcgttgttgattattctgaaagtttccaatcacaaaaatgtttgatttctattataatccaacgaaaacacacatgaaaatgctattttttgtatcaaatttgtgaaacaaatgagaaagaaatgagaaagatcttaccgatgccattcaaagattgtgtaaaagatgcaaacagaacatgagatgatctttcttcaaacaacaagaaaacttgtttgtcttctcttttagtttttgttttcttaaaagaatttgattacgtttaaagaattagaatttgagaacagattagcgttttctgaaagtttaaatataggttaacgttttaattattgttgaaacttgaaaacagaaaacaccaatcttttgtagcgaaacggaacgctttttctcgtaccgtcttttgttttcgagtgaacttcatcgtatcaaaactcgccacgtgatctacacacttctcgaggcgaacacgcgcatttcagaacttatccattaatctctgtgattaacctataagccggtatttataaacggtcacgattttccaagttttttaatcaacggtcgttattacgtagacgaagctaagcctcacatctacaaatacgtatacatacatttttacataataattaattaataattacaggttattaacaaattaatcatttttaatagactattaaaaaaacaatttcatttcatttgctctcttctccgagaaaatg

SEQ ID NO: 32718 - DNA, 3003 bp, Unknown
  misc_feature (1)..( 3003): 2750-1469P.txt file - cDNA_ID_3060419; gDNA_ID_1620354; Annot_ID_154428
tctttgattgtttttggtgtgagcgaagatgggaagatcgaattctcaatgcccatctcattggattctcctctgcttcttcatctcttctcagttttggggattctcacttcccacttcgataattcaacaaaatctcgaggtgaaatttttagggtttttcagcaatttcaactgtaaatttcgtgtagaagaatgtctgtatcactttagggtttgtaatcgatttggcttacttgggatttacttagaattctagattttgttcaaattttgaagctttgtggttgttgttctacagggttttaaagatcctgaagacggttttcatgagattcattgttcaagagaacgtagcagagttgcttggaaaatcattcaagaggtatgaattgaaagcagtggtttttattattttttatgcaaatctgtagagttttctcattgatctttgttgttgctgtgaagtatctcatgccgtatgtggaaaaggagcggtatcagttaccgagtacttgtagagttcatcgagacaatgacatttatagagaacaagaagagcacaaattgcgttcagatattaatgagtggcgttgtggattctgcaaaaaggctttttatgaagagaagtatctcgataagcatttcgattcgcgccattacaatttacttaatgcggtatatactgatgcattattgttaaaatgatccatctttctgtgacaattcatactgttttggggtctattagcgattcataacttatgtgcttttgaatccagagtcatggtaaatgtctgtcggatctttgtggagcgttgcattgtgatcttgttgtagacacagctcggcttaagtccaagtgtaatcctgcagctgctgcaaaaaaccggcacttatgtgaggtacatatttttttagttttgattcggtcaatatcatatgacaagtttggactctaatactcaaagaaaccttgtagcttctgagaattgcaaagaacatttcactgaaagatttgaacacttctgaacatattgtcttcgttctgtttcttgtgttcccgtgcttatctgctctggtgtggttgcattgcagagtttggctaatagttgttttccggtaaataaaggttcatcagccaaccgtcttcacggtattagaaccttcctgaattttactatcttatttcaacagtttttgcttgtattgatccataaagattcaccactacttttggggtttaaactttacaattgtagacttcttcgtggggggttttaatgatccatagagattcaccacccttttttgggggttttaacttttaaaactgcagatttcttcttgcgtcagttctgcgatgcacatacatgttcaggaggatcaaagcccttatctcaaaaaccaaaggtaacataataaaccctttttttgtaaatgatattatatcatatcatatctcatttaatctcagtcatatgttttgcagaagaggagtatagtgtacattattttctccatcatcgttttggtagtgcttcttctctattacagctttgtctatttgttccgaaggtaacaacaacattaaaatactgtttcagatttccttacaactctaaaaccgaaaaaggccctcatgaactcattgttcttacgttttactaatctgtagaggattaaagagaagatctcaagatttgaagcgtattagacacaatggtctgaagaagaaacccttctaaccatatcaagctttagctttaatggcggctgagagagagtacattttttttctttgcaagatgattacaattaggatcagattagtgcattttgcaacatcccttacaattatatcactacttacaccaatattgttacttagaattcaatagtgtttactgcaactagagcggtacaatcgcatttaacatttctaaaacatttcaaaggttcaacttaatttcatttttcatatttgttagtatcattcttaattatttggtttagacttttgagtcttgatcaaccatgattatctcgatcattttatcaattgggccgtttgatgaaaggccttttgggccaaattacaaaacagatatctttggaagaaccaaaacgacaacgtgggatagacgttagagatgacgtgaagaaaaaaaaggagataagtggaacctactttttcccagtataagtccaatatcactcaaagtcaggacactaatcgaatcatagcctcgtctctttcaatctcaacttcaacgataaacaaaaaaacaaagtggataaattcaaagcacttaaaataggtaaataaataatgacgtgaaatataacaagcaaggtatcctaacttttcttttgctttttttcttcttttgggcaaatctcatacatgttcctgcatattttaaacactcttcgaatgttttatcgaaaaattaaaaacattcttaattaggatgaaaattactacgacagatcacactatacggtactataacgtggataattactacatagtattgtattattgagcttgtataagtatttgtgacaataataccaaagagttttagatattttattggtttttctaaggaaatacagatagataaacctgtcgaaccggttgatttagcacaataagcggtcatgaaacgtcttctacatcaaagttcgtaaatttccatgaaacgtctttgagcaccgaggaagaaagtttaaaattcctaaagaaacacacaaattaaaaaaggcaaaacctaaaccccatatttatttgtctttttttctttatcagagaattttaaaaaggtaaaaatagattatattctattccttcagaaaatttttatcgtcctaaaatcttcgtagcctgcaacaaagaaagactaagaaagaactaaaatattttgcttcgtctaattacttttttcctttggatttaattctcagccatcgccgccgttttcggcggtgtaaaaaatg

SEQ ID NO: 32719 - DNA, 3003 bp, Unknown
  misc_feature (1)..( 3003): 2750-1469P.txt file - cDNA_ID_3060423; gDNA_ID_1620354; Annot_ID_154423
gaggagagacctctaaaggaaggtgctgaggactctttgtgcttcttcaaatgtttcttgaataaattgcaactatatgattgtatctgtgttattaggttaaagttttgatctctcaaggtattgattgtaacaagaggtttattcacatatgcaggtggataagtgatagccgagatgagtacactaaggaaagacttgaagccattgacgatgagttcaaactgtatcgatgccacacaattctgaactgtgctcgtgcctgtccaaagggattgaacccagggaaacagatcacacacatcaagcagcttcagaaatctggttgaacaacaaatgaatcaggcagtacctaatggatttttgattctaataatctgcaagaaactccaattttggattcattcttgtattgctgtcacaactatcagaattagattattttgtggtatatcttgatgaattttttttgcctacaacaagcaataaaactctgctttttttatcatccactcattcagctttgccttaatacaaacatttggatttcgagttttgctttattggtgaataagagagaaaaatgtttacacatacctcttgcaacttggaaagtaaataactaatctacaaacagataagcttgttttttaatgtgttgaggaaaatgagagactaatgatcagttttcacgggatagagcaagaaacactgtagctgatgagatctgaactttgagatcagcaacatcaatgtcatgcccgccttcgactagtccccatttgtccacctgcatgaaacatgcgacaaagattagtttttatagaatgtcaaagcaatagattttggccaagtgagtgacaaaatgaaacctgtaaatcttcttcaagtctaatcaatttgattgcatcatcgatctggagtttcccacagaagataccgagggcgattactatagagtgagctgatgcttggagtgcatcaatgcttgcgagttcaccatcattcgttttcttgagcagttcttctactgctttcactagcttgtcgtcttgtttacccccgaagatgctagaatacactttcggtttgacccgaaactctgactctatccactcaagtagaggatcaatactctctacctgaatatctgcaaaagacacaactcaataagtgtaaaatctaggaggtagttgaaattgaagagaaagtgtattttaccatggacgtcactagttagatcattatcttcaggtgctcggaaaaagacgagatcttgatgtatctttctcgataaatgttctatgatctttgaacgcgtaagaggaactctttcaagtgcagtacatgctagtctcataagcggcattgtgaatggtctgatcccttctgttagctaacacaagatcatcgtattgattgataccgagtcagctaccacacaaacataagtagatgcaaaaggatcacaagagaaaatgagctagagaactgcaagcctagttctttaaatctcacttcaactaatcgaattatcaacctattgatcacattagaactcagattgcaaagtccagaaaccgatcaaacattagggacactaaagaacggtaagctctcagctttaagttgaataagcaatgagcagacccaattacaaggattctagctaacttaaatcaaacccagtactgatcagctacaaaacaatagctaaatagcttaaagcaataaactttagaagtaaaacagatcaaattagtgaaatggaacaaacctgatactcccactcagcagcaatggccttagcaagtgccaaagaacgaagcttgagaggtcttttcgaaggggttttaagggttctataatcaagcatcacagtccatccatttccatcatcagcttctctagtcgtcactttcttgtaaaacctcttccctacgatcgaaccagtcatgaaagacgtcggcatcgtcactgaatccgattcgtttttccggcgagagttcggagctttcactaagatgggtttctcattttccttctcgaatgtgaacgacgacgaagattccgatggctgagtatcggaatcgggttgacgagcggcagatgtcgtacataaggatctagcacgaatagcaagattagagtttctcgctgacttaaaagctcttccgattaacatcgccgccattaatcctccctctccggtgacgaaaatggggacctccttgcttagggttttagatcacatagatcgtcagatccaagcctaaacgacgtcgcaataacccggagtgatagttaacctctactacaatgaaggtgttttgataattgtgattataattacaattttattctatctcattgtaatcagctctgtaatataatatttgtaaagaattttttgacaaatatcatttgggttatatagacaatcttttttaaaaaaattggctaaatttagtttgtaaacttttctataattttcaagagttacacttacaccaattcattatgtgatatgtattgtttcatccgtaaattaaataaactaaagtattcttacccaaataagtaaattttattactctaaatccaaaagttttgttaattaagtgatccgagtcccgagaaaaaaatgatccgagtcaaaaatgctgaaacttaactcaaaacggcatcgttttagccgccggtttcaaaactttaaagaaagaacgtaaccataaagagcgccagattcagagataaggctcattaaaatcacctgcttcacccatcacgctaagatcgtggaatcttatatcactagactctcccagatcatgacacgtcatcatcttcatcatgagacccataattttttgaaactgttttatttcactccccaataatattttctgcttttagctctttttaaggctcttcaaaaatctccgtcaacgtcgagaacaaaatttggagaaatcgaacagacgatcgagatcgaggaaaatg

SEQ ID NO: 32720 - DNA, 3000 bp, Unknown
  misc_feature (1)..( 3000): 2750-1469P.txt file - cDNA_ID_3060436; gDNA_ID_1620354; Annot_ID_154416
cacctagtttggtagttcaactcacattgtaaacgattttttttagtttttatgaacaaatactaaactatttgtggtccaaatggtgatcttaaaatggatgacgagtgtgtactactaagcaaatcaaaaactatatatatgagtttaaaataaataaaaataatgagttgtaataagcaaatcaaaacaaataatgtgtttagagtaaaataaacagaataaactatgtgaaacgagcatagcaaaatatgatcataataatttttattttatttttttcaaagtaatcataataattgctgtatgatctaataatgatcaaattctaaagtatttttttttatagcatttcataatatcaaaatgatatgattcagattactctatttaattaagttcacaatatagttgacagtattgaaaaagatttctgcaagtgtaaatcgattttgattttaggccactgaaaggacagatttccatttatctaacaaatggtaagtttttgattttgaactaaccaactcgatatgaaaaaaaaaacagttctaccgtgctgcaagccgtatcatacatatgtagttattccaaaacgtttattggatcttagattgatgccacaaaaaaaatccattaaatttacgttgcatgtgtacaattaattaatggattatgagccaaaacaacatcgttttattaaccctcaaaataaaaacaatccagcagcaacgacaaagacgacgaaagaggaagaataagaagaagaagctgagtccttaggctgatttgctttcttatctgatttaccttcaggttgtgcaaactcatcagcttctttatcttcttcttcgacaagtggcaagtcatcttgcacgactttgactccatcaggtgctagattcatagggacttcgtaatcagagtaatctgcaggaacgaccgttgcgttaaccgtggagatgaagggggtctccggaaaaaaaaagtttgtgctatttgacggtggagaaggtgcagatgaattggcggcataagctccaccggctagagcaagacctatgaaaagaattacgaaagagaaatgttgtcgagacatataaatttttatgtatagattgatcctttttcgattcaatatcggcttttaacgcgaaatggtataaatgtagagaaatcaatgaagaaaattgaagagtatgaataaaaaggaaaaagggagataaataggggatttaaagctattaattatgagatggatatgtttggtaatttaaaacaggtgttaatttagactctaaactttagagtttatgtgtgttttccgttgtgaattagccaaaattgaatcatacaggctgtgtttttccacagtttttagaatatggtttcatattttttttagcgtttgtggttgcttttcgttaaagtgataactttgaactgtgcatgggttgttattaattagagcaatacgtcaaacggatttgataacactatatatatataaaaaaatctaaagattgaaactgatggatcataacacaaatataataatctaattaattataagataaaagtttcaattgataacagtacataatcggttttgtttctagttttgtggtttctgtatatatccatggagagattatgaacttgtaaggtatgtaatgaatatattttcatgtcttgaatttaccaaaccatacattatattatatagtttagaagacgaaaactatgtcgtgaattcgtgatacgtggacttcgagccatttaaaaaaatatgtcgtgtactcactcgcttttcggatcaaaccaacgcaaatcgtacgccactaactaacgataaaagctcacatagattgctatatgacgcacaaaacaaatagtgataagtcaaatctatatatacattttcgatgaagtacgtaaacataattacactatctaattaaccaaacacatactctaattttttttcctacggagcttgttgcgcctaatctaatccaaaagtggttcatgtgaaaagttacaagtagacgaacaagctaccgcatgactcggttactcagtatccgaactcggtcaaaaatagacattttatttacacttttcacggttaagatacattctaaagcatacttggtctaaaactttctaaacatatcaaactcctcaaaacttttgtatatcattttttttcccttccaacttttgtatatcatatgtaggtgttttctaacctatacattttccaagctcactatgaattgaatgttagaaagacttggaaaggcactagtgactagactagtattcagtggcggagtgagaacaaattttctttttattgtgatcaatattacaataaacaaaaatgacaatatcttagtgattttgatatgttgagtgatttagactgtttttctctcataaccgtcgtattcctacttatacccaaatttaagtttttttttttgttttgtcatccgcttttaattaaatccaaatttaagtttggtaaaacaaacttatagaaaaaatgttaagtgttctcgaaatttgaatcccatgtatgcaaacaattcatgtaattatcatttggaactaagaattttacgttacaataacatatggaaaattcaatagaaaaacaaatattatgtaattatgcatctcgtttttttttgtttttttttttacccatcatacatctcgatttatgaagtttacgttacactaatttatagaaacctcaatataaaaataaatacgctaacacaattatcaatctagaaatataattgtttttggtcggaatttaggaacataattaattcatatttgtttttaacaaaaataaaataaaaactaatgattttttaaagataataataacagaagtaaaaaaaaaaagaaaaaaaaaggagaggattaggaagagaggaggaaacatagagcaaatcgccaagatccaaccatcgaaacatg

SEQ ID NO: 32721 - DNA, 3003 bp, Unknown
  misc_feature (1)..( 3003): 2750-1469P.txt file - cDNA_ID_3060450; gDNA_ID_1620354; Annot_ID_154402
aacattcaactttgggtttgctctacaggttgaaattaagcggacgataccaagaggatccatgagctctaacgatttcaaaaccaagaagatatttgttggtggaattccttcatctgtggatgatggtaaacactcttccataatatgattttcttctttcagaatcatgtttttatttactaagtttctcatctggtgattggtgtttgtatagatgaattcaaggagttctttatgcaatttggagagctgaaggaacatcagattatgcgtgatcactcaactggaagatcacgtggctttgggtttgttacatatgaaagtgaagatatggttgatcatctcttggcgaaagggaacagaattgagctttcagggactcaggtaactagccgctcttacaaatattgttgagattcttagactttgtagctataatcagaacactgacatctgccctgtatttgtataggtagagataaagaaggcagagcctaaaaaaccaaactcggttacaaccccatcgaagcggttcggtgactctcgctctaactttggtggaggttatggagatggttatggtggcggacacggtggaggatatggtggtccaggtggtccttacaagtcaggtggcggttatggaggtggccggtctggtggttatggagggtacggaggagaattcggtgggtatggcggtggtggatatggtggtggtgtgggaccttatagaggagaaccagctcttggatattctggtcgttatggaggaggaggcggtggttacaatagaggtggatacagtatgggagggggcggtgggtacggtggtggaccaggtgatatgtatggtgggtcatacggtgaaccaggaggtggttatggtggacctagtggcagttatggaggcgggtatggtagtagcggaataggtgggtatggtggtggaatgggtggtgctggtggcggaggctatagaggaggtggtggctatgatatgggtggagttggagggggaggcgcaggaggatatggtgctggtggtggcggaaacggtggaggatcattttatggaggaggaggaggtagaggtggatatggaggcgggggcagcggacggtaccatccttatggaaggtagagagttcgatgaaagcttgaatcttcttcttacttgttgtgtcatgcttagcatcatgtatggttatcaagattgatagctagtcattgtattttgagagatgaggcttttagggctttgattcccctgagtagtttaaatcaatacattttttagattataattatctcggcgtaacaatgccagattattttttactctcatgtgacatctttagagttagcttgtagcaacgcttttgaggttttggctcaaatcttattagaagaagactcttgtttgtaccattgcatatttttcatcataagcctctgtatgtgtccgaaggtttgattgtcttgttcttctccctgaagtgagagccacaaatagacttaaaaaatatcttgtggtcaatcatctgtttctctattctctgtttcgtgttccacttcacgattgagagaacactttcctaagtttatcaagaacatttcttttcaatttctcgattctttctggctcattctctcatctctgtttcatatctaaattattgattgagaattcgacttgtggaaatggcaacagttgcatcaaatctcgcttgtatcggaaaagtaacgatgtctagagctagttcaatggcaagtccttttttttatcatgctcgccaaagaaatggtataaagagtggatttggaatggattttgcaggtaggatggaggttgcagataaattgcagaaagaaagagaaaggaagagatcagagtcattatccttacaaagtcattgaaatcactcctcctcctaaatctctcggcattcgttgccttcctcatgtgagtctcaaatctttctcaatgctcaactacacttcataagcatttcattacagattccaagtgagaatgagaagcttttttgatttgcagaaccttcaatgtggagagaacgtgatgatcgaagggcaaacgtacacaatctctgctgtgactcaccggtatcagctccggaaaggcaaatacgagccgagtgagaggcggctcgatgttctctctgctgctagatacgttttaaacctttacttcgacaatttgctccaaaactcctgacaacttttatttagctaaaaagtttggtctagaggattttcattgtatccatgaatgcttgtgaatttgttaagcaatgatttgtacttctcttaatcattccacattatatcactgatataccacaaattcgtggtcttacattttgaaaatgttaatacattacttttgacaattcctttaacattcacgaaggattcatgttttagcacaaaaacttgaaaactaaatgatataaagtagcttaatgatttaaccattcaacaacaccccaaagttctttttaaaggaaacaacgacttcgctaaactaccaggttaaggaaatgtatatagctaagaactcaagccaaatgcgtaaattcttcatcttacgcctcatggtttagcttctataataaacaaacattttgagtcatcctcaggcaattagcttgcaaagaaaatgatataatacgtctaattgctcccataattttacaatttagttgaccaacgtagcttgatttaactaaaacaactgtctgtcaccaaacaaaccaagacggacgagtagatttgtatgtaatctctatacgaatccgtttgtgaacttcatttgcgtcaccgccttgtcacattcgtgtggacgcctcacgacgtgtttgcataatgttattgaaacagaaatattgcactcttcctccattttttgattacttccatttcctcaaaagtcaaagctctctttcttctctctcgagatttgctaacttgtcaatg

SEQ ID NO: 32722 - DNA, 3003 bp, Unknown
  misc_feature (1)..( 3003): 2750-1469P.txt file - cDNA_ID_3060454; gDNA_ID_1620355; Annot_ID_154469
tattattcttacttcatttttggttgtcattttccttattttaatttccacaaaaagctcatcattgcttaagaaaaatatgatttataaagttgctttttatttagttgacaaaaaaaaaatttgtttgtttattattctgcaactattgatctttacgtattgaattgaaaatttgaatgtttaaattatataactacaaatgtgtttttgatcatttttatattataaattataaacagctgctacattctataatttgttagttgtagtatttacttaaaacaatacaactatactaggagaaaaatgaacacagaacataaagtaggaaattggatgaaagtattatctaaattgtggtccaatagtttgtggatactttaactttagatgtatgaagactatagacttttcctagagatttatatataggtggtgtatatatacactgatttacacatattaagttatgtgtatatctaaaaaagatagtgactaatttctgaagtagagatttactatgaatttcttcagaggttgaacctaagctaaatgatatagcatgaacaagaatttaaatgttaataaatagattcgtagtatcaaaggcttaaagatttaactattatttttgcttggaatctacttttcgtgaaagattccagccaagcaaacacttggggctctgtacggacactctaaaacataataatcatttaagcaattacgatcattattctatctcttctttcttgtttgtttgttaaatgttaaaccatttatcgaataatggagatacatatataaataaaacctcttccacaccactttttttttttccatagaaacgaaaaatagttgatgatgacaaaatgaaataataacatgaaaacttatacttatagttattgtatagaaataaaatgatgagtatatataatgagtagagaaactattaaatcagtatagacccctcacctacgctttactctttcactcctctctctcctgctttgctccgccgtgagaggagaaacaaatggggaattgtcaagcggcggaggcggcaacgacggtgatacaacaaccagacggtaaatcggttagattttactgtacagtaaacgcgagcgaagtgattaagtcccatcccggtcaccacgtggctctcctcctctcttccgccgtacctcacggtggctctctccgcgtcactcgtataaagcttcttcgtccttctgataacctcttgctcggtcatgtttatagactcatctcctccgaaggtatataatatattaatcacaattcacacagaacatgtttcagttttaaattcaggaaagaacagaaccctaacttatagggttttcttcaatttgtttcttctgcttcacgtttgattacaatcatcatatacgaagtgtataaaatttacaaatcagaactaaaagctttaattttcaggattcttatcaatttatttgttctgcttcactttttgatgttaagtcagtctttcttttttgtgttctattaatagaggtgatgaaaggaataagagccaagaaatctggaaagatgaagaagattcatggagagttttctgttgcagaagaagagattaacccactaaccctaagatctgaatctgcttctgacaaagacactcaggtattattatcacatactacaattgctctgtatcagatgtttcagttttagttctctgattgaaacgatagagtgttacaaaagaataatagagttggttttgatttacagagaaggatacatgaaaagcagagaggaatgatgaacacaggaggagctaccaataaagttagagcttggcagccttctcttcaaagcatctcagaatctacaagctaaaacacttcaatccatatttttctatctttttttcttacttttgactcttttttttatcatttcatttctctttgtattgttgtttttcccaatcaaatttgtaaaggaagaagacccatttgattgtggttgaagaagaagaaacttttgtcattttttaactttaataataataactgaagaaagaaagatccaaaggattattttcattttctagatttctagattttcttttacgttttcaataaatagttatgtcatagatcaagttttacaactttttttacgtacttaaaagattgataaaattgtacttgttgttgttgaccattgaaacatttccctttattcactaaaactagcttttgcaacctttttattcaactgtattggtttgttgtatgtttttattattcaactctatttaattattcatgtagcttaacatatcaataataactaacatgccataaattccgaagaagaaaaattgttataaaagaactatatgcacctaacaaaaaaccaacaaaaccatagtattttctttttgggttacataaaaatatctttgtatgaagaagaagaaagaatcattacacagctttcactcacaagattacaagtttgcaaattgcatataaggaaactcccaaaaaatatcatcaaagatcttttcagaacacaaaaaaaaaaaggtaaaagtatatctcttttgccatagttagactcaaaaatacgacatcgtttacctcacacgtgcacactcaccgacttacagaagaacccacacgtacgttgagggtactttagtcatttagcatcgaacgaaattgtctgagcggagaagaggagtttccgttatccctttatatattatctctctcacctttcttctctttttctttgatttttattaaatcaacaaaaatagaaaaaaaaacataaaaataaaaataaaaaatcttcacgtttcttctctctctctctctctctctctcgagccaccaaatctgaattagggtttttgagaatattcatcttttgatttcaaattcttcacccactgtgtaatttcactcgtcaggattcatctgcggaatcatg

SEQ ID NO: 32723 - DNA, 3003 bp, Unknown
  misc_feature (1)..( 3003): 2750-1469P.txt file - cDNA_ID_3060490; gDNA_ID_1620355; Annot_ID_154458
gagaaccgcactactactcttgattatcagagaagacgaatcagataaacagtgtgagagagagagatgatgataagaaaggaatctggatttgaatggtacccaacagatttttgtcattttttaaagatttcgctgagcatttagtaacaaggacctttttattaaggtaacgacaacttgtaagtggtaaataatccagtcttactatgttcccattttctatttgatttctttagagtattaaacagcagaatctgtatcatcaattatatagtttgtcaaatataattattattagaaatatgcattacaagggattaatggttaaggatttctctcttacaaaataaaaaagaaaaagtttatggtattcgttcgtattatgaatttttgatatgaatatcttaaattgaatatgttttgactaacatgttgtatgctgtctttttcaaaaataaaacatgttacatgttttttttttcttcttctcttttttttttttttttataaagtacatgttatatgctgtaacaattataatccaaatgtcaaacttagtttagatctttgacaagtatataatatacttttctttttaaaaattatgtattgaatatttttcactatcattcttttttttttgtcaacatttttcactatcattcttatttctttgatatgttcctcaatgttcaatttgtaaatttaaatttcaaaagccatgtaactttaaccaacttgaattttttacgtatataattctctatatctctaattagagtcatgttaggttcgattgtttaaataaaattagtcttcttgtagactattagatcatccgttcaaaaagattattgttgtttgaatggtgctctcttttctttcttcggaaaggaataaaatttatcccataaaaagaaaagaaaaagaaaaaagataatttactttatttaagtgtgattaagctgttatgattgactatcacattacatagtgttttcgtggggatacagagatcaatagataaatgataatggtaagataatggtatgttggtattggtagatgagtcagtaaatcatttactactgctaatggatcatctgaggacaagtgttgtacgttaagtgacacatggcaaaacagtgaaagagacgttaaacaagtgttacttgctgcatccactcaaattccatcccaagtcatgcatgcaactttttctttaaacatcggaaatcggagcctgaattaatgcgttaactaatggaaacaaaaaccataattacggtgtagccatctctccaattccgattccatttcaagttaaccttatcgatatggaggatagcaactctcacccgcaaaatcaaacatcaaaaagaaaaagctctcacccgcaaaagaagcaacgtatggagaatgaaacacgatcggctaagttgttggatcttgatgttcttgactgtccggtttgcttcgagccgctcactattcctacctttcaggttatgttttgaacttgcatgcattttattttgtttcatgtgacattttgatttcgcttttgttaatttattttattgaatacggctttgattgtatctcgtttggtatattatgcgtttcagtgtgatgatggacatatagtttgcaatttttgctttgccaaagtgagtaacaagtgccctggtcctgggtgtgatttacccattggtaataagcgatgcttcgcaatggagagggttctcgaatcagcctttgttccatgtcaaaatactgagtttggctgcacaaaaagtgtctcttatgaaaaagtgtcaagtcacgaaaaggaatgcaactactctcaatgctcttgccctaacctcgaatgcaattacactggctcatataacatcatctacggtcactttatgcgtcgccatctttacaatagtacgatcgtttcctccaaatggggatattccactgttgatgttctaataaacatcaaagaaaaggtttcagttctctgggaatctcgtcagaaacttttgtttgtagttcagtgtttcaaggagcgacatggtgtttatgttactgttagacgcatcgcaccacctgcttcagaattcaagaagttctcgtatcgtctttcgtatagtatcgacggacataatgttacttacgaatcaccagaagtaaagaggcttcttgaagtgaattctcaaatccctgatgacagtttcatgtttgtccctaactgtttactgcatggtgaaatgttggagttgaagcttggcatcaagaagttgaaacaaacgtaactagatctagtttggtttggggttacgaggcgttctgttttgttgtgtttgttttaattctctgtttaagaacctttgtacttttgtagtagcccactcttgaatttattgatgttgttgttttgagttagttgtataatccaaaagctttctggtttggttcccggttcggttttgtacatagtaggatttttaataaagcctgctaatgaggttcagcaagttaccattgctcaggaaactgttatggaggatcctccaacgtctctgtttaagaattcagtaccaattcgagaggatcaaattcagaacgctatcacaaattccattcgctaatcttagaattgggcataaattctggaataatgggctcatttggtattagcgtccatacacattgtaggcccaataaaataatagaccaagaaaaaactaaaaaccggacaacgccgttatctcttcttcgtgtgaccaccacacatacatacataccactcaccgtaccaaaaagattagaccaacaaaaaaaaaaaaaaaaggaccagctcagatgagtctggagtttccaagtttaaaacctctctacctcgatttgagcaaatcctgatttactctcatcctcatcatctctcatcatcgagattcatagtctcttttgccgcttggattcttccaaggttagtgagctgctatg

SEQ ID NO: 32724 - DNA, 3003 bp, Unknown
  misc_feature (1)..( 3003): 2750-1469P.txt file - cDNA_ID_3060498; gDNA_ID_1620355; Annot_ID_154449
agtaaagaagtacacagaagtcaagaaacaaaaggatccatccgaaacaagtataacatttgcataaaagagaaaaactagttttcttttcttcctgcttatcatttttctaaattccgtttcttcatttgtctttaaaaaaaggtaaaaagctgattactttccatggtgatcttccatactcttcaactgagctgattgagaagctagagtctcttgacgaggaagacattgtgggttcgggaggatttggcacggtttatcgaatggttatgaacgatcttggaacctttgcggttaaaaagatagataggagtcgacaaggatcagaccgagtttttgagcgagaagtagagattttaggtagtgtcaaacacatcaatctagtgaacctacgtggatactgccgtttaccatcttcaagacttctcatctatgattatctaaccttaggaagcttagacgatcttcttcacggtaaatacagttatacatagtttatcttcattttggtctgtgatgcgtcatattaatctattttttggtttctttatctatcaagaacgagctcaagaagacggtttgttgaactggaatgctcggttgaaaattgcgctaggttccgcgaggggtcttgcttatctacaccatgattgtagtcccaaaattgttcaccgtgacataaaatcgagcaatattctactcaatgataaactagaacctcgagtctcggactttggtcttgcaaagcttcttgttgacgaagatgctcatgttaccaccgtggtagctggcacctttggctatcttgctccaggttctcttctttgctaacttcttttttgaatcttggacaataatttttaaagtttctaactctttgatgaatcttggaaacagagtatctgcaaaatgggagagcgacggagaagtctgatgtgtacagctttggagttcttctccttgagctcgttaccggaaaaagaccaacagacccgatattcgttaaaagaggcttgaacgtcgtcggatgggtaagaagacacctcaaatcttgtctccgagaagaaacgttctgtttttacttcctaagatttgggttctaataaagtgttatttctctcagatgaacactgtgttgaaagagaatcgattagaggatgtaatagacaagagatgcaccgatgtcgacgaagagtctgttgaggcattgctcgagatagctgagagatgtacagatgctaacccggagaacaggccggctatgaaccaggtggctcagttgcttgagcaagaagtcatgtcaccttcttctggtatcgattactacgatgattctcattctgattactgttagggacttatgcacggctaaaagtaaccaggagatcattagcctgcgacggttttgttgttgttgctgctgcgttatgaatgttgtgatttaggagcgagggatttgtttgtatattagatatgaaggtggagtcaagattattgagcgtgcactgttcttgtgcactttatatttttgcaacaaaatgatcgatgttattgcgtatgcattgtactatgactctttcaaagggaagacacacatacgaattatcgatgttaatgtcgttaggcttctttcttacgttttgtagcgtacattgcttagctctactaaagctggtcctatgttttacaaacctgaaagtagaagactctcaatgcacaaacgttgctacaaaactttcatctttctgaataattagctatttttatttatgaaagtgttatttctctataaatcttataatttggaaactgatattaaaaaaaaaacatcttctttttatagttacaaacaagtttttttttttttttttttctgtcaaagacttgagagttgataaaaaaaagagttgataatttcttgatttttcttctggaacattttaatattatcttctgaataatcaaatgacctttcgtttaatggaagagacttcgaccatcatcaaaaccccatccacctcttaaaaggccaacgcttttctgccctatgtgctttgctagtttcctacacgtacgtatatatctataaaatcatttttcatatatatatggtttaatgcatccatagtttatacatattttatatttaaaccctaccctatacgatacactatatacatatatcgtatagtagtaattgattatataaaattttacatagatgtacaagagcattgatatcgatagaagttagaaccttttgaagatattcgtaactcttgaaaaattcgattcttagtgacatagtgagcaataactacagattatggagattaatttgaattttagtctattttccctcttataaaagaacaattaccaaggaaatcctaattctgaattaatcatttacaaagttgtagtatatatataaaaaaaaagttgtagtatatagtattaacaaactaacacaatttttttcaactttgatagtaacctttttcaaaccaatatatattagtgttttaaagtacgccattatcttgtataatatgcatggtgtattgatagtattttatatgtatgtaaaatgaaaactaaaaggcgactactagcataaaaaataaatgatgaaatttaacaaattttgtaattttaaaggcaatatactattgtaccgtgaaaaaatatataggtaaaattttcaaaatatttgtgttgaccaaataaatggcaagatcataatattttgcataattttctatattttaaagccgattttcattgctaaaatatattgtataagtatatgctaatacacatatttgcgtgtgtgtatataaataaaaacatgcatacatgtatcatttgtctgtctcctattggctaagaaaacagagagaatcggtatttttagcctttgctaagatattttgatcaaaaatcccacttttgagcggtcttatctttattctccacctcaaaggaccatttctcatg

SEQ ID NO: 32725 - DNA, 2409 bp, Unknown; identical to SEQ ID NO: 1083
  misc_feature (1)..( 2409): 2750-1469P.txt file - cDNA_ID_3060510; gDNA_ID_1620356; Annot_ID_154516

SEQ ID NO: 32726 - DNA, 3003 bp, Unknown
  misc_feature (1)..( 3003): 2750-1469P.txt file - cDNA_ID_3060570; gDNA_ID_1620357; Annot_ID_154539
agtctaacaagcatatacaggtttacacaaattatatgtatcacatattgcaagatactacatgacagcaaaattctggaattataagaaacagaagcagaggccaacctcttaggttgcttgtgcgtgtcaaaacttctcaccagattcaggatgaactgacacatcccttgatcagtctggtcataaaacaacttatacagcaagatgcggacagtaaaagcttccttagagtcttcaggtagcaatttgatcaccagatctagtaagcaaagctgcattggaaaaaccacgtgaacaatgaacaccatgagtatactagtttctggataaaatgcagaaggaaatgactatcatttctccatttctccatctcataaaccaatgatacttgcatatgtctaaagaaaaagatgagctacaaaaaccatttaaaaagcaaataggcggcagaagaacagtcttagggaactagccagtaagagattaaagcatgcatattgcataccatggttttcacaagagagcttgctgcagatagaaacttaaaatctttagtttctttcagaccatcaaatgcacagcgccattttgaaatgacaagcaaaaacattctgtcgttaattgttgctgcaatcggcgcacaaatgtcactcttggaaaagtttactccagccttctggttggtagtgagttcagaggtttcctctgtttctattgctggctgaaaaaaaagccagacaatcataaaattaccgagattcagccttgtcgaaatgaaggaaaaataaatgcatagcaacttagaccaatgagagacaaaaccaaagtagctcaattactcacactagaagccgaagacttgtgaaactgaaaagaggtgatggactgagcaacttggaagaaagtaacaatgtcgctattttgaatggagggatgctccttttcaatatcttcacataatgactgcatcagaactaagagatatggtacgctggcatcagcatcagcatcaggatacttaaaaccaagtataaacaaaagaggttgttatattgtgtcatctaccattatatccgcctgacataaactgattgatgaaatcatgcagcaacttcaaaactttgtcatttgtcacagacattggtccatgttcccagacaatcttttcggtggctccacgaccttgctgaggcttaagcattgtgctttccgtagtagaaggtattccctttagtacagctttagtgccatcctatcaaaaatctcattcaagttacataactatttacataaacctaaaattttaagcatcattgcgagaaacaataccatggtaacccgggtgaatgtcccaccaaattgtgaatgacgctgattcatattattgagtcttgcaagctttcttttaacttcctcctccttcattaatgtcttcaaactatctacagaagcttgtttcccctgatccaactgcaaaacaaaacatgatgatcgacgtcagcatcaataccaacaatctcaggaatcatattgatccagttgaatcattaaccttctcaggagcctttgcaacgagctccatgtcttgacccaagagaatataatgataaatctcaagcagaagtaagttgtcatgcctcaacaaactattgaaaccctcaatagtctgagttatcacaagaactatatccatcacattctcacgagacagaacttcgagaaactgatccctcaacgacaaaaagtaacaagtagactctccagctttctgaatcggagatacatcatgaatagcaagtaaattcctgaataaagtaagcacaagctgaaccaatttccaatcttcctcattgaatacatctctgtaaagcataaataatatcagtaagaaagaaaaaatcgttttgcattacttaacacaacaatgagtttcgaacttacaattctaagttctcaagaggagcttcaagcaaagacacaatcactgcaacaatattactaaaagtaattgcagatttcaatccccatagatactctaactgctgaggaatatcatctgaagaaggctctataggcattgtaagaaacaccaacactttaactgaacaaaaacagatcacaatctcatcagaaaaattacaaagcatcacacttttatttaagggcaacagagcaaactcagtacctgcatttaaaactaagttatgttcatcttggtaatgctcaatgatcggaatcaaatctttagagactatattccacgcacagacttgtttgaaaacttctctgctctcaggatcgtcgcgtctcagaaatctcagtaaatctttcaaattgtcgagacagtactcgcttttcgagtacccaattcttcttctgtcttcgtcttcctcgggaagacccagatcgctgcagattactgataatccttccaaatctatcttcttcttcgttgagattctctcctccacatccattttcttccgcggaatacaaaaatgaaataaaaaatctcaatgaaattaagaagagatttttagcgaatcaaaacgtaaacttcgagaaatcagaattcgaaaaggctcagcttctctgtatcatcactaatctcaagtgattagggctcttgtgagcgcgaatagctccagacagtttcccgccatttcgcaatcctcaaaagttacaagtcaaactaaaacaccgagatttggcccacatggtctaaatgggcttataaattggtccaaaagtacgagtttaaacgccgtcgttttgggttgtgtcttattttgtttttttctaaaaattaatttaattttccaactacttaatgatttgtcatgcttcttcgatacgaactaagcacttcttctccgccttcgtaagttccgccgaaaagaaccaaatccttcactactctgtctcagctttcgacctctctcttctcattcctttgcaacttctcacttctcgaattccttctcttcaaaatcagaaatg

SEQ ID NO: 32727 - DNA, 3000 bp, Unknown; identical to SEQ ID NO: 1092
  misc_feature (1)..( 3000): 2750-1469P.txt file - cDNA_ID_3060584; gDNA_ID_1620357; Annot_ID_154531

SEQ ID NO: 32728 - DNA, 3000 bp, Unknown; identical to SEQ ID NO: 1095
  misc_feature (1)..( 3000): 2750-1469P.txt file - cDNA_ID_3060662; gDNA_ID_1620359; Annot_ID_154592

SEQ ID NO: 32729 - DNA, 3000 bp, Unknown; identical to SEQ ID NO: 1097
  misc_feature (1)..( 3000): 2750-1469P.txt file - cDNA_ID_3060666; gDNA_ID_1620359; Annot_ID_154591

SEQ ID NO: 32730 - DNA, 3000 bp, Unknown; identical to SEQ ID NO: 1099
  misc_feature (1)..( 3000): 2750-1469P.txt file - cDNA_ID_3060670; gDNA_ID_1620359; Annot_ID_154589

SEQ ID NO: 32731 - DNA, 3003 bp, Unknown
  misc_feature (1)..( 3003): 2750-1469P.txt file - cDNA_ID_3060679; gDNA_ID_1620359; Annot_ID_154577
catttttctataaatccaaactaacatctactttctttaaatctataaccctaaacacttttttaaactcaaaccgatatataattttgtttaattttaaatctaaactctagtgacttatttataaacccaaacctaaaaataatttcgttttattgtaaatttaaactctaatttatatttataaatctaaactgacttataattttgtttaattgtaaaatctaaattttaaatataattaatcttgtttaattaaaagtatacagatttgttattttagtttattatataatatgatataataactagtttaaattaaaagtaagagtttattcttagaggtaaatgcaagtattgtccgaaaaaacaaatctaattcaagtagtgtccgaaaaaaaattctaactagtttgatagttaaaattttgatttaaaaaaggaaaaaaatcaaacaagatattaattagaagtgtgagacacggcacaagagtcacatgagtgtacgtacttatcaagattgactctgtctgagtctgaagtcccaaaccatgatggcaccacttccacatacgatcgtgccccgtattttggatagaatacggacagtggttttcgtttggacacgtgtcctgctttatctcttcgtcgccccaaaaaataccacaatgtcttatctcaaccacacgtgttctgcttatcccaacctcacaatttgtaccaaaatacacactttgcatggaagattttctaattatacaactcacattattcgaatttaaatttcgattttttagtttcaagaaaatcattctttgatgggtacttgtcttatttaacaggttgtatacttgtattcattgttctgccaaatgaaaataaaaatgaaaatgatgttcattgtttaataaaagtactaagataacaatcacgacaaatttctgtctagttcattaaatatttaatcaaactctaaacgattttcaaacaatttttataattcaaaaaataagttacatatctttgtttaacataatataataaaaataacatgaataaattattttaacataaaaaattcagtttttcaaaaataagtttagaagtttacgttctaaaataaggtaaaatatgaatgctgttttaagacgcaatctagataattttttttaataaaaaccgagatacatttaaatctatctaaataacttataactacctaattgttacataatctaccaatttaactctatgtaaaataaaactgattttagtaacatttaagcagtacgagaatgctagcgcctaattaaacgatcttctaatccactttcttgaatatttgttttaactaaatctaaacaaaaatatagttatataaccacaaatattaatgaaatttaaacttatagtaactgaaatacccaaaactaaaaaaaaaaaccaaaattataataattataaataagaagatattagtttatgtttacaatcgaaataatcaaataaatgattgtctttatttaggactacgatcaagaaccgaatgggcttttccaaaccaaaccgagatttgaattttatggtgcggattcggttaactggagaatagctatcaacaacaatttaaaatagatttagctagatcggtttggttcggttcgttttgtattctctgtcactcctcacaatcgcttatattttatattgtatgtttaaaagtcaacatcgaaatattgtacgttagtatgtcacttatgataatgtttattcgtaaacacaatttgaaaaggtcaaagaaagaggaaagatagttaatcaagcccttgttgtcaaaaataattattttatttactgtcatcgtaatgtttatcaatgcagttattaatctcatttttttctcttccgaagtcgacgaacaataaaaaaaaccaatctcattcgaagtacttattactgatatgatgctgagctgacacagtcgtaagccttggacaacaatcattcatgacgtcactgctgtgacgctagaatgatgacattatatcaatgtttttttgtctgaattttgttatggtaaaaataatgaaaatgtagagcttgagtattttgattttcgttttattgtaaactagctgaatctgaatcttgagcagttaattaatttcgtaatttattaattctattctgactttttaaaatataatatatattaactttggtagatgcttaaggtaattcttttttaataaataagatggttagagtatcttaaagttagcttataagaaaatcggaaaaattacttttggtgggttaattgtttctgtttgaagtaatgtgtgtagatttttcttatgaatttagattaaaaactatttgtttttcagatgttttaagaaaaaaattgtcattcatagcttgtccattcttacataccttaataagaaaaattataaagttttgtggattcacggaagctaatctaggttatgtatttgcccaaaaaataatctaggttttgttatggaattaagaaggaaaaaaaaattgagataaatagtatataaaaacaatttaaactaagtattattagcttaattgataaagattttaggtgaaacttaaaaatagttggttaaagagattacaaacattaaccaaattaaccaagaacctcctagtatttaaaaaaaacacttaaaaatatccaaacatttaattttttaatcataaatcttataaaacccacagctgtcctttcgaaaatccactatattcggtggattaagaattaaaaatcattcgaataatatgcatacttatataacaaaaacaattcacttgaaaacataatcaattgagagtaggaccgagtaacactgcattgttttatatatatcatcgatgcacatcgcatacataatatactcaaagtcgagccttccttcctttatctcttataccctttttgattcttcttcaattttctgacatcaaatg

SEQ ID NO: 32732 - DNA, 3000 bp, Unknown; identical to SEQ ID NO: 1102
  misc_feature (1)..( 3000): 2750-1469P.txt file - cDNA_ID_3060687; gDNA_ID_1620360; Annot_ID_154623

SEQ ID NO: 32733 - DNA, 3003 bp, Unknown
  misc_feature (1)..( 3003): 2750-1469P.txt file - cDNA_ID_3060718; gDNA_ID_1620360; Annot_ID_154630
gaaagataatgctcatcaaagtaaaaagttcaaaaacaagatatagaatcggcttattcaggcatgaatattgtcatatacaatttacaaatcagatgcatcttgatttacattttccccaggttcaacaagtgaaaacgaaacccctagtcttcattcgactagcaaactagctgatgactacacaagataactacggcaaatccctagaactaagctgcatcatccaagtaaaattatgaaacctgagaattcacaaaatccatagattaaccttctctgcatagactgatagatagaactcacctgaaattcgctcagttggttgactccgactcagacggaaagcagaaatcgaggagaatgtgttacatagaaggaagatcaaaacgcagctcgataacttcatttttctctctcagaaattttggttcctccctaaaaactcttcaaaatcccagatcatataaagtatataaagatcaactagaacagctgaaatgtcagaagaagtagttgctaaaaccggaaccccgagattgagacttcaaaaccggaacaaaatttacaaaattcgctaccgattgttagatctcactcacgcccagcgttgacagcgagagcccagcgattttcatttgaagatgcgaagaaagcaagaagaaagttgaagaagattcgtctatggcctatacgacgtcgtttgaaagggatccatttttcgcaaaggaaagtcgttggggacttgaacattccacgtcagcctcttttccactttaaaaaataacaatgtaatgggctgaccgagaagatataaacgcagcccattatttaatgggcaaaagtgttttctttttgggttaaagtgtgattccgttcttgtgaacctagttgtaaacttttgtaactgcaaagtgtagttcggtcttgtttatccggtatattgaattttgaaacagtaataaatagctgaattaagtcacttttgagttgtttttctttaatgtgaaaatgatactgagaaaatagggtagtaataggaggctttagaacagattattcagtcttttcaagattctaaaactccaacagttaaataacagtggtgaaaacagtatcaagagtacgagccgctactcgcaatgatgaagatgatgatatataatagtaatgaatttatatgttgtaaacttgtaatgttaaagattaataataaactaaatgagagaaaggacaaagaaaaggtaagaggaaactgagggagtgagacagtcaaaataaaacagactgagagcattaagaatgccagtctctcagaacttcgatttgacctgtcgtttcctcattggctacctttccaacattaaagttttttatcggctcaattccaatgttataattttttatatattttcacatcattcttttttttcactgtttagtcacaaagtttacgtaacccatatgtccaatcccacactttaatttgtatttttagttccaacatataaaaataacaaaataaccattgcttttttccccactttaatttgtaagttctttctgttatttaataaatttgacattaccaaaaaaaaaatttttagatgggtgaatatatatagaaatgtaacttatcaaattgattcggttttctgattttcttaacgactaaaaaaaatatatgtgtactagggcaataggggtaattacaaatcagggagatgacaacacgtaagagatagttgaagagattagaccgaaacacacctgacctcctctccttctggagttttcacactgcatttatcaattaatgtttcctaaaacgcagatagataaaggtttcatttattagcttatgtttatttaaagcaaaagaacaacttgtggctatatatagtagattaacaatctcagactcagagtgctgatatttcttatcatacaaaatttatcttcccctaacaatacttccaaagcttatttagatagacatatatggaattatggataatggattcccttaagttatatgaatcataggggaatataattttagtaacttatcgggcttctgcaaagattgtgcatggtaccatgcgtccatgccaatacagttaaagtttacataatacaaatttttacgtatttctatatatcatatatgacttacagattatcatagcttaatatagccagtattgccaactttccattcgtacctagaacttataagaagattggaaaggatattaaaattgaaaaagacgtaggttggccatgtatcttaagatagttaaacgatatcagcaatctatcaataatcaatctatcgtaacaaatatttttgtcataaatgtatttgtagatttttttttttatacttttagatggttaaatgttcaagaaatctaaccaaatggtggaatggttccgtttgatcgtgctctcatggtacaaacaatgagaccccccaaaaaaaaaaaacccccgaggatgaaattaaaacaaataacacagcttgaacaaaacatcaaaaacagaggatcatcacagtaaatattaatacttgaacaaaacatcaaaaagataggatcatcacagtaaatattaatatgcataaagaagagaatcaccacagtgaaaaccctaatcattttatattcctacgtgtcaaattatgaatggtcataatcagagtagagaaaaagaatgtcgatgaaagaaaaagtttgacttgttaagtcccaactgtcaatttcccagcaagacacatatcttcttttacatcacattacatctacacataaatgctttattgcaaaaatagcgatataaaaaaagaatatacaaaaacctagtatttattttctagattctttactgttgtatatatagaagttgctcgagtggtcatttttacaataaagcaatctgctcaaaagagtaaagaaagagagaaaaagagagtgatagagagagagagaaaaatagattatg

SEQ ID NO: 32734 - DNA, 3000 bp, Unknown; identical to SEQ ID NO: 1105
  misc_feature (1)..( 3000): 2750-1469P.txt file - cDNA_ID_3060726; gDNA_ID_1620360; Annot_ID_154628

SEQ ID NO: 32735 - DNA, 3000 bp, Unknown; identical to SEQ ID NO: 1106
  misc_feature (1)..( 3000): 2750-1469P.txt file - cDNA_ID_3060734; gDNA_ID_1620360; Annot_ID_154624

SEQ ID NO: 32736 - DNA, 3003 bp, Unknown
  misc_feature (1)..( 3003): 2750-1469P.txt file - cDNA_ID_3060738; gDNA_ID_1620360; Annot_ID_154622
tttaagtttaaccaacacatctaaaccaatttaataaaattaatatttttccaaatttcttaaatatacaagcgatgaaattgagaaaaagtaaactcgtaatttttccaccaaaaaacataaacccgtgattttcccgccaaaaacataaacccatgattttcctaccaaaaacgtaaatccataattttcccgctaaaaacgtaaactcctaattttcccacaaaaacgtaaacccgtaattttccttccaaaaacgtaaacccgtgattttcccgccaaaaacgtaaactcctaattttcccgccaaaaacgtaaacccgtaattttccttccaaaaacgtaaacccgtaattttccttccaaaaacgtaaacccgtgatttttccgccaaaaacgtaaacccatgattttcccgccaaaaacgtaaatccataattttcccgccaaaaacataaacccgtaattttccgccaaaaacgtaaacccgtgatttttccgccaaaaacgtaaacccgtgattttcccgccaaaaacgtaaatccataattttcttgccaaaaacataaacccgtaatttttcaccaaaaccgtaaatccgtgattttcccgcctaaaacgtaaacccgtgattttcccgccaaaaacgtaaatccataattttcccgccaaaaacataaacccgtaattttccgccaaaaacgtaaacccgtgattttcccgccaaaaacataaatccgtgattttcccgccagaaacgtaaactcgagattttcccgccaaaaacgtaaacccgtaattttctcgccaaaaacgtaaaaacctataatttttccgccaaaaacgtagatccgtgattttacgtacaaaaaacgtaaacccgtaaaaagtggaatccgtaaatatcttaagtttgatgataatgaattaataattattattatttattattgttttataataataattaattaaattattacttaaatgagttaacccatttaacaactcaacccataaaattaaatgagttatgggttgacccaaacccatttaacaaaatgagttgggtcaacccataactcatttaaccctatactcatttgattatgagttgagttgagttgggttacccattttgacacccctaaagatatcacaccctaaagatatcacaatctaaataaaattgagaaagaagacgtttttttgacaatatgaaaatatgagctaagtttcatcgcgtcactttttgatttataactgttgatttaatttgttatttttaccaaaaaaaaaagaaaagaggttatatggaaaatgactagtagctaatcgtattagcgttgacaacggatagtgtgatatatatatatatatagtcggacgattagctagctcataaagctaagtgacaaaactaattatcaacggtgaatgagattggtcggcaagtaggtagagcgtggacagatcaattttcagacagaattcaaagtattaatgaccaatttgatacccttgaatgaagaaccaaactaattaaaacgtgcaaggaaaaaaacgtgtatctcctcctcgtgtattcacacctcctatttaatttatcatggatttattacttatattaattgcagatatgtttttcctcaaaatcacatgcaattgtttcctcattcttcaacaaattaatattacgcttactactatttctcatttcaaacttggtcaaatttacatattcagttaagacaaaataaaattatatagttaatattttccaacaaattaaaaatatacatttatattaatatatatatatatatactattgttttggtaacgttatctagtttcctatcaaaataattttaaatgttacattaaaaatacaaaaatacatttgttacaaaatggtttgtattgctatattataagaaagaaatacatagaattgagttgttgacaaaaaaaaacatagaattgatttaatgtagcttaaaaaaagaacataacttttttaaaatttgttttcaccacataacttttttaaaaaagtttacaaaacccatatttttctaagaaagataaacaagtgtagtaaataatttaaattttttttcttcaaaataaactattttctgcgaaattaaatctaaaatatttaatggcataaagaggtaaataaatgaaaagtattagggtaaaattacatatataagtataatatccgatttctctcatgatgtccttgtttatatttcatccacctctcctctgcacaatcttcttcttctcagctctctctctctcaatctcgagatccgttctctttaaatctgtctctttctcttcaatctcattgtctttgagctcttttgttgagatcaatctcagattgaaatcaatcatcatagacaattaagttttgatttacgttttttttttaatttcttcatcagatctagtttttaccaataacggataaattcaggtatgttcatcatcgtagatctatctctgtctattgattcaaattggatgtatttagattcaatcctgatctgatcttttggctttttgcgatcgcaagttttgattggtgagaattcgtttttttctagctcgatcgaactctgtagtgtagatcgagacgaatgtagagtttcgtgattcgtttttggttatatgatgttatgttttaattgatgcatgtgagttttttttgttttttttttgtgtgtgtgttgtgattcattgatctgtgagaaaagttttctgaatcatggttgtgtttattgatttgttggagtatgaatcatagaagaaccaatgcaatcattttgaaaaggaaaacaaccttttttaaaaaactttattctcatttcgcgagtgtttttagtgattgtggtaagtgggtaacctttttgatgttaggattactattgtttgatgttttttttttcattgtttatcgtgcaggtcttagccaatcaccaacatg

SEQ ID NO: 32737 - DNA, 3000 bp, Unknown; identical to SEQ ID NO: 1113
  misc_feature (1)..( 3000): 2750-1469P.txt file - cDNA_ID_3060750; gDNA_ID_1620361; Annot_ID_154660

SEQ ID NO: 32738 - DNA, 3003 bp, Unknown
  misc_feature (1)..( 3003): 2750-1469P.txt file - cDNA_ID_3060754; gDNA_ID_1620361; Annot_ID_154657
gatataactaagaaaatgtcaaagagaccatattgtatcggagaaggactgaagaaaggagcatggactacagaagaggataaaaaactcatctcttatatccacgaccacggtgaaggaggctggcgtgacattccagaaaaagctggtacataactatatatagacgcatttgtgtctctataatatgaatttattcacaatctgttactaatatgtattaattattctcttaattgatcatttgatctttatctgctttttttcgagtttagggctgaaacggtgtggaaagagttgtagattacggtggactaactatttgaaaccagatatcaagagaggagagtttagctatgaggaagagcagattatcatcatgcttcatgcatctcgtggcaataagtacgtatggcatttctctaggcttgtttgtgctcatatcagtttagtgaagacatgatcatcaatgttttgatatatatgtaccctgtgtttttattttattttactaggtggtctgtcatagctagacatttgccaaaaagaacggataacgaggtcaaaaactattggaacacacatctcaagaaacgtttaatcgatgatggcattgatcccgtgacacacaagccactagcttcttctaaccctaatccagttgagcccatgaagttcgatttccaaaagaaatccaatcaggatgagcactcttcacagtctagttctacaactccagcatctcttcccctttcctcgaatttgaacagtgttaaatccaaaattagcagtggtgagacgcagatagaaagtggtcacgtgagctgcaagaaacgttttggacgatcgagctctacatcaaggttgttaaacaaagttgcagctagagcttcttccatcggcaacatcttatcaacatccatagaaggaaccttgagatctcctgcatcatcttcaggactcccagactcgttctctcaatcatatgagtacatgatcgataacaaagaagatctcggtacgagcattgatctcaacatccccgagtatgatttcccacagtttcttgagcaactcattaacgatgacgacgaaaatgagaacattgttgggcccgaacaagatctccttatgtccgatttcccatcaacattcgttgatgaagacgatatacttggagacataaccagttggtcaacttatcttcttgaccatcccaattttatgtatgaatcggatcaagattccgacgagaagaacttcttatgatctgtctatagatggcttgtcaatttcccaatgttgacatgcccaagattatgattaggcttttctcttagataaatttcaagttgtttgaaacaaataatcccgtggatcgattagtttttgatttgccggagtttttatatttttgtaactcttttgtaatataattttaaatagctttacatatatacattatatatgacaaataagaatctaagcgaaaacgtttacaaaaatatatacattataggtccacaaaaacactataacacaaaaggtaaatagcaatgagtgggcaacaatattggatctgtgacccggcaaaatttatccgctaacaaaaacgaatctgaataaatgtccactgatatatgtgtatgtgtgtgtgagagagatatgacttatgcgagcttttgtttctatgtgtgtggctgcacatgaatgatttagtttttgttgtgtgtgtgaaaatgaaagttgtattttttctgtcggccgattaaaaactccaaattcgaaacagaatttgaaccaaaaatagacacacaataatcctcacgatcaaataaacccaaaagaaacgtagctattacaagtacgatctctcaggaacaaataatccgcatagccaaaataggctacatttcaggtagtcacatatatgactgcaatcacgaaatcacacgttgagctatcccaaaaagctctcttcttcgaattcgatgaattggtcgtaactgagagttttatgaatggattaaatgaaatagacgtatataaaaagtggaataaataatgcctttatgtttgcataaaactagtccttaattgtatttatgtatttcgtttccttttaatggaattttctatgtgcactcaataaaaattgacctaagattcttttcatatttgaatataagtttcattcaagaacaaatccattgatcaaaccaaattacatactgccaaaaactttaaacgtggaaatcttttatatgctccagcaaagtggagattttataaattggaaaatagaagaaaaccttactttatgataaatttaaataaaattgaaaaatttcctcatgtaatttaacaaaactaaattattgcagcattttcgttactcattattaagtgaaaactgtataatggtcaaaagtgcatctaattaactcctattaatagttcaaactaacacacgaatctttttcagattcatatgaagagttgaatctttttttattttccagctgaatcttctgatccaaaaccagaaggtccaaaacacatttctgtttttttcaccaaaaaacaaacaaacacaattctgtttaaagtaacctaattaggccgttaagaatataaaccttatttgggtcgtcaagaacataaaagcctgtataatagttttcttcttttttgggctaaagttttagttttaataatcaaaattaaacaactaatctatttgttaaatcatcatcttaacaaacctcggaacaaggacaagatcaccaggtttacaaacgaagcaacgaatcaacaattggaatcaaaaccttacctagaaagataaaccctaaagtaaattcagtttttcactttacctgcagaattggacaaagtaacttgatcttcatataatccctcgatgatccctcaaatgttcttaagaaatttcgaaacttttcacattcaccactcgattgaaccggacccgtttattcaatg

SEQ ID NO: 32739 - DNA, 3003 bp, Unknown
  misc_feature (1)..( 3003): 2750-1469P.txt file - cDNA_ID_3060761; gDNA_ID_1620361; Annot_ID_154648
tctaaaatttcccaatctcttcaagtttcctcaagacttgtttgacgtttggcctaagagaaggcgaaggagagcaacaagacattgcaagctgaaaatacttgaggacacattcttcacttagattatcatcacttccgagaatctcaggacggtataaatcagacaacctatgatcaagaacagcattcctcataaaatcaggaagatagaactcatcatcgccagttgcattctcgtttatcggttctttaccagagactagctcaagcatgatcacaccaagactatacacatcactctctttgctcacgtccttcatctttattaactcaggagctttgtatccctcagctgcagaaacatcaagaatctcttgtcctgcagacaggttcaagagcaaatgtaaaccgaaatcagagattctaggttcgaaactcgaactgagaagaacgttcttggacttcagattgccatggacgattggtttttgcattcctgtatgaagatgatcaagggctttcgatattccaattgtgattcttaaaatattgatccattttcttgattcatcatctccacctgtcaaaacaaaacaagaatgtaattttcttattagtctagatatttgctgagattgatgttcttagtgtcaaattttgttcttactacactaaagaagtggaaaatgacagaaaataaaacaaaaatagtaccgacaaaagacaaagatgatctcataccttatattttgaaaagcttgaagaaaataatatttaagacaaataatgaaacactgaattaaatgatccagctaatgtgcttaattccagctgtgtggttctcttttggataatcttaacacattgttaatcttacatagtatttttaatttatatctttatgaatatatatgtatgtatgtacatatgatatcatcatcatgggaatggtaaattatccaggaagattctaagaaactatatatgtatgtatagaatcttcccgggaaaacccatgaaacaagtaaccacgagattccatggggttaaaaggaaaaaaagaaaaaaagttaacattctttgctttctgtcggaaaaaagaaaaagtttggtcctttttaaaacttttttatcaagaaagtagaaaagaaaacagagagacttacttctgatgaagtcggaaagattcccggaaccgaagaaaggatgaaccataagcttctctcctctgtttccagcgtagaaacctaacagaggaaccaaattctcatgtcgaacaaacccaagtgtttcgatgatgccattaaactctttagaatccgatctcactgtacacaccggtctaagaaacctaagaaccctaatcttgccgcttctttgtaaagacgctttgtatagagtaccatagcttgattttccgatgacttctccgggagcatcgaggatatcgcagatcgtgagatcttctccgccttgaaagattacgagttcctctgtttccgaggagaagccttgtttgttgtggtctagtgattcgacgtcgtattgatctgattcagtagatgatgattcttttcttctaaggaagatgataaagaagattactatcaagaatgctgataaagatactcctagtaacaatgttagaagtagagattttctcatctctgaaacacttttttaggtgagagattttttggaagatttatgattatgagtattgtgaggtttgcagggaaaaaaattacagagaaagagagaaagattgatagagacgggagatgaagttgatatataagttcagaggacagatctaagaatatcttttttattttatttccttgtatcaatgttgactttatgatttcttggccttgtaagggtatgtgtatatttgtatttacatatatatgcaaatttactttcctcttatgttctcaaccaattatgatgacctaataattccaaattgtattttcgttacacgtcgacctatatgtacttattttctctctagggttgatgtttttcagtttcacacatgcttgtatactccgtataaaagagtttttggaaaataatatctcgagtagaacgttttagtttctttcaaggtaaaaatattaatgagcgaccgtggtaattaattgtaatgatctcaagaaaaaatgaagaacgttggaagtggtgatgataattaaatgttgggtttgactagtgatggtagttgaagtgcgtggggtacatatttagatccttgattggatgttttatccggcaagttagggtcagactggtggagaggaaataaattgaaggcaagtacatacaactcctaacttgagaatgaaataaattgagaagaaaaaaggatagaggaatacttttctctcttttgttgaggaacctttcttctactaataccaattttttctgtttttcaagctgaaattgttttggaataagtatgattgtgtttagagaaaagactgaaaataatgattgttgagaagtgaaaatcgacatcacgattaatctattgttagctgtaagctttgtctctactccttaattagacagttgacacagatgatgaaattcactttattcaacggctcgaaatcacccatttttggttccactatcccatgtcatcatcattttaaattgttcaccaccaaatacgattgtgaaagcatactcgttcataatcataataaattgcacgatatatattggctagccttttctaagttttctcgtaactaatttatatgtagcactacaaagtactataaaaccatatgagttgaaaaaaagaaacacatcacatgagcccacatattaagttaggagtagttaattagctctagattgagaagatgggaatatagattttctttagcattacattttgaagaaaaatcggaaaaatatcatagcaatattttactaatattgattattgagtacatgggttcaaaataataaaaaaaaaatg

SEQ ID NO: 32740 - DNA, 3003 bp, Unknown
  misc_feature (1)..( 3003): 2750-1469P.txt file - cDNA_ID_3060765; gDNA_ID_1620361; Annot_ID_154646
tgaaactcccttggaaccatgctttggccactgaacatgaacacacgccgtgtttaaaagagaccaaaccgttaaccgcagctgaaactctgacgtagtgagtatatgacggctatctggactccacctagcgtatgaaataccagcaggaccttcatcaatcttgcaagtccattctggttgagtcaaagaccaagcttgaatcatcggttttttataaagaccacaaagaatgtactctgaatcaagagcccattctatgtagcttattttatctaagcaagaaaacaattgcacaacctgcattcacatccataacattgaagattagtacatagaaagaaaaaaaaacttcaacgacatttatcatctctaaggttaaaagttccaaaatttagcaaacccaagttagtataatccaatttaagcacacgatctagttgcatttgaacattagaagaagtaagatccaaaaatctcctagctgaaattgccattctaatcaagggtttaggtggataaattactaaatcgagcttgcttatacctgaaacgaaaacgtatcacggatcacgagacgataatcattggcgacggcgacgtaacgagagtttggggagaaacaacaaggacctgtttgcttgtaagcctccgtgaattccatatttgagtatgtgcaacgagattctcagaagagaagaatcaatgcctatgatctatgataatctaagctcctggattcactgtgatacgagactgcgagaagccatggatatcgactttttcgagagaaaattttcaaaattgaaatgaaagagagattgtgagtcgggtcgggtttgtattgggtgggccagttacggggatggatttcagattgataatgggcctgaggcctattattcattaactcgtttgttgctggaatgacaataatagccttatttaacaaacaccttcacatagacgaaatcatgatcacctaaaaatcgaccatattttgatgttcacgtacgtaaatgcacattcatcttaatcacgtgaaagatgtttttccaactgatacaatagagttgttgtatttttagatcagacagactttcactataagcagattcaacattacatataaacataagacgtttaattgtaatttttttactaaaaaaatttgatcatagaattttgaattactcataaacatgaaacgttgaattttgaagctgctacatgttggaacagctcgaccaatgtcgttcacctcgggggggttttaagggtgtgcaaccggcgcaaatgaatgcagaggctccaattttttttatttaattctctgctaatttgagggtccaaatctttcaaaaatttctagacacagaacgatggctgggattgaatattaggttttatctgggaaaaaaaaagatgactatgtgaaactgtcacgttagctacggcactgcacggatcgatacgcacaaaacatgacttaaagaagaaaagaaatttgggccaattttccattttaaaaaagcttattatttccaacaaaaaggccattattagccacatcactgaacggatctactttttctttgagccggccttacccgccttacccgtaggtgcgggtgcgggtgtacctgcaccagcaccaggaccagcaccagcactagctgcaccaagaccaggaacagcagcagcagcagcacccgcagcagcagcagcaccagcaccagcagcagcagcaccagcaccagcaccagcagcttcgggtgtacttccacctgcggtacttccaccgccagactgatctccaaactttccagtaaaggatcttcctccccaatttgctgtccaagttcctccataactaaaatttggcgtagcttggggtgacgattttcctccccaagaccctttaaaagttccttcataattaatctttggcgttaaactgaactgggcaaacatagttggtggagctcctattgcaggtatattgttcttcgactttactcccatgccgcgcctacatcacacatacacaataacacaagtgtgtgtgtttgtatatatgtcatagtttcattaaattaaattagaaaaaaaaacattgtaccatatgaatatttcaataaaatttgtttgatttactaaatcagcaacctgatgagagcaatggccgtagctccaagggcgccaccggtcgtaaaccctgtggttaagagagtaatggctatcgtggctggtacgagaatcgggctgaatatgatgaaaagcggtgtggttacggttaatccgacggctgtaccagcgagtgttagacccgagaacacgaagaagactatagaggccacgacagcgataacaaccttataaacctccaacaagaagataagaaaagaaaacatgttgtgataaatgttaaatttctatgactgatgagatttgttttgatgtaattcttcagctcatactttgtttttggatggttacgttgtttggggtctacatgcaaaacgatgggagtcgatagagtcatagagatctacgtcacgttacattttctttttttgggggttgtcatgttttttggaccttttttctttcttgttcttgtaaagagttcaaaaattaactgtcgtgttgttcacgtttgtggttggaacatcctaaacatgtaacttatccttgatcctctacaggtctatagcagtttcgagataacaatatttaaaaaactttaagtttcagaagaatacagagtttataagctaagatttgtattagacacgactcaaaattcagaagtgagaacaggtcaatgtcaacgaaactcaaagaataattgataagcaaagcttcctccacaatcttcttgaccaaaaaaacataactcatcacatccttacctctctatataatccaacaccagagtctctcttcttcctcactccaataaaccctaaacaagtttctttttaaaccactccagcgatg

SEQ ID NO: 32741 - DNA, 3000 bp, Unknown; identical to SEQ ID NO: 1119
  misc_feature (1)..( 3000): 2750-1469P.txt file - cDNA_ID_3060769; gDNA_ID_1620361; Annot_ID_154645

SEQ ID NO: 32742 - DNA, 3000 bp, Unknown; identical to SEQ ID NO: 1125
  misc_feature (1)..( 3000): 2750-1469P.txt file - cDNA_ID_3060792; gDNA_ID_1620362; Annot_ID_154694

SEQ ID NO: 32743 - DNA, 3003 bp, Unknown
  misc_feature (1)..( 3003): 2750-1469P.txt file - cDNA_ID_3060819; gDNA_ID_1620362; Annot_ID_154687
aaggaatcaaccgcatcaagctttacgacaccgagacaactgtactaaccgcactcgcgaactccggaatcaaagtcgttgtctctctccccaacgaaaacctcgcttccgccgccgcagatcagagctacaccgacacttgggttcaggacaacataaagaagtacattccagcgacggatatcgaagcaatcgccgttgggaacgaagtgttcgtcgatccgaggaacacgacgacgtatctcgttccagctatgaagaatgttcaaagctctctcgtcaagttcaatctcgacaaatccattaagatctcgtcgccgattgctttaagcgcgttggcgagttcgtatccaccgtcggctggttcgtttaaaccggagttaatcgaaccggttattaaaccgatgcttgatctcctccgcaaaacgtcgtcgcatcttatggtgaatgcttatcctttctttgcttacgcagctaacgccgataagatctcgttggattacgcgttgtttaaggagaacgccgggaatgttgattccggtaacggtttgaagtataacagtctcttagacgctcagatcgacgccgttttcgccgcaatgtccgccgttggatttaacgacgttaagcttgtggtgacagagacaggctggccttctgccggagacgagaacgagattggtgctggttcggctaacgcggcggcgtataacggcgggttagttaaaagagtgttgacgggaaacggaacgccgttaaaaccgaaggagccactaaacgtttatctgttcgctctgtttaacgagaatcagaaaacgggtccgacttctgagagaaactacgggttgttttacccaaacgagaacaaagtgtatgacgtttcgctcaacggtaagtcaacgccggtcaacgataacaaagagaaggttgttccggtgaaaccgtcgctcgtgggacagacgtggtgtgtggcgaatggtaaaacgacgaaggagaagcttcaggaaggtctcgactacgcttgtggcgaaggaggtgctgattgccgtccgattcaaccgggtgccacgtgttataatcctgaatcgttagaagctcacgcttcctacgcgttcaacagttactatcagaagaacgcacgtggagttggcacgtgtaattttggtggtgcagcgtacgtggtctcgcaacctcctagtaagtaccctatctttcctctccaaaattttattttgattagtaagtattttgcatatacagtatagttattttcacgttcttaatagttggaagatggttagataataattatgggagttgggatggtttaacaacaaatgttatttttttgggcttcacttacgtatacagatttataattaaattgtgacgtatagacggaaacgtaaactaaattaattattttttgttggttatgtgtttgtagagtatgggaaatgcgagtttccaacagggcattgaaatggatatagagaagaagaggatcgtgcggatttatttacgttatttattttgatacattgttcttttgtcattcgagtatatgatttgcgtatatttatttttattattgtatatttggttggtttcatcggataaatagtcagattttctttcccccttaagccttaacttctttgctcgtgagtttataaaactgacaaaactttgttgatataaaccattatatcctgcaactgatccaataaacaacattgcaatattattttcaaaatctcaaattgattcgttttgctggtgatcaactgatcatgatccaagcaaaactcaacagtatatattgtccatattgtttcattccaatactccagagtcaaaaccttgagctgcctacttcatcaaacttgattagcgcctaccatcaattgagctacgactacactaccaactcccatatagaagcctgtaactcgaaaaatgggttttgagttatagtttgtcacaaagctctgtgaatacattatactacatgaaaactcatcaagtcttttgatatggaatcttcagaaccaagaatagctttaatgcttttatagttgtgaagtctgttattattctattactgaatgtgtattctcctccagaaatatctaagatcttagatgagtcagtttagacgttttaaatagcaagaatgttctgcttttttatgtcattttaaaaagcttaaggttttggattgtaagcatcgtgtggttgctaatcgaacttccttccctttgcattattgagatagtgtactcgcaaaacacggtggcaatttaaccaaaacatagtacaaacacggtttcaaaattttaaaaacaaaaccatatacagtacttgattaccatcccaagacttacatattcttagatggactatgagtctatggctttttcttcaactactaccaacttgaacttctcctccaaaccaattaagtgggctttcaattggtcatgccttctttccatatcacgagtttcttctagccagcgggagtgatttgatggaaaggtggtcgcattcgtggagtatgcttttgtaagtcttgattggaaaagctgtaaacaatgctctttctgaaatattgagggctagctttggatcgcgccatcgcggctaactcttggcaacaccaatggcttccttgtgtcttcttccatcaaagcgtgttcctttcattaattacattctcttttgtggccttctattatattgttgcgtagttttcagtcttttatttctcttcgttgtatctccgtgttatgtaaaaaatctaaaatttcgtataaaactttaaattttaccaaaaaaataattaaaaacagacaaattctttagaaataaaatctaacaccttttatattttcttcataaacaattgaaccaaaaaaaaaaactcaaatccaactcctctcccctataaaactctatcttattgatgattttgctcaaaatgtagtagtaataacaatg

SEQ ID NO: 32744 - DNA, 3003 bp, Unknown
  misc_feature (1)..( 3003): 2750-1469P.txt file - cDNA_ID_3060823; gDNA_ID_1620362; Annot_ID_154686
tcaagaaaaaagattttaatcactctatactttagatcatcacagtttggaaaagagtatcatcaaagttttcatatcaagaaactgtatatatagtattatcaaccaagcagcaacgacagaaaatttcaaggagattaaagagggaacacagtgaaaaaacctggctcttgaccttgagaatgacatgagcttcttgttcttggtcgatgggcttgtcatcttgagggttagacatctttccttttatcagattttatgaaacaaaaactccagtctgtgagaaatacgaaggcctgatagagagattcacaatacagtattgcaaaataaggggttgacttttgagaaagagagacttgtcaaaaaagtgactgaaaccagttcttgatcgcactcacttttgatctacagattcttgtggtgatatatcgaacggctcataatcattgtagcttatcatccgacggctaggagagcgtggaattcgtacatgaaaacactgccgtttaatcaagcattcgtaatgggctattgggctggtttaagatcaaatatgctcatatgtgggcttaattacttctacacagtatataaagttggaacccattttcgtgaaccgaccaaatagtttttagaaaatttataaatcatatttaaaaataaaatctaattaccacggtaatctaataatttcaaaaaaaatacaacagttagaaacttttaaaaatcttagcaaacataacttttgtggtattttaaaaagaaactcaaaattatgatattatttgacaaagtttagggcaagctctctttataaaatttatatatttcttgatgttctaaacttctaatgcatgcatggttattatttaatattaaaaaataatgtacgtcgaccgtcatagtgtgtaaatggttagtctatgtttcgtgacgacttctatttcggcccgacataatatatttccagtttttaatttgataaactaataggcattgtatcgtaacgtaaagatcagggacaatgctaacattcctatctaaaactcaatttgttggacagcatccaagtgacctaccacattgaattctttctcttggttgataagaaactaataatgatgatgttatatttatacgaatatattagttaacgtttatatttagaaattcgtcataaactcataatagttacaaataagtcaatctgaaggtgacacacctctctggatattataatgttttcaattttcatatggacttgtcattgtgtttcattttcaatttcatgtaccgacttaagacttaagggccttgtcgaaacataccgtacgatgtcgacaacctccatagatacattattaaattattgttactttcataatccaaaaattaaattgttatactaaagtatatgtaaaccagcatacattgatacatataagattaccacctagtggacaagttgatacacaaacaaaaacatgtatataatcatcaaatacaatattaccaaatgatgatgtctattattttctcttttgatagtggagttattatgatgtctactcttaattagtttcattattcaggtctcaatcaccgaagataaaactatatttcaaactgtagtagtaattaccgtatgtgtattaacattctatgcctatatgtacataaccgttaatattcggccacaattattaaattcaaataaatctaaaaagcatctttcaccaagtaattagtaaaactagccgtaaatgtcatccaaaattcttggttttacatcagaaggaaacattaattgcttagcgatagagttctatttgtataggacaactaaactctacaaatatcgttttttgtttatccatggacggagatggaccatttagattaattcattattatactactggaaaataatttgaggtgtttgcttagcttagctaaccttaaaatgttcatttttcctccgcacatctaaacgcgttcattagcccaatttgctaagtcaaaatattagttacaaccaacttgtgaatcagtcaatgttactatcaaatatttcatataaatctatacttggatttacaaatttatcgaaacatatctaaacacaattattaacataataactccaaccattcaaaataataataaaaaggacggaatatttaggacgtacgaaaaagagacgttggaaatcagagagctcaacgttcaaaatttggtacatgtatagaacaatgaatgacacatggccccattgtagattcttcatttctcgacgagacccagttaccattaatttacataataattctaattccgaccaatcaatgcatcacattatcgattaataattatcactcctccgaccagtttttttcacctattaatcctaactttaacggataattagcagctgttttcaaccagtgattaataggtatttattaccagctgatactacatgttttatttgcctcagtgcccaaatcccaataattatggaacgtattaaaagtgttgttgcaaatgcaattgtatgtctaaacaaattcgttttgttatacaattcattttatgcagaacataacgttaataaaatcccccaaaaaaggaaaaaagctgcagtaaaatcgaccctaattaattaaaagtgaatgctaattttggcacgtacccccacaatctctgacaacatttggtacaacaatctccaatcagtacacgactgaaacggtcaaatccacaattaaaataatatttactttagacacgtcatcgagttgaaatatttacatcacaaaaccgtacagttaaaaaaaacaaagtcatccccaatatctcacgtgggtcctacccactacatccacctccctcgttctccttcttcttcgtctctctatataaacaccatctttagcttctccttcaccggaatacaaaaactgaaacctttctctatttatctctctatacacaacaatg

SEQ ID NO: 32745 - DNA, 3003 bp, Unknown
  misc_feature (1)..( 3003): 2750-1469P.txt file - cDNA_ID_3060829; gDNA_ID_1620362; Annot_ID_154678
gagtctctaagtttgcaagagggatgttgagtgaatccgggagagagacaatcttatagtgatgtgaaggtcgaacatcgagcagaacatgttgttccttcttttgaagaatttctttgaactccttgctgctaattcttgattctgcaggaagcaggttcaatgggccctgtgatcaaatcgatgcaggcaaactttctaatatgagactactgacaacaactattggattcaagataagagaaaaagaaagaataataccgcaaataaaggaaattgagtgaagtcctcatagtcaaaatctttaaaagtttgcttattgaaagatgaattgtctccacacacggtgcactgtgatgacctgcctctgatcttgacctgtgcaaacactactccatcagtttatgcagatggaaacacaattgaatgtagttatgatcagaaatgaaaatagtaaaactttacaatgcgcatccttgctgataaagcatcaaaaagaagcatccgttcagagagtggttctcccaccaggcttgcgagtttaattgtctctagcgcttgtagacaaccaataacacctggcactgagaacagataaagtggaaaagatcatttaaagaaggacgaaattggtagagatttgcaagcaatagaaaaagaaaaaaatcgccattcaagtacctactccaagaactccactatcagaacatctttggcacgctgaggtaggtggaggagtgggaaaaagacaccggtaacacgggcctccgttatgattataaaccgtaagcttgaacacaaaaatcataatgacagttaagtgtttaatatgtggcttaacatctataaagagtaacacaataatgtagcgaatgtcatatcacatacctgcccttccataccaagcgcagcacccgacaccaaaggctgtatacaaagtacaaacgctcagtcaatactcaacaccggtgcctataaaactgactacataattctattgaagtactcaggtatcaccattgtttacagcgtatatacagagagttcagaaaatgattcacctttcctaacaagacacaacaatcactgatcatgtaacggcttggaggattatcagtcgcatcgactatgatatcatatctaatttatacagttacggaaacacagcctttcaatgctttactttgaggagactaataaagatacagaaaactgagacatcctaaaacatgtttgcatatctaaggatactggctgaggatttccaaagcattggaagtgcgaagagcttccacatattcatcaactttgatcgttgaatttatcctggaaataaggaaaaaggaattctgattagactaaacgagtaaaggtggtcataattttctcgaatgcttgtgattaatcatattaatccgcaaggagtttgaattacgagcgacaagcagcagcagcagatttcactttgggatgtccaataaatgcttctgtgtgtataatctgaataacaaacaaaccaacagagacacaaatcagccaaaagtagtacttccattcagccattgaccacagattagagccaagaaaaagaaagagttgccaacgcagagtgttccaagtcgtacctgcctatgcatattgttgagctctacaacatcatgatcgataatacccaactgacctaaacgaatacaacaaaagatgaaacagaacataataatgaagggagcagaaccaatagtttctggagaaagaacggtatatagaaactactctatcgatatctgaagataaacttaaggtaagagtctgaaaccataccaacaccacatgctgcaagatacaataaggcaggtgaacctagtcctcctgctccaataactaataccgaagacttcaaaagatttgactgccctataatcatacacacatataacagaacagaagaattaatttgtggaagacactagcagagaaaacaagtaatccagaattcaaatttctccgacatcactaaactgaatcaaaacaattaaatggaaacagaagaaatccaatataaagtttcaatctttcagctatatcatcacaaaactcagaatcatccatctcagattatcttcctattggctaaatacaaacgtgaaaagagtttgcatttgagtgtttgagcaaaagtaccttcaacagcaaacgaaggaagtaacagttgacgactataacggtaaatctgatctggagataacccatgttcaagctccggtgccgtcagataagagtcaccgttggatacggcgtcgtacagttcaactgccgccgtatcctggagcttagcttcgagggtcgaaatacggtgctctatttctgccttcttgagctttaactcttccagttcccggacaatttccgacgaatcaccaccgttggacatcataacgacaatgttagagaaccaatagtagaaccctagaagcagcaaagaagacgatgtcagtcaacggacaaaacgttgactatttttattgacgccgtggtggatctctgtctttaaccggtatttaaccgcgaaccaggttggtaggccgggttgggttttaagagaattcatgcacttacgaaatttattaatttacctagttaaataaactaaatttggatgtcttttgaatgaaacataatcccaacatatggcagataatgaattcatgaatctttgaatgaaacataattccaatatgtatatgtatgtatgtctatataaatgtacacccaagaccaccacaaatcattctcaataagtattaaaatattacaaatacaaaaggtaagttaaattacaaatatttagaatatgctcctcttatactagattttcgtttttgttttaacaataactttgaaactcgattttagtaggttttgctttttcctgagacttaaatactatagtttgagaaggagttatagaatcctctacaaaaataacaaatgacaaccaaaatg

SEQ ID NO: 32746 - DNA, 798 bp, Unknown; identical to SEQ ID NO: 1122
  misc_feature (1)..( 798): 2750-1469P.txt file - cDNA_ID_3060840; gDNA_ID_1620362; Annot_ID_154667

SEQ ID NO: 32747 - DNA, 3003 bp, Unknown
  misc_feature (1)..( 3003): 2750-1469P.txt file - cDNA_ID_3060865; gDNA_ID_1620363; Annot_ID_154729
agtttgcaagtaaaaaccacaaaacaaacgagtctgtaggcacgaccgcacgagtgctaaagtccgctgcatattgatagttcgaagacggtgttttgtcgatattattcactatttacgtgtcgcggattgattagcgactaaagaattagccttaacatatgttttgttgaaatatattttgagtcaagattattcttaattcccaatagaattttgaagtatttgtctttgttccaacctttaaaaggatgcttgaagttccaatcaaactacaactcatgctctctccctcttctgccttaactatgaagaaaacaaaagacattcgtttttatttttctcttcagtatcaaattcaagaatccaattccaatagccacaacataaattctctttgatataataatctaaaattagaaactgattcacgtctctaaattaaaatttctgatctattcaagtaactgttcttatatgagttttgtttccatacatgctttgatttaaacgttttctactacaattatatctacctctcaacactggaatccaattttctttatacggtttatatcaagtattgattgtttttgtccaaaacaaaaaccaagtattaattgatatagctatagtacactcaaattttaatttgctcactataattctgatattactttgaatagaaattcaaaattatctaatcacaaagttcagtttatttataatatggaagctttgagcaaaataatgtaaatataattataaaaaataattagaaataatttaggacaactgaaaaaaatatggatttcggtctataagtttctattatatatcaaaggaagtacttttttttttttgataaaccctaaatatcaaaagtacttttcgtttttgccaaatatgtttaattacttattttcgagatgttatcttccatttttttcagtatcattgtaatcaatgataattataacaaaatcacgatatgaaaaaaaatattccattaattgatgtaaaaaaaaaagtcaaatatcataacattaaaatgtaactttccccttatttactaactaaagctcatgcatgcgtggcgtgatattatctattcaattccttttctaaaaaggttttcctagtcctattaggattaggaaacagaggttgctatataaatacttgattcgctcgcgtttatctcagtcacaaaatccctacttcttcgtaacaacttactaatatataggcagcttggagcttattcattggacgacgaactctttttcttcatctctttctgttttctttttctcttcttttgttctgagaataatgggcccaacatacagagctttgccagtaggtatgaggtttcgtccttcagatttggagttggctgtttactttttgatcaagaaagctttaggacttcccatgaaagctcttactgtgcccgacgaatgtaatgatatcttctcaacacatcctcgcgacttgcctggtgagaatactttctccgatccttttgacaaaacagatttgatagagtttttgagtttcttgatttaactttggctacttctttcttgcgtgacaagctttattttgtgaacttgtttttgctctgttctttcaggctatggaagcgaagagcattggtacttctactgcaagaaacccaagaatcaagttactagaacgaaatcttataacctctggataccaacgggagaaaaaactgatgtgttagatccaaagaagaatggcggcgaattagtcggtatcaagcattcgtttactttcattgagaacgaagaagaagaagaatctgataacaagaacggcgatgaagaagaacctccacaatgcaattggttcttggatgaaatcagcctcccattgacagttgtggatactgattggactctgtgtcatatcttttacgagaaggttaaacctgaatttggtaatttgcatatagtcgaatctgaatccgaatccgaagaagaagaagaagatgaaagtgttgataagcctgcagagagtttggatagtgttaaagagaaagatggaactgttcttcctccacctcctgctacaccttagcttcttcatgatatagtgttttactgttagtgttggtggattgtagattctctcaaaacctgtcaacgtccaaatctttattacctctagttgcatacctattgttttaaagatgcttatttcacttcaatatatcggttaggttttttttctttttctttccacaatatatcgattaggttatgtggctcgagagactcacttgctcgctgatacaaaagttccagaacaaagagatcatccctcatctaatggctcatgttagcaattgtccgcctaccttgctaaattgcgctcctacacctaaagaaaactattgatatgagtcgtagtaataatcaatcgatctctctattccaataattgttaggagggtcataatatatagaagaagatagatgatatatgttatataatatgatatattgatatgtccaaaaatcaaattgttcaaaagccttaatgaaaaagagaaagagatgtttgaccagcttaaaaacttccggtcaaacacctaaaaaccttttttccgcctttgtcataaatctttgactttttgactttttccctctcaacatctcttttcgagatttcaccacgtgtcaaacctctcatctgaaccgttcatcttacacgcgtgagattatctcattttctcctcctccgtctttctgctgtttcttcgatctgtttctttgaccagaaaaacaaaagcttcaaactttttagcttcttcttcttccttcaatgtcgttgaacacatcccacgatacttgacaaaatatctcactctttcgtctctctgttttcgactcgcaaaccatcgaagcgccgattaatcttagaggaatttcttcgtgattagggttttgtttagttctatctggagatatg

SEQ ID NO: 32748 - DNA, 3003 bp, Unknown
  misc_feature (1)..( 3003): 2750-1469P.txt file - cDNA_ID_3060869; gDNA_ID_1620363; Annot_ID_154727
gtatatcttcatgtcactctttatacaaggatgagacagggatttacaagaacctgcttcaagagacagcacatagagctggtcttgatctaccaatgtacacaagtgtgagatcaggatcttgtcacttcccaggtttctcttgtactgttgaacttgctgggatgacgtttacaggagaatcagcaaagacaaagaaacaagctgagaaaaacgcagccattgcagcttggtcctctttgaagaaaagtatatataactatcttccaaattgttccatcaaccccaaaaaagcttctcacttttctacttgaaaccatttttctgtttctctactgtgcagtgtcaagcttggattcacaagatgaagagaaggaacaagaagcagtagcaagagtactctcaagatttaaacccaaagaagtaagaagacgagagacaacaaaccaatggagaagaagaacaagtcaacaagattcaaacaaggatttgttgattgagagattgagatggatcaatcttttgaccaatcaagcttcttcatcatcatcaacatcaacaccgaatcaacacaaaaactccagtttcatctctctaattcccccaccaccaccacctaaatcctccaaaattttgccatttatccagcaatacaaagacagatcatcacaagaagctaagacagagacagcgacagagatgatcaacagcaaagccaaagtcaatgaaacatcaaccagattgagtaagcaaatgcccttttccgacatgaacagatacaactttgtcggagggtgtagcgtaaacccttatagtctggctccagcggttcaaatgagatcagtgattccagttttcgcagctccaccaccgaaaccaaaccccaaccttaacccatcatcattatcatcatcagtcaatgaattcacctcatccaataattcctgctctgttctgaatacgccgggattgggaggccaagagaagaagaatctaactcgcgaaatgatcaaacttggttcagaatcgagaattttggatcaaacccatgatagttagctaaatttggttaatgggttaatctcaaattaaatccttgtcaagtgtttgtcacatagataaattatagaccagtatgtttccgtttcttgaatgtgttcttgttttttttgaagtgtttgaattttctaaaagtccgacatgaactttgaatgcttgcgaattgcacagagaacgaaaacaaagagagagcattaattagggaagaagatgaagaagagaaatgggagtttgcaagaaaacaattaatgggttttgttttgtcttcctccattaatgcgccgaatgctctgctctgcttcccactcttcatcattaatggttttgctctgtaacgtcggttccaacaaataaacttaataattcgaaattataaatttcacaagttacatttttctttgtgtaaagattttggaccatataaacattatggtttgcgagaatgacgtttgtgtcattatccgatttagatccgtataatctatgttgttaggaactcaggattttgctcaaatattcaaattggtatattttgactttgatgaaattattttggtcagaccacgagacttgattgcttctcaattatttgggccggtccattaatttggggccatctaacttttacgtgggccgtaacaaaccgaaacataaaactagtgacctacctaaccatattaccccaaccggacaggaggtaacgagttaaccagccacttgttcggcttggaaatttttttaatcgtctgacaatttatgacgtggatccaagtagcaagaaagctaacatgttgttggatctgatctgatccacgaacctaccataaatcaattttctcattatcttgacaggtatatcttgcattattatacgtcagattttcgtggatacaatatttttaaaatgcaatccatatttacttgatttccaaaaatgggttttttcaaaagcacaatttccaaaaatggatcacaatttattaacggattctcaacttgcaaatcaagcttaaattataatcttttttaactcagaatttaatataatctttttttactcagaattgattaaactaacagttatattgatcttgaaatcacctttaatatcttgttttaaatcttgtgtcttgcaaatcacggttcataaatattggagaatcgaataaataaattatttctattcctatattgcgtaattttattttttgactctctattgcgtaattacactcgtcagatttcgtggatgagtactcagtaaatcttattttaattaaaaagcttactagtctaattgctgcaaatttgaccaactatacagttgtgttgcattacaatatttcaaaccattaataaaacgtgtaaaacatatttggagttgaatgaaactacattttcctttatgtcaaacgcacttttcaagatatatctcgaacaatttacgtattattttcacaaattttgttccacaataatttaggttattttggtttttgttgttgttttttgagtctgaaatttcaaatttgtatttttttttaatatatatttaggcaggaatctttaaaatgaaaccaataatatattcactaagtttggaaaaaaaccaaaatttcataattaacgggacaatgactaagctgtggaaaagataacataatctcccaatgactcaatgccacgtataagatgagaaccgtactcttctgtgttcgtaccagatccctcaaaaggcgggaagaaaccatcaagaaaggcacattgctgacgtggaatggaatattcgaacacgcatatccagctccttcctcctttttcctcatatcccttttttctcaatataaatactctgcaaaaaaacacccacaaatcctcacacaaaaacgttttcgaaatccctaatctactctctcttctctatatctctactcttgagaaatg

SEQ ID NO: 32749 - DNA, 661 bp, Unknown; identical to SEQ ID NO: 1135
  misc_feature (1)..( 661): 2750-1469P.txt file - cDNA_ID_3060879; gDNA_ID_1620363; Annot_ID_154713

SEQ ID NO: 32750 - DNA, 3000 bp, Unknown; identical to SEQ ID NO: 1151
  misc_feature (1)..( 3000): 2750-1469P.txt file - cDNA_ID_3060888; gDNA_ID_1620364; Annot_ID_154755

SEQ ID NO: 32751 - DNA, 3003 bp, Unknown
  misc_feature (1)..( 3003): 2750-1469P.txt file - cDNA_ID_3060920; gDNA_ID_1620365; Annot_ID_154819
ttttcttcttctaatttaggctactgatattgtccatatatctcactgtggcatctctattaacgtggtcatttgtacctcgttttctgaagctaatgattcaattatcatctcaagtacgttttagacgtcatatcttcatatacactacttgtctatctttatttctttcttaaagtgggatccaaattattgccaatgtctctcattatataatgcagacaaatgaactttaccagttagctgctgtggcattctgcttactatctgcatgggtaagtctaattctgtcatttctttgcatactggtgcttgcttagctttctgatcccttttggtgtattataacatctgagttaattgttacctgagcttgcatcttactaatagactacagaagaaaaaaatgatgattacaatagacactgaagtatttaagtataatagcatattgatgtaatttccaatttttaacttagagtgttggttcctcgcaaaactttttcagtgcagtgacaagctgggtcttagtcttgagttgggatcatttgtggctggcgttatgttgtctacgactgaatttgctcaacatacactagagcaggtattgattctaaactcaggtcgcttttgctttgcgagtacgtggtacaaaatgaagtcttaaggtggtggaatctcccttactttgtgatgtaggtggaaccaattcgtaatctgtttgccgctctctttctatctagtatcgggatgctcattaatgttcactttctatggaaccacgtggatatccttctagcgtcggtgattctagtgatagttattaagacagcaattgcagcagtagttgttaaggcttttaggtacaacatgaggatatctttccatgtgagtttggtctctctacttaagcttttgtgagtttctacatattatactattaaaaccaatcacgtaaatttcttgtcacaaatgttatatataggtcggggtactgcttgctcagattggagagttcgcctttgttcttctaagccgagcgtcaaacctacacgtaatcgaggtaacacccttttacccttgtagttgaacacactctttaccattttcttcttcctaaactttgtggctttgggattaatatgaatgaccaatgtaggggaaaatgtatctactccttttgggcacaactgctctaagtctcgtaagttacctaatatatgcaaacaagccttttccattctaagagaacatacttaaaataatatttagttcaaaactgattacctgaaaatgctgttacaggtaacgactccgttgctattcaagttaataccgagtgcaatgaacctcggtgtcctgcttcgatggttcccttctgagaacagttctccgaacgaggtcattctcttttccagatctatttatatttaagaactgagataagacatgacataaaaatgaaaatagatgtattgattataggaaactgacttgtgaggtcgtgactgagagttttgtttgtagagtttgcaggagaaagcatcattgatagaagtacataacagaaccaagtgatctctcttttgtacattgactgaagatttaagaagaaaaaacagattttgatccgatatactcaactaggaggcagaaaaaacatttgaaactgaccaaatcagatccaagacttgctttttgtattttcttaactctttattttttgtaatatcgtatatatttagtattcactaccttcttgtgtagttcaagcgcttatagcttgttttacttggtgtaaacgttgtaacgatattagccttatatgctgttgtttctttaatgttcatcacaaataagaatctcaatagaaaccacagagttctataattgtgtgctcaaactccacatatctaaagtgcgagcaacaactagatgaatttagaggtataaatccattgcaatgcacaacaaaaataacaaaaaagaaccctccttagaagaacaatgacatcaaagtatagaaaaggattgaggtggaatgaagtaagaggctggtgaaataggaatttagtagcacatatatgaggacacgtggagcttagtgattggttgaaataagaaaagatacgtggattcgattggtatgagctgaagttgctcaagcttaagatcaagttgttcatcgtcttcttcattatgcaaaaatctgagaattgtaaacttttcttcttcttcctttcttgtgtgtttggggttgttactcattgttagtttgagatacttccttcaattcactaatattatttatttacgggcaaatcttaatgtgagatttttgcatagtgagaagtgaatctgcgttttatgaacatcgtttcaatctatagttcgatttcatttgtgagattgttgagtttcctgtatcagctggttaaatagcaaatctaccattcttatcaccattacggagattgaattttccggagtcatggctttccacgtagtagatgaagtttggggataggccatacaagcaaacttggagacggaaatatatacaaatagaaaaacaaaataattaagattagttttgcacaaactttgcaaaaacatcaaaataggtccgacatttaaatcacttgcttaggtctataaaataacactcccatcattcaacatatttttcctcttgtgggttagacctacaaatccgtggataaaactctttaaaaacctgtaatctgtaacatattggcttattatccatcacgcatgctattttatggacatgaaaataatgtccaagcggaccaagcccgctctgcatggtattatttgggccgaggcccgttttactcatcagttttcattaccggtcaaaactcaaaagtcaaaattttctaaaagacgaaaaagccctttaatttgatttcccaatactttttactcctaccttctcaattcgtccgatttcttcacaaattcacgagagagataatg

SEQ ID NO: 32752 - DNA, 3003 bp, Unknown
  misc_feature (1)..( 3003): 2750-1469P.txt file - cDNA_ID_3060924; gDNA_ID_1620365; Annot_ID_154818
atttatgaatttatggaaccaagttctggggattcacaacatgacaaaaccgaatctgtcggaatcgtttactaagggaatctgtcggaatactaggctatcggggaccaaaattcttacctggagaaggagaacctaacatacttttgctagattgtcccattgatgtctctgctgctaggattcgagagggagtggattactatggaagcttttgtagacagcttcgttcgtattctgttttttttggatgggcttttgcgagcccagatccgtgaatgttgttggtgttggatttcttcactcctccgaaatcggcccattattatgtttaaggcccaataaatttggaaaattcattagattgagttttgactaacaaaaaaatttgatctaaaccaaatcctagttaatacggtttagtaactcgtttagggaaaatcagctactgtatatcttggctttggccggtttagtaaactaacttttgactttctacttacttaaccaaactaaacctaaatcggggaattcaaactataccataaatatggaggccggaaaaaaatcatccaaaacttggtcaacgctgagtccaacgtggccatcagccttcggcgaatgattattcgagaaagaggaaaaagtgagtcgttttaggggaaactgttaccaacgccgaaaaacaaatgctttaactcatcaccggaacaaatctgactcaacttggtttgttacttacctgggcggtgttcacggtgaataaaactagtaaaagtagtaactagttatgaggttacgattaaaaaactctttttgggacacaaaacaaatttatttactcaactatatcgaaactgactaatgtgggttacaataatatagattttatagatcagtgttgagaaatgatcagcataacccttgtcgatcgtgtttagaatgcgaacaagtatgttaagatacaaagaagaatataatagcatcaatgatttacgtaccatggtggcaaaatattcttgtgaatatataatggaataataattatatgaatacttgatccaaacaacacaacatacgaatttggtgtcaaagatatgagatggatatttctatatgcgataaatttgtaaaatctaaaagttgtcgattaaatttacgactttgttaattttaatgcatttttggataaaaatatattcaaaaattagaagaccaaacaaggatcgctaaggaaattttgaatatttttcctttattataagcttcatttcactagataattttcttattattcaattagacgagtatcaatacatcacacacaaacaacaagaaaaaaaacaaaaagaactactgtttcttgagaagaagagggccaacgttatctccattagctttgttgtgcttcacatgactcccatcacacaatggaaacgtccccgacctccaacacctaaagtcaaatcaaatccatgcatgaccatgattttatatacatgcacaaaaatacttattcgtacatttgttcgtttgtaaaaagactactaattaagaaaaatcttacgagcagaagctttggcaaaacatatggattagtatgaagatacattaatgtataaatcactactatgcatgattttaattaaaacatgattcaaatagtagctaactatgttcttttctttcctaattaataagagaatgtgaacctgcaatagggagttatgttcttggaaagctcggtgacaacgacggagtcaacaaccttatcttcgttctttctgatctccggattgatacctccaccgccttctgctctcaccaccaccattctctgctgctttcgtcccacctctcccccggtgactggcttgaatggaagctccccggcgtaacttagccccgtgccgaacgtgcttgcgatgatagccattggaataactctctcttactcactctctatgtggcagtgatttgtttatgaagtaagacagaagatattagatatatgaaaggtaaagggagagagagagcttgtggccatcacgctccctctgctaaacgacgtcgtaaagcgtgtgtatgagatggaagaatcaaaagatatggtcacaaactcacatgagatttaatcacaaaaatatgaaaaatcagctgcaaaatttattttttacttacatttagaatttacaactttttaatgttcttatattatattgattcaaattaatacacatagaaaattgtgtataacattattttaaagatgaaaaacactatttttaagatgaaagaatacacatatatactgtatatcttttctaatttttgttctcaaattcgtctaactaagtaaactattatgagaaatagttccatacataaaaaatttgcaaaagaattcgttgcaaattttaaaatagtaattttgaagtatttgcaaaggatttggtcataggctaaccttaactcttttttttctaggttgttatttaaaattttgaaaatggtatatattcacgatggtaaaattttttcaatagatgaaaattccaagaggatgtgttaatagatcaaatgtataaatatttttgagtatttctctgcacataatttcaaaactgagaacctaaaagtgaaacgcatgacgagaattcgagtcgaagtgtcgaaccaaagcttgtatatattgccctagctgtggaattgcttcaaaaatgagtgtcgtgcaaaacggactagttctcttctctctcacgacgagactttaataagaacccaaaacaagttcgcattgacacgtactacactaattaaacaacaactattaacaaccattcaacacaaaaactctttcccattgattcaatttcaaaattttggatctaataaaaccaaaactctcattaaaaaaaaaaataaaaaaatcaaatctgatttctgaaacgtttttgattcgcgacgattcccaaattcctgggaaaatatctctgatcgatg

SEQ ID NO: 32753 - DNA, 3003 bp, Unknown
  misc_feature (1)..( 3003): 2750-1469P.txt file - cDNA_ID_3060940; gDNA_ID_1620366; Annot_ID_154852
tttactgcggcaacgaaggtgatattgaatggtttgctacaaactctggattcatttgggatatcgctcccaagttcggtgccttgcttgttttccccgaggttcgttggtgttgttttatttttcctgttggaaattggaaaaagaagaagcaatttgttactgattttagggatttggtatagcataggtattatggagagtctatgccttatggaagcagggaagaagcttacaagaacgctaccactttatcatatctcactactgagcaagctcttgctgattttgctgtttttgtcactgatttgaaacgcaacttgtctgcggaagcttgcccagttgtgttgtttggtggatcatatggtggaagtaagtgagcaacttttgtgttagtggaattctttttaaatgagattgtggagtaattgtgtttttgtgtttgttgttattgatgcaacagtgttagcagcatggatgaggctcaagtatcctcacattgcaataggagctttagcttcctcagctccaattcttcagtttgaagatgttgtacctcctgagacgttctatgacattgcatcaaatgatttcaaggtaatacatacttttgcttcccttagtcgattgactttatcttgtctttctttaatcatatagggaccgtgtttttgtttgtagcgtgagagtagcagctgcttcaataccattaaggactcgtgggatgcaataatagcagagggtcagaaggaaaatggccttctgcagttgacgaaaacttttcacttttgccggtaaacaaataaattggagttagtgtgcgcttgttaagtgtattgattagtaatagttcaatggattgtttctcgatttgcagggtgttgaacagtactgatgacctttcagactggctggactctgcctatagttatttggcaatggtggattatccgtatcctgctgacttcatgatgcctttgcctggacatcccattagagaggtatatttgggaagtaacactttatgagtttatacgaatattgtagaagaaatctgagaatgcattcgctagatcatttggattttcatctttacatcaacgatccggggaggctatgctttaaagatttgcttgttgcgtcaggctattgttcaaccacgtccgttaaagtctttgttcaatgtggtgtatctttctataggtctgcagaaaaattgacggtgctggtagtaatgctagcatcctagatcgcatatatgcagggataagtgtgtactacaactatactggaaatgttgactgcttcaagttggatgatgaccctcatgggttggatggatggaattggcaggtatgaaaaagtcaactgctttgtttatctttcctttttctgataatatttcagtgacgccattattcactttcaccatccgtttacaataggcatgcacggagatggtaatgcccatgtctagcaaccaagaaaacagcatgtttccaggttatggttttaattactcttcatacaaagaggaatgctggaatacattccgagttaatccaagacccaaatgggtcacaacagagttcggtggacatgtaagacatcttttgataaactcaagattctttcaatgctgtgttctgaatctttactatgtctctgtaatgtaaaaggatatagcgaccaccttgaagtcatttggaagtaacatcattttctcaaatggtctgttagatccttggagtggtggcaggtaagaatattgttccctttactcaaatcccaagagctattttacaaaacgaatctcgtaatcgtgacaaatgcttgagtttgactcgtaatatgcagtgttctcaagaacttatctgataccattgttgctctcgtcacaaaagaaggtataactaaaagcctcatcaatctctctcgtaactaatctgttttttttttttttttttttttcatttgcatagacttaaaaacgtttgatcatagtagcagtagtctacattttattgacttgatgaattatttttggtatatctatcttacaacatcatgatcataatcataatcatcatctattctctttgaaactcacaaactaagttgattctggctttttcttctttttttctcaggtgcacatcacttggatctacgaccttcaacaccagaagacccgaaatggcttgtggaccagcgggaagccgagatacggttgattcaaggatggatcgaaacttatcgagtagaaaaagaagctaaggtttctctgttaaaacgttcttggtaagagaacaatgaaaagaatcgtctcagtgtgtaactcggaatctgcaaactttgtattgcgaacacatgctttgaataaatccatgtaactatgtaaactctcaatgatcactaatcttttctactagcttaactttttcgtttttgggtaattatatatgaatacacgcaaacaaaagaagtacagaataagatttatgagtctggctgatacacccaaacacatctgtcaaggatcttaaagaatcatatcttctaaatattaattttcatcacattgtgtttttatggcagaagaaagtatgaaacatttaatggttatgagtagaaaatctaaaatttaattaccatacagtcgtgactcttgagaaaatcggaaattttaattaccatatataatcacctcgtttaaactaaattgaaaattttggtattggccgctaaaaacgaggaggaaaaggcataaaacgccgtcgtttgggcattttgactggtcgaataaaaactcttttgactaaaacgtcgacctaaaaaaagaagagagagactagacctctctacaacgcactgtcacagaactcttctttgttgtgcgagagagaaatagaaaaagtgaagagacaagcaccgtgcttttgatcggagatcggaggaatttaggttcgattctccgtaattgtgatattgggagagactatg

SEQ ID NO: 32754 - DNA, 3000 bp, Unknown
  misc_feature (1)..( 3000): 2750-1469P.txt file - cDNA_ID_3060940; gDNA_ID_1620680; Annot_ID_164401
tttaactttcaatacaggaactaattcagaacgtcttagcgaatcaagaagttatcctgaggaaaagaaaatctgatgtggaagctgaattggaatgtaagagcaaatcggtggaagttgaaattgagagcaagagacgggcttgggaattaagggaggttgatatcaagcagagggaagacctagttggtgaaaaagaacatgacttggaagttcaatcaagagcattggcagagaaagaaaaagatataacagagaagtcttttaaccttgatgagaaagagaagaatttggttgctacagaggaagatattaaccgtaagactactatgctggaggatgagaaggaacggcttagaaaattggacctggagctgcagcagtctttgacgtcattagaagacaagagaaaacgggttgattctgcaacacaaaaacttgaagccttgaagagtgagacaagcgaattatctactctggagatgaaacttaaggaggaattagatgatttgagggcccaaaagcttgaaatgctggctgaagctgatagattgaaggtggagaaagctaaatttgaggctgagtgggaacacattgatgtgaaaagggaagagttaagaaaagaagcagagtatataactcggcaaagagaggctttttcaatgtatctcaaggacgagcgtgataacatcaaagaggaaagagatgcattgagaaatcagcacaaaaacgatgtggagtcgctaaaccgagagcgtgaagaattcatgaataagatggtggaggaacattctgaatggcttagcaagatacagcgtgagcgtgctgacttcttgttgggcattgagatgcagaaacgagagttggagtattgcatcgaaaacaaacgagaagaattggaaaattcttcaagggatagagaaaaggcttttgagcaagagaagaagttagaagaggagcgtatacagtcgcttaaggaaatggcagagaaagagttagaacatgtccaagtggaactaaagaggttggatgctgagaggttggagatcaaattggatcgtgaaagaagagagagggagtgggcagagttaaaggattcggttgaggagctaaaggtgcaacgagaaaaactagagacgcaaaggcatatgcttcgtgctgaaagagatgaaatccgacatgagattgaagaactgaagaaattagagaatctgaaagttgcattagatgatatgtccatggctaaaatgcagctgtccaatttagagcgtagctgggaaaaggtttctgctttgaagcagaaggttgtgtctcgggatgatgaacttgacctgcaaaatggagtcagcactgtgagtaatagcgaagatggctacaactcttcaatggaaagacagaacggcttaaccccttcatctgccactccattttcatggataaaacgatgtactaatctgattttcaagacttctccagagaaatccaccctaatgcatcattatgaagaagaaggaggagtgccttcagaaaagttgaagctagaatcgtcgagaagagaagaaaaggcttacactgagggactgtctattgcggttgaaagacttgaagcaggaaggaaaagaagaggtaacacatctggagatgagactagcgaaccaagcaataacaaaaagaggaaacatgatgttacccaaaaatattctgatgaagctgatacccagaggtaaagtctgatcattcaatattaaattttacacatttgttttcttgtttttacatcaattttaaaatctgaatcttacatcttctttttctcagtgtcatatcaagcccgcaaaatgtgcctgaggacaaacatgaactaccatcaagccaaacccagacgccaagtggtatggtagtcatcagtgaaaccgttaagatcacaagagtaacgtgtgagacagaggtgaccaacaaagtcacaacccttgactgctcagaaagtccttcggaagcagggagaaagatgggagaggagacagaagatggtgattgcaatcaggtagttttcatgaactctttaaagaagaattgcctgcaaactttacaacagatgaataataccctttggctatttctgtagactgggataaacgcgtctgaaacagtgattcataatgaagctgcaacagaagatatatcacataaggtacgtctcagtcttcaccagataactaacccccacatatgttgtcaaagtcactaacaagagtagttgtttcttgtctgttgatgcagaaactctatgaatccttttgggcttggtttctagagaagataagggtatgtaaatggatttgattgattttaaaactcgatcggtcgatgtgataatcatagtcagttttttttttttcttccagatttcgagtgagtagtgttggttagttaaggtagggtagggaaaaatcgttggcttctagtgtgttgcagtgtgtgtatttgagaatatatgatttgtgagactaaaaagccgaaatcattatcggggtttattgtttcttctacttgtaatgatgttgatgattgatgtcttttagctcatcggttagtaagtgtcaacagcaagagtgttcggctggactaccgtggcccattctgtagatttctttctagcccggcccacaacttccattgggctagatatgtttttctcacgtaaaagatatctgactgtcgatattgaagtaacttcttaaaacatttagatttaattgataatttaaatgtcacttttggttttttagatgacgattaaaatccttttcataacccaaaatattagttttgccgatattagaaatccgaagaaaatgacagaaaataggattaatcaatttagggtttaataaaaaatagtgagtgagagagaggctacagtgctccacattgacatcaacaaggttgaagaagaacaacatcattcaacatcagcatcacgaatattttcgagtcatg

SEQ ID NO: 32755 - DNA, 3003 bp, Unknown
  misc_feature (1)..( 3003): 2750-1469P.txt file - cDNA_ID_3060955; gDNA_ID_1620366; Annot_ID_154836
aatgcgtctcattcggatgatagtttaaggagtttggaggttgagctaaatgaacttagccggattaaaccgagaaatagtatattaaaccgaactgaagataaaccggagcagcttacccctacttcggcttggagagccgccgagaaattagctaaagtggctattatgaggaagcatttaaatcgagtcagcgatatgcacggcttggaaaacgccagattttaattttaatttccctttttttcgaaaattcgatttcaatgatttttgaatatataatggtacataatttatataaggaggataagcaataatttagtaaggtataaataatagaagtatgattattcagaaaaagacccacataggtgcatgatagcgacaagcagtagccgacgggtgtggccttttgtattgcagagagattgagaccctacattagaaggaattaattggtcttttagcatttttatcttcttcttcctttttgtaatcttcaaaaactccaaattaatgactgaatagttaaaaaaagttgtagatcaaataaatgaagtctgctttttttgtgtactatatagaattaaaagttgaggtatagtggattagagagtgtgcttgtaatgctggacttcaaaatcaaaagttaagtttatattatcatatgccgtttaacttaagaggatctataatatattatatctttccaaatgaatgatcatgattagtcatgtgatcatcattatagcctattttgttatagaaggcaccgggtttgaatgatttgaatagtgcgtggggattgtctttgttggttgttggtgaatggtttggtgggtgcaccgtggtagaaaccaggtcatgcgccgttgcaaagctttcttctcgcttaaattcattcattttatatcattaagacatttactaattatatgtagctagcgccaagttgcaatttgttttgaatgcaatgattttgtatacttttaaaatggatgaaatgattaactattgtcaaaggtccacttctcgatgtgattcactaaaatgatcagtggcagaagaatctcgaactatatatatggtcaaatcataactaaaaaaactaagctattattttttcacaaaaaaaaaaactaagctatcattcatcacgcagttacatattgcatatggacaatgttaatgtcaactaatgaaagggaaagaatctcgaactatatatggtcaaacggtttgacgcaccatacttaaaaaaatactaatcaaggtgcattacattcattgatgttacaattacttgtactaatgaactctgtgaaaatcagaataacccggtataacacactatttggagttataatggctgatccaacttttgggagattttgtcacagttgggctacagtttgtgcaatcggcaactgtaaagcccattgagaattccaaaaataatgtaaaccaattaataaagcatttacctttggcgcctgggacgaaaataagataccgaaaacaacctttactctacaaacataggtccatgtaaaataggcttaggcccaaataatgtaactctaaaacaaatctatgaatctattaatcaccaaagttatcttttacataatgtaatgggttatttaaggagagatttaataatttcgaaaatgtttggtcaactccgaaaaggtgaacgtgttaattaaaaagtcctggtactgcggcagagagagagattagcccatatgacgtggttgtgatgtgtccgaaagctgtcaacattgaaaatcaacggtccagatcagtatactgacacttggctttgtaaatttgttaattttcttctctggtcaaaagtgaaagtgttaattataattaaattttatctagttttcaagtaaccatccatttagtacagccaagattggattatctttaagtttttaagttattctaacagtctttattgatgactttgtatttgcaagagttgcaaccaccaatatcttctattacatatttacatcaaattcagagtatatgtcatccatacaaaataatacattatcgtaataaccacacaaactccgttaatccatttgttttcattggcggtggactattttaaagaagaaaaatatatttatttttttgtcagaaagtaaaatattataatggtgttgaaactgttaacaccattataatatatatataaaatctaagtcaaactactgtggggaaatttgattaggaaaacaaaaaacgtgctttaaaaactatgtttgtacgctgtacggataagatatttggaaacgacacactatatttataatccaaacatattttaaaagaattaccggactgtattagttgaaatgttattggaactgtttcttaattacatatattaaaagtattaccggactgtataatctgtattatttgaaatgttattggaattgtttcttaattacaaacgtgaagacatgaatacgacgacaagtattatacaaagttatccacacccatgtgcacgtaaagtatgcttaataagatttccaaatctatctataatcaacgtaatgtctagtcacctaattatcacaatagtggacaaatagttgcattatctacaaaatcaagattatactctctatatgagtataacgtgagtgtcatcatttaattatagaaaaaacacgattatgcaggctaattaaaacgcgttaattactgagtcaatgaacctataaaaccggcttatgctacccctcccaatctcatcacaaccattagtctctctttcagacaattttggttctttttcttttgtatttatacattcttaatcttctacaaaacaaaagaagaaagacacatttcggtactaacattgttcttcatacctctctttaaattcatatacgtgtatatactttgtttatacgtgtgtttgtgttaattgtgttgtttaatcttaatcccaagttagtagaaatg

SEQ ID NO: 32756 - DNA, 3000 bp, Unknown; identical to SEQ ID NO: 1172
  misc_feature (1)..( 3000): 2750-1469P.txt file - cDNA_ID_3060984; gDNA_ID_1620367; Annot_ID_154880

SEQ ID NO: 32757 - DNA, 3000 bp, Unknown; identical to SEQ ID NO: 1175
  misc_feature (1)..( 3000): 2750-1469P.txt file - cDNA_ID_3060988; gDNA_ID_1620367; Annot_ID_154871

SEQ ID NO: 32758 - DNA, 3000 bp, Unknown; identical to SEQ ID NO: 1176
  misc_feature (1)..( 3000): 2750-1469P.txt file - cDNA_ID_3060992; gDNA_ID_1620367; Annot_ID_154869

SEQ ID NO: 32759 - DNA, 3003 bp, Unknown
  misc_feature (1)..( 3003): 2750-1469P.txt file - cDNA_ID_3060996; gDNA_ID_1620367; Annot_ID_154863
cgataatgccccacatgatcaggtagttgcttctggaatgtatctgttctctcaatccatggctttagataaaggatggtaattaattgtctataggaaggaagctgattattcacattggcacttttgtttttgtttaacccagaaatcagcgtggcttgctgtattctacatgtgcattccgacaggctatgcttttggctacgtatatggtggagtggtgagttactttttgttattcgttttgtctatgtcatgagattctgattacatggttctgttttaccccacttccagtgacctcaattccctccttctgttttcttgtaggtggggagtgtccttccttggcgtgcagcattttggggagaagcaatacttatgcttccttttgctgttctaggttttgtcatcaaacccttgcatctgaaaggtgcgtgtctgaagttgcaaacacacacatcctatgttcctgatggagttcagctatttctaataaatcttgtatcttcaggttttgctccagatgatacaggaaagccccggacagataacttaaacgttttgccagttggttatgggttctcagctgttatgaaagatttgaaattgcttttggtagataaggtttatgttacaaacattcttggtaaccattttcccttgtcatgtattaaaaagcatctgtgttcttgtatgatttattgattacctgcaactgttttccttcttttctcagggtatattgcttacaactttgttttaggcgcctattcatattggggaccaaaggctggttataacatatacaagatggtaaaatattaccagagcgtttcgtttccatgtgtagaacagtagaagtatatctcttgatgcctttatcccattgcaggaaaacgctgatatgatatttggaggggtcacagttgtatgcggaattgttggcacattatcaggaggagtgattctagattacatggatgccacaatttcaaatgcttttaaggtaagatcatcaacttggaagacaaattatccgcacatggatggaaattttacattccaaacatatattcctaccacttatgatcttggaaaactagtacttgatcgcctctttctgtattttgcaggttctttcagtttcaacgtttataggagcaatattttgctttgctgctttctgtttcaagagcatgtatgcatttttagctctttttgctgttggtgaacttcttgtctttgccacacaggtaatctcgacttccaccattcatatacttcatgttttgcaaatccacctcttctgatttatttcatgatgtttagggtcctgtgaatttcatagttctccattgtgtcaaaccaagtctgagaccacttgcaatggcgatgtctactgtctctatccatatctttggagatgtaccttcctcaccactcgttggagttcttcaggtttggtttctcagctgtatccacaaaattcttgattcagagctctaatgtcttaatcaaattaagcttcagttaaacgcgattattcatctagattagtttgagccatcactgtatccaacttcagaatgttttctcatttactcacgcaggactacgtgaacaattggagagtgacttctcttgttcttacattcgttctctttccagctgctgcaatttggtccataggttaggcttttagccacaccgggatctcaaagttcaaatggttctttttttagtataatgtggtaatgatttgttgtgtttgtgactctacagggattttcctgaatagtgtggatcgatataacgaagattccgagcctgatgcagtaaccagagaatcaaccgctgcgcctcttctccaggaagcatgagacaaaaaaactcaaaaggtcactgtgagaattttatggtttattctcagttctttatctactttcttgtacaaatagaattgtggctgaaacataaacaaatgtcaaattaccttcatttgtatattcttgtttcactgtttgcaaaattatgaaaggaccatccctatttctctacagaaaaaataacttaatagtccattacgacatgaatctcggttctttgagatcataccgggaaatgtttttcaacatcatcattcacaagatagagcttaaggagcatccaaagaaatcgcaacaatcttccaatctagctctccttcatcaatcatagccaaaagcagctaaaggcttaacctttagaacgtcaccaatctcaacaacatcaactacaaataaaaaacacgaatccatattaagctacgctctgagaatgaaacccataaagaagccaaaatcattttacctacctggatcattatctccaaaagcaccatcaaccttagagtttgatcttcccatgtttgtggaaacaatccatagttccagcttatgttgtaactgtacatataaccaaaaaacaagaaaatattatagctactcaataacatgttatatttttgatgttacatgcaaaggtttcgtggtgtagttggttatcacgtcagtctaacacactgaaggtctccggttcgaacccgggcgaagccattgtcaatacttttattttaacgtaatttttacttagcttcacgacgtcgtttacataaaaccgttttcatgtgactcaacaccacgtcacacatcgtttattctcgcgccacatcagtctctacattcttattggctaatactctccacgtcatcatctcttcccgtgaaaacccgccatttaaaaagactccagaaccatccacaaccttcttattccgtcttaacaacaacaaaagaaaaaacactgatccaaatttgggtccttctaattttgcgcaatcaaataccttcaaagcctcaaatttcgttcgttctttgtgataattctctcgcagctttgcaatatataaatctcgagggtttactcttttaaggcctggttttttttggtcaatccaagatg

SEQ ID NO: 32760 - DNA, 117 bp, Unknown; identical to SEQ ID NO: 1168
  misc_feature (1)..( 117): 2750-1469P.txt file - cDNA_ID_3061003; gDNA_ID_1620367; Annot_ID_154861

SEQ ID NO: 32761 - DNA, 3003 bp, Unknown
  misc_feature (1)..( 3003): 2750-1469P.txt file - cDNA_ID_3061044; gDNA_ID_1620369; Annot_ID_154954
ttgtcacatttttaatctggacttatctatataccaatttgataatttcttctgctgtgttctttgtgacagccattcctagaattcaatgaaggaaggaattcagagaccattcaggtcactgttgagtgagttctgaccctaaatccctaatactagcctcatatttgattttcaagaagcttaagaagaaattgttttggcatctaacaattaagcacacatatatgctagtggtcgagaagcatcttataatggaggagggaacgtcagtttcagaggaaaactaaagagaaatgcacatttcacagcaagactattcaaacctcagcttcagctctctgctgccccaatctcaatcttcttttctgtaagttaacgcataagatttgagctcctcctcatctttacaaagtttcaatctttaagttttactcatcatgtaagtctttggactggtgcaggtgaagtcagataaaagatccgagctaagcattctgctccatttttcatctccttcacaagagaaaaagtccatgcttatggtgccaaatgaatctatcaacagatttggcgacatgttcctgccatgtcttctcacatcaaaacagaccacatccggttggacagtacacgaaacaaaccttgttttagatgggcacacactgactgagatatctgccttctgctccagaccagatgatctcacagaagaaacaaacacactagagtattttgcattgcttggacatatctccatcaagagccagcaaaaagccaaggtttatcctctggcgtcatcatgggttatagaggctcatcacgtaaagtttgtaccgggtgattctggctccaagaccttaagttgtaagctagaatggagattgaagcaccctgaagaagattctgtctttccaaagtacaatgtatatgcagagaatctgagttcgagtgagtatagaccaaggaaggttatggaagaaccaagaagcgagaaagtgtttcttggaacagctcatgttgatgcttattatgtctctgaaatggtcgttggatcagatgtgaagggagtccggttcgtggttcaaacctgtggtgaagatggttcatggcaggagttggatgcttcccctaaccttgtggttgaagtagagcgtgtgagttcaaagctttgttgttgtgggttgatttgaattatggttcatttccgaacctgcgatctaataagaccattgatggtttgtttagtcagttcaaggatatgaaccatacgataatgaattaatgattataaggttgataataataacaaaccttttcatgcacagattctttgccttgtggtatatgttggtccttatctgaaagattcaaaggacgacgactagtctcagtttcactctcaacttgttcattccactaaaaccgacaagtcaacacaatgaacataaagaacaaacaaaaatacacatccaatggaggaagaagaacaatttactgctccaaatgaaacataacaaacgagcttagctttctagttttagtaaaagttctgggcaacaaagtaaaaacagagcaggacaaccaaaaaattcataccagaactatagattcgatgataacaaagacgattaacaatgattaaggtttatacatattttagcactcaccagttgaaatctgaaagcgtgaatctagtttttgcctaaggagaggaaaagtaaataataacatagctagcaacatgtctactatttcattttttttttgcgtttctaaaccaatcagaaggctctatttcgtacccactcgcagaaagagcgcgttgagcgagtgagagcgattctgtgggtaaacccctttccaattcatgcctttttgtatcgacgcatttctctccaaattctctatcgcgtgactttttttgtttttttctcaaaaccaattgctaaccggaccaaaatcatttttaatttcaaaaccaaagtaaaccaaaccgaaatcaatttcaatttgcaattctggacaaaaatttctggcagtttgcatgatttcttaacaacttaactcaaaatcacaaactatgaaccgatagaaaaatttacaaaatcacagtaatctttgatcattacaagaagtgtaggaaaggattaaacttttaaattccaaaaatctcagaatcaaggcaaagaagattcctgaagatttttacttccatgacatccaatagaggaagaagaacaaaccattgattcaattaaaacattgcaaacgactgaacgagcttagacttactagttttagtaaattccttggcaacaaagtcaaaacagacatggacaaaaaaaaaaaccaaaaaaagaactgtagattcgataagaacaagcaagatttgtaataattaaggttcataaagattagactcatctgaaagcatgaatcttcgtgttcgccttttagttctaacttacaatttccttcttttatgttctttggtgtgaggtcgaagaaaggagagaaatgactatgagtgagtggtcacgattcgaaatacttctcgatgaacttttcccaagttaaaataatggggtaaactaagaatatttcgattattaagaggttgaagttgtaaattaatttacgacatattaccaaaaatacacagctcattaagttaagctaatctcaacattttaatctctttatttgaatcaattagtttcataacctttttagtaatttcagtacttttattttgtagattaaacggtatcgttagcaagccaactacaaaaacggtgtcgtactagaatgggccgtgagaatgtgagcgactcggcgagattgaagattatacgacgtcgactatttttaacgacagaatcgtaccaattttgaaaaccctaaatctcaatcctcgacgctctctactaagaaactcaatcttactttctctgtaattcgtagcttccgaaatcttttctcaagaatctcataaccatg

SEQ ID NO: 32762 - DNA, 3003 bp, Unknown
  misc_feature (1)..( 3003): 2750-1469P.txt file - cDNA_ID_3061048; gDNA_ID_1620369; Annot_ID_154953
tgatattatggaacgaatggagattctggattttcgaaatcttgaggtacttttcttcaatcaaggatttgttttaagatagatgttgttgaatctatagcttggtgtggttatgttgtctaaacaacttaaaagtttagtttttttacttaaactgaatcgttttgcgtatgtagattcttattctagatgaggcagataggcttttggagatggggttccaaaggcaggtgaattacattatctcacgcttgccaaagcagaggaggactggcctcttttcagctacacaaacagagggcgttgaagagctcgccaaggctgggcttaggaaccctgtgagagttgaagttcgagctaagtcgaagtcggaatcatcccagcaattgacaaactcgaaaaccccttctggtcttcatcttgaggtagcataagttcaatatataattatgtaataatatgtttcagagtagttagttttcctgttgtatccttcgttatcatttagcattactgtgacctgatttacgaaggatttccttctaatttgtaagtatccagtagttatacgattctcttcgtagctctattgtattcccttctcttggtagcaagtttgttgtattgaaaatacctattgatcatatgtgttgcatatgtatatacttctttttagtagaaaccgatgttctatctttacatgtcctaccgatgcgtttcttagcggtttatttctccttgtctctacagtatatggaatgcgaagcagataaaaaatcatcacaactagttgatctcctcatcaagaacagtgataaaaagcttatagtgtaagtttaaatattccacacagacttatataaaatgaagcatccttataaatagtctaagtaacgctgcagattcttcatgacctgtgcttctgttgactactggggactcgtactttcaaaaattcctgccctgaagtccatatctttaattcctatccatggggatatgaagcaggtaaattactatgatagattttaattttccttatcacctcattacctattgctatttaaaggttttgatgaaatatacttaacacatcagaatgcaagagacaaggcattagcttcgtttactaaagcatcaagtggtgcccttctgtgcacagacgttgctgcacgtggacttgatattccaggcattgattatgttgttcaggtagattccaataatgttttgtttacattattatgacatctttgttgcaatatttaagattcagaggttcgaacatgttcatgcagtatgatcccccacaagacccaaatatgttcaaccacagggccggcagaactgcaagattaggaagacaagggagggccattgtgtttttactgcccaaggtttagctttgaccactttatgttctcttgtgcaccccatagttacatcagaaagcatgaaaagctgaaaagttcacttgcatatatgtgtaggaagaagcctatgtagagtttatgcgcataagaagagtccctttggaagagagaaaatgctctgaggacgcatccgatgtcatcccgattgtaagaaaacctccatatctctctctctctgttgcacacaagaagggtcgctctgtctatctgtgtgttaatcacattgtttattactacaatgtgttcagatacgttcagctgccatgaaggaccgagcagtgatggagaagggattaaaggcatttgtttcctttgtccgtgcttataaggagcatcactgctctttcattttcaggttcattcatgaggctcagtcatttttctgtttctcaaaattctttatcgctctatcagttttgtaattgaaaagtttttttttttgttttgggtcttaacttacagatggaaagaccttgagattggaaagttagccatgggatatggcctcttgtatcttccttcaatgtctgaagttaaacaacacagactttccagtgagggtttcacaccagttgaaggtgtcaagtttgaagaaataaaattcaagtaggtttttctaccataatccctaaacatttatgatatatatccgccttctcccattcccttagtttccgagacactaaaaatctgaaacttgatacattcaactcgtctacacgtacaatgaccatttttagatttagaggaaacaagcttttgtagtgtgaagtctttgtacatccgtgtcttcaggaatcatatgctttctgagttgacaagttggcatttctctaaacctgaatgttttgaatcaacgcagggacaaatatcgggagaaacaaagacagcaaaacttacaagtaaggaaagagaaacggcaagaagagaaaaaagagaaaggcaagagaaaaagggttgatgcttctgctagtaatgatcctaagaaagcgtcgagaaagttaacggggaaacaaagacaaactattcaaactgctgaagatgaagaagtgatggatcgagattataagttgatgataaaagtaaagaaagggttaattaaagaagatgaatatgaaagacttacaggagatgatgatttattctgatgagaagaaacaaaacctgcatgctgagattggactaagcttagtgtctttctactctcatatcatatgtgattctgttaatttttttttttttttttgggtgagaattaatatcggatcatgttatgtcctttttcgttctacgagtctcacttttatatatgtttcctaataaatttagcaaataaattgtgaatatatctatagagcaaattcgatcttcataggagagtgtgcacgcttgcacatgctagtaaatgccctccataataataaattaacgactatcaccatcactaaggtatttcatgacacaacaaaaataaaaacaaaaatctctctgtatcatcgtcttcttcgtcttttgccgttgacttgtttgaattttcgcaaatccgtctctatccaacgaagaagtcatg

SEQ ID NO: 32763 - DNA, 3003 bp, Unknown
  misc_feature (1)..( 3003): 2750-1469P.txt file - cDNA_ID_3061052; gDNA_ID_1620369; Annot_ID_154952
tagtgaagaaaaaccagtaagaaactagctaggttaccattaaggccaacatccaatcccttaatgacttttccagcatctgtatgtgtaacagcaagcacataagtatccaagtaccactcacacattaataaagctcttactttcgcatcaagttataataccaacctagacgaaacttataacgtgattttccaacggtggaatcgaaaatcttcccattcccctgaagctttccagtataatggacacttacctgcactcagagacaatagactgacctccaacaaatatttgcacacaaactacaacagtttaggactaaatgctcatacccttttgccaggctcagctttcttgccgttggggtttcccatgcataactcttcaacaatgaggccatctaggtcaggcgtttgcttctcaacactaatagaaaaggctttactctccactgtagcttcctcacttatcttctcattcttcttagcagattcagatggggacatggagctttcactcctgcaataatatcaaaagaaaaaagcatagaaatttataagatgggaaagaatttgaaagaaccatttacttgtgagctaataatatcgaataccaataacaaatgtactaactgatatatcccaaatgacatgactacttttgattaccccaaaaagaacaaagtacttaaggcagaagaatggactgaagtcaagtagccaaaggaaacctcaagctgacttctattcattgttttgaaaagagtatgccggaggatcttatatatgaaggaatttagttaaaaccatttcaataagaaaagctaaattttacagtaatatttgaattgtggttataggatacaaaagtgactggagaaggatagaaaagttaatttacctgctttttggaatggctgcatccatggcagaaggatcttggagaggaggaataggtttactgaaattgacgcggcggcgaatgaggcgtataggtatttccggtttggcagtcacccaatacagctaatttgcgtcctcgcatgtagctcccattaagttgagtcacggtatcagctacgtcttttccgtgaacaacagctctaactgagctgaaaaatgatcaacaaaatacacaagtctctagtcgttaaagagtaataattttaaataaattgaaagttgggtaacatgggagaaagaagcctcaaacctctctttgacaaaatggaggcgtatgatatttccatatggagagaaaagtttaaccaaagccctcgagatttgactcttcctaagcgaagtatcatatccttcaactcttacaataaccttactgcagtaataggatattgccggagatgataaacattattattatcaacaaatcttatttttttaagaaatcagtgtttactcgtttgcgtgtgccggatacggataagcctcaacagagacattccatcctcccacgttaacttgagctgatgagttggaaagaaatggaggaggaagaagccaccaaaacctgttgagaatcgtattagtctcatcaaattttaagggaatataaatctcccagatctctccacatgaagagaaatgttctgccaacgccgtgtagagatcatcaagcggaagaccagtgtcatatcccgtaaccttaatcctcccaacgtcactgcaataataataatactatcaacgtgacatctgaaaacatgcatcaccttacacataccaaattctcaatttacctcagttttggaatgttattccgtttcgctccctaaaaagtacaggagatcaaatcagaaacacttgcactgctaactaacttgcaagtacttttcttacaaacttgtgaagaaaccatcaattgagaaacaaagataagaaaccagagtgaatcagaaaagccataagagtagagtaccatggtggatgagaacatggctaaaatttgttcgacaagagcgagactcgataacccttttaacagatttaatttaggtctgaagagggcatttatagttgtttttttctttttattttgggccttgaattagttagccccatatggttcctattaagtatcttagagcatctccaacgggagaaaaatggagctctcatgacagtctctctaaattattgtggaaaaaaataaatcataaaggtttaatactgagagaatcgtttctcttaagagagattttggagctgaagagagacgcatacgtgtcgttgtttttcagtatttcttttttttttccgttttttttctctactatcatcttttcactgggactttgaggatcattggacttacctgaaacgagctggccgacgttgatttcggtaggcttatcggctctgagattcatggattccatactttgcaaggtttgttcttctaatcttatcgttcgtcttgattcatagaactgtttttgtttgttcttaaattcgattgtctctcggttttcattgtcctattgtttttcttttattttgtctgtctgggttttggacttttactctcgattgctctttgattctcgtagctattgaactagaatttgcaaaaggttgtggaatttgaggttctaattgtgattttaatgtggtgatttggaaaagaatttagggacattttaggttgattaagggatcttggctttgatttgagatacccatctaacgtgaagaagctagtgaagtatatttcaaccccacctgtggtaaagtctaatctttgtgtttcgatagtttcctttacggtgttttgtatctgactaatatcacttttgatggctaatagagagagcttcaggggataatccatttgggtgggtatttttctggctgtaccacttgcagtttctcaaaagtgagtgaaggaactcattttggttgattatactctgagtgaaggaactcattttcgttggttctgctcttctaagtgaagagggcttacaagcttggaaaggtgatg

SEQ ID NO: 32764 - DNA, 3000 bp, Unknown; identical to SEQ ID NO: 1188
  misc_feature (1)..( 3000): 2750-1469P.txt file - cDNA_ID_3061056; gDNA_ID_1620369; Annot_ID_154940

SEQ ID NO: 32765 - DNA, 3000 bp, Unknown
  misc_feature (1)..( 3000): 2750-1469P.txt file - cDNA_ID_3061064; gDNA_ID_1620370; Annot_ID_154980
ataactttttaaaatatatagagccgaataaggatcttattacagtgtatattcctgcacaatcttttgaatgtacaatacataattgttcaatgatgtctacatatataggtcaaaaatatacttttagggaattttgagaatattgataaaatttaaaatgcacacgagtaaaaattattattttaacgatttttcttaataatagataaaatccatatataattgtaaattatttttcttttaccgaataaaaaatcaactaaaatacatagacaaacataaaccattttaaatgtatccctctttttttttggacgaaaaaggcaaatcattgtaaatttactttataaagaagccgttttatctatagtagaaaaccaagaaatagattaaaaaaaaaaacattagaaagaaatggttttattaatggtgtgatcatacaaaaagaaatggttttattaatcttatttgcaaaatggtgtgatcatactcaaacgtcatttaaaagctttcatgctcacactctctctccctctctctctttatcatctttcaacacaataagcatatcaacaagcttaaataaaagagaatgatctgtgtcaaagtgtttcaaaaactaggttaatctccaaacatacattcacttctcaaaatgtagaacataacatgacttgaaacgttttcacacacacacacaagtattgacatttgatgtttgtttctttcacgaggagaatctgtcgcgatcatgaggcgaagagtagtcgatattggggccgtgagggatgatcccgaatgggtttatcgtagggtggcttccgtagtaatgttgcttaatgtgttccatgtttacggtgctactcatgccgtgtatttggtaaatgtcttttatgtagttgaagatattcgggtactcccgtaagagtctcttgttgcatttgaagtgaactgcataaacctggaacgcagaaaaagatgatgtcaagaacctgatggattttctatttggaaacaaagaagacaagttgactcatatacctcatcaaatcttatgagagtgacgaataatcggatatctgcttcagtgaaagtgtttccgcagatgtatcgttgttttccgagtacttcctcacatctatctactgcttcatataactggttcactgcctggagagaaaagggatcaatttttgaatccctgttcaaatgtttaagacattgagggatatatacctcattatagggttcttgtttccttgcaaacccacatttataaacaccgttgtttattccgttgaaaacccatccgttagtctcgttgattacgtctctgagatgagaaggataaaggtcaagtgacggggttttcgcaataccattgaactcagtgttgaacatccggattatctctgaactctcattgttaacaacagtcttaagcttcttatcccaaagaacctaacataataacaaaacaaacattcaagaaacaggacaaagaaagattaaagagttcaccaaagagatcaaaacttacaggaacagtgtacttcccttcatagtttgggctagcaatctcgtagagttctctcacacttttggcaccattaagatagtcaggctcagctccagggagctcggtatccgaatccgggaaaacccatcctctatgatcatcagtttccttggttcttccccaaatggcatgaaccgactaatcaaatcaaataaaacagaaatgcttcaggttaacaaagtcttctaattcgatatgagcaatgaatttgtactaaccgagaaggtgattgcttcatcaagtcctttgatctttaagtaagaaagacatctacaagcccatggacaagcataagatatgtaaagatggtatcttcctgattcagctggaaactgagaatcaggatcttgtgaaacaaagttgcggaatgttgatgctgttcttacaaaagctccagattctgatgtctcatcaaccccagacctagccattttgctactaataaaaaatcaaacacgaaaattcacatgacaaacgaaaagaataaaaatttcagaatgcacaatttttctttttcacctcaatagagtgagtaaagttgaaaactttgagagatttcttatagatggtcacttgtcacataatcaatctcaattttctctaggtaaaggatcacaggaaacgaatcaaagcatcaaaaagttcagaaatttcgagtagggttttacttaattatctcattagagctagaaaaaggttaaaataaaatgttcataattcatagccttcaaatatgattttcaacatttatggatcattgggccaaaatcaaacccagaactcagaaaatgtctaacaagaacatgattcatgcagagaagaagataagagacaaaacctgttgacgacgatgttatgtatttggcgtcgaatgtcgctgttttgtggcgataaggttaaagaagaaaaagtgagctttaaggaaaaatggtaatgagggatgtcatcttatagtgaaagagaaggaatccgaaaaaggactttgctttgtcttcactgctctgtcacgcctagcgagttaactcagactaacgagttgactcagctgggttctgtggggaaagcgtgacaacttttggaccggtttgtatgtcatggatttggtcaagacgaatgcgactattggaccggtctaaaacagcttcttttaaacctcaatcggatatttttaatattgggtcggattcggtatgaatcatataagattcgggtcggattcggtatgaatcatataagattcgggtcggttattggaaattggtaattttccccttcttcaagttagacccaaaacgaaaaaaaggttcgtttaaagagctctggttgggtttaacttggaggaattaatcgagtttggtgatcttcttcttaggtttttttctcgatctggttgatttgcttaaacatctgtaactatg

SEQ ID NO: 32766 - DNA, 3003 bp, Unknown
  misc_feature (1)..( 3003): 2750-1469P.txt file - cDNA_ID_3061070; gDNA_ID_1620370; Annot_ID_154982
tatatatccctcaatgtcttaaacatttgaacagggattcaaaaattgatcccttttctctccaggcagtgaaccagttatatgaagcagtagatagatgtgaggaagtactcggaaaacaacgatacatctgcggaaacactttcactgaagcagatatccgattattcgtcactctcataagatttgatgaggtatatgagtcaacttgtcttctttgtttccaaatagaaaatccatcaggttcttgacatcatctttttctgcgttccaggtttatgcagttcacttcaaatgcaacaagagactcttacgggagtacccgaatatcttcaactacataaaagacatttaccaaatacacggcatgagtagcaccgtaaacatggaacacattaagcaacattactacggaagccaccctacgataaacccattcgggatcatccctcacggccccaatatcgactactcttcgcctcatgatcgcgacagattctcctcgtgaaagaaacaaacatcaaatgtcaatacttgtgtgtgtgtgtgaaaacgtttcaagtcatgttatgttctacattttgagaagtgaatgtatgtttggagattaacctagtttttgaaacactttgacacagatcattctcttttatttaagcttgttgatatgcttattgtgttgaaagatgataaagagagagagggagagagagtgtgagcatgaaagcttttaaatgacgtttgagtatgatcacaccattttgcaaataagattaataaaaccatttctttttgtatgatcacaccattaataaaaccatttctttctaatgtttttttttttaatctatttcttggttttctactatagataaaacggcttctttataaagtaaatttacaatgatttgcctttttcgtccaaaaaaaaagagggatacatttaaaatggtttatgtttgtctatgtattttagttgattttttattcggtaaaagaaaaataatttacaattatatatggattttatctattattaagaaaaatcgttaaaataataatttttactcgtgtgcattttaaattttatcaatattctcaaaattccctaaaagtatatttttgacctatatatgtagacatcattgaacaattatgtattgtacattcaaaagattgtgcaggaatatacactgtaataagatccttattcggctctatatattttaaaaagttatttatcccttattttttcacaattatttatatattacttaaactatgtaaatatctaatgaactaaataatagggaatcttgcaaaatctgtcatatttcactctatttctttcaatttctgtcatattctaaaacttttttcaaaatctgctacattttggtccacgtggaattcagtggacgaaattacccttaaggtgggtcagcgctctgacgaagatggtgacataacaacttttggccgatgtgatgatataagacgaaaaatcatggtggaagcataaaggattaggggacagaatagtggagaacagctggcttctactgttgttattgggtatttaaaaatgacttgtttaaacaaattggttatccaaaattctgcgggggacaacgtaatatataatacattaggagacatgattacctgatatcgggggacaacgtaatatataatgcattaggagacatgattacctgttagcagagaacaattggagcaagacttttgttttagtctccagatcttgtccccgaatagaaattctctgttgcatctacgttttgtcctcgatttcatcatcttgctctattattatgaatcatacatcttatatgcaattgttctcatttaagaattttgaattttatttagattttcgccatctattttggtccacagattagttgagcgttattgttttcacagagatgctgaaaccatctatttttcgccatcttatatgataattttgaaagatgataaaatcggggacaagatctagatacaacagataatttatgatgaataaaattgggaaacaaatttaattgaaagttatatatagagaatatgtgcaggttgtcaggggaagtgatagaaagacaaaagcttttcgttttgtctttggaaaaataatggtgtatggtcaaaatgcacggatttcgaggaaatagagataaaatatagaagaaatggtgaggataaaattgacatttcccatctaaatgtggcatgagttgtaagacctagaaaaataatgacacattatataaggattttaaaaaatatggcataggatataatttttcctaaataatataccaacaaacaataatgttattaaaactaaataaaaagtaaaaatacatttggcaaacaaaagcgtgtcgctgtttcctccgattatggttttgagaaaaaaagaaagaaaaaacaaagtcttcgtcgtccactctcaagctcaacaaagttcttgggtcctcctctctattattaccacttcttcaccaatccttttcgaagagttttgtattcacgacatgagaaagatcccaacactactgatcggttagtacttctttcttctctgtctaataagcccccaaatttcccaagatttttcttttgattttgattagtaactccattgtttcactcaatttctttagctcttttcatgtttccttttctgggtttatcacaattttcaatcttgctcattattttccaataaagctctaacctttaagatacataagctaatttgtgttcttgagactttggtattagtccctctggtttgatgattattttcttaatgttgcttgcttcagtctgtttatatttagattaagtttatttgatgagctctcttcttgtttatgtactttcaaattttagtctttttaaaactaatgtacatgattcagttttagtataggttggtgattgtgtatcttcattagtagaaggttaaagatg

SEQ ID NO: 32767 - DNA, 3000 bp, Unknown; identical to SEQ ID NO: 1193
  misc_feature (1)..( 3000): 2750-1469P.txt file - cDNA_ID_3061081; gDNA_ID_1620370; Annot_ID_154973

SEQ ID NO: 32768 - DNA, 3003 bp, Unknown
  misc_feature (1)..( 3003): 2750-1469P.txt file - cDNA_ID_3061089; gDNA_ID_1620371; Annot_ID_154997
aagttttaacttctaaattggttcttaactttatcactttctctcctttgatgttattgtttaaatcctcttcaccttcacgctttctaaaccatattaacatataatcacgttagattatctagcattgaaatttagcaaattttgttttctattttcttatttccatatgttacttttgaaaaattaacaaactttttttcttttttctttttattcataaatataataaaaataataaaaaaatatagaaattaaaaagttaattaaagtcatggctaaaaaatgtaaaccaatgagatggttaatcctgattggtcgtttaaaaacttatgtggacgcttttagaagcgaatagcctcaacttttatatagtatagataaataccttgcttatattcctatattcttgaacatattaagagtttataataccttgcttttaatcttgtgagctgattaatttatgtgatgattttaactatagtatatttgatagtatgatattgaaaaattaaatccgccatcatagtcgttcaatgttcgagcagaaggctgacctattgacaaaggctctcgggcgaatcaagtttaaagaaatgagggagctcattggtgtgaaggacatgggacaaggtgacttcaagtttaggagggagaatgttggattaagcttgaagaaagctgatgaagaaagtaatattaaaccgagttatggtttagttcctaaccgagttatggtttagaaagtgatcatctcaaatctctttaggagttatctaaatctatgttttcctattaggattaggactaatgctttcatataaatagatgtgtcgagttctaatatcaatgtgagagttgtattaagagattgagagagaaagcttaagttttgtgtaagtttcttaagctataaagtgagttatacttttatattcttgagttcttaaacaacaaccaaacctagattctataaactgagagtaatcaggcgttgaaaaaataaagactactggaataagagcaaagatattcaaacatcaatgtgtggtttaagtttgaaaactaccctctttcttttcatagtaaattgaaatttctaaccaaaacgaaaaaaaacacacacacaaaaaaaaaatcagagccaagagactaccaataatcaatatccaacacatttcacatcaactcgttcattcaatcttttgataaaatccctcccatgttacccaaaacacaattcaaaagatataaatcaccaaaaaaatatcgatattgattcgtagaacaacaaaataactatacacgtatagcatcaacatcaagtgaaaaatctagcatggtaagaaattcgactcatacaaagaaccaaagcaatataaaacaaaccataatatcagaactatatatttaataaaaagtccttttgatatggtgtgaccgagacttgtatttatagctaaatgtttaggacaaaccatcggaagttttactttttaattttttttatacaaatatttgtatataaaaaacaatttaacatatatttgtatacttggacgatttaacatttcattgtattaggaatataatagttactcctcaaaaccatattaacatgtaatcacgtgaaataatctagcaattaaatttagcaaattttcttttcaactttcttatttccatatgtaacttttgaaaagttaacaatttttttttgttttttctttttaatcataaatatagtaaaaataatagaaaataatatagaatttaaaaagttaattaaagtgatggctaaaaaatgtaaaccaatgagatggttaatcctgattggtcgtttaaagctcacgtggacgcctttataagcaaatagcctcaacttttatatactatagattgcataattcttcttgtgataatattattgatcttttctacaataatacaatttgttgtcttgtcttcattgtttagtccacataacaaattagggccgagcattgggatatgcgagttgggtttgggtaaaagccgattaggtacggattctttgggtagaagagtttagaactcaatatattaaataaaaaatatatgttcggttttggttcgggtcctttcaggtttaggtcgctttgtatatagatttcagaacaacttaataaattatcggataaatacccatattttcgggtaaatactcgcatttcagagtaaaagtttgggtattcaagtaaaatattaagatatttttgggttcagattttcgagtataggagtttaggatccaataaaataaatctaaatttttattgtgtttagaatctaattttttgggttggttcggttcagatattctgatccaatttttttccccagccctagaacaaatcataagtgcataacgataatgagcagtaaggtacttagtagtttgcatatatggacgaaagatattatttgtatcaagtgtggtacaactatgggcccacgaatattcagtatccagttttgtacaagcccatgtgatccttgcaggccaattgacaattttaaatatatttatagcaacaatacaaatatatatttttcagtcaaatttgaaaattgcaaccgaaactagagagcagagtagagatcaacaactggatcaaaattttgaatttttataaaatctatagaattaagaatatataatatgttaaaactgaatttactccaaacctatattgtacaaagctgattagaattagtaatcattttagttccacatttctagcttttacgaggctattcggggcaactataactggccctatttggctcatcagtggcccattaaagatatatatgagttacattcataattttaaggaaaagaaatagttggtgtatgctcctcgtaatatcatcttatctataacaactacaagaagcttacattgctgctactaaaatacaaaattgttggaagtcatttttcaagatatcaaaatg

SEQ ID NO: 32769 - DNA, 3003 bp, Unknown
  misc_feature (1)..( 3003): 2750-1469P.txt file - cDNA_ID_3061124; gDNA_ID_1620371; Annot_ID_154998
agaattaagaatatataatatgttaaaactgaatttactccaaacctatattgtacaaagctgattagaattagtaatcattttagttccacatttctagcttttacgaggctattcggggcaactataactggccctatttggctcatcagtggcccattaaagatatatatgagttacattcataattttaaggaaaagaaatagttggtgtatgctcctcgtaatatcatcttatctataacaactacaagaagcttacattgctgctactaaaatacaaaattgttggaagtcatttttcaagatatcaaaatggagtgttcgctgcagaaacagcttttcaacaacggagataagctctttagttgtaagctctaacactttcctccctcatattcacatctattagtgcaaatcaagaataacttaaaccaatccattacaattcttccatttctttgctttcagctcgacataaccgacgggtttcgatagaacaagtccatgtgacagattctctttccgtaaactcgataaacctgtttcataaacctatatgttatccaatatcatccatcatcacttcaagaaagagcaaaagccattttagtgtaagtgttggttaattgcaattttgtagaatattttgtaagttgataacatttaaaagattatgttgcataatttttggaaatttgtgatttcagtcattttgcaatcccggaaattaaattactgaactcatgaggttaaaggttaacttagtatgatttaacaaatgtctagttaatgtgattatataatataggtttgtgcaacaaggagaagaagggtgcattcgaactcggatacatacgtactgttagaggcaggacaagatgagcagtttgtgacggaagacgaactcaaggctaagctcagagggtggctcgaaaattggccggtgaactctttgccaccagacctggctaggttcgatgaccttgatgaagccgtagatttcttggttaaagctgtatgtgaactagaaattgatggagaagtgggttctgttcaatggtaccaagttcgtcttgagtaattaaataaacgtattatgtgttttgaatgtaacaagcacatctgtttaatctagtagtttggtttgttctttaatagataattgctattgttgtggatgtcaaaatcttgtgtgttggttttaataatcgtcaaagagaattagggtcatagctttcgtaaataagaagacactactcgaactaaacaatatgcgagtttgattctttcatctttgatagtcggcactaaatatccaaataaaaataaagattttttagtctcacctttaaatttgaaatttggttttgtgatttgaatctcttcttttttttcgtcaaacatcattttattaagttagcggacggaggttttcttctaaagagagtcaatccagagtcgatgtgcttacatggagaaaaaagattctcgtactctgaccttcttagctagacaatcgacacaaatattgttacaacgaggaatcttttgtgcttaattagctggtgcgaaattgatagcttatcttccaatttcccttgctttgggggatacatattctaccttgtggaacttatgacacttaatgggcttcgtattggattggatttgtgaaaaattgacattgcatttgcccgttagttcttcaggcgggatggtctactagtactagaagaacgaattgtagatgtagattctgtaatagttggctgttgggataaacaaaaactgcatccgatcacatcagaagactgagctgcatataactgtgatttttatgtaaataatcttacaaaagttttaataacattaaaattcttatattgtttattttgggggacaaaattgtgttttaaaaaattactttatatattagttaatcttatcgaaatcttagttctgattttttcagttcctcatgtaatattttaaataattacctaatttaactaacatattcataattatcaaattaattgattaaatcatagtatataattttgaatggggtttagtgttgttaatgcatttgattgtgtttatatatataaatctcagaaagatttatgcacccaataagtgtaggttaattttatagtaaaaaatgaagtcaattttatagttaagatgatcaataatatagaaacttttaaaataaaataataagatttgcaccaatagcgtgagagagaaactcaactttgatatattatgacttaataaatgacgttaattcttatgtaaattaagttataacatatacaaggattcataagtggtcaaactgcaattaaagtattttttaaaaaatgtagcaaactaaaaataaactattgtattttgagaagacatgtggcagaagtacaatatgcacatttatatgtcattctagaagaaactttattttataagattaataactgattaaataacaatttaccatgtaaatgtaatgatacagtgattaagtaagattctactacgcaaaggtaaccttatttaacacacgttaattactgtttggaagatattatggacggagagaaacaaaaaaatgttattagttgtggctctacgttttttttgtctttaagccttaaaaattagaaagcgtgtaaattgtcagaaaacttgtgtggtcatttcaaaacaaaacaacaaaaggtagtaaataaaaataacaagatcgtaatgaatgagcttggtataaaaacaagaaaaaaataacgaagttgggggtagttgcgttgcactttgatttaaattctattcaaatggttattgtccaaacataacactcttttctatatataggtagtctcttcaatgtcacaaataatcgaatcacacaatattaaacactaaattattcacagttttcttggagaaaagattcaagtacaagtacaagcagagaaagtgagagagagagaaatgatg

SEQ ID NO: 32770 - DNA, 3000 bp, Unknown
  misc_feature (1)..( 3000): 2750-1469P.txt file - cDNA_ID_3061128; gDNA_ID_1620371; Annot_ID_154990
tgatttctgtctctcgtgacgttgttttccgggaaacagaattcccttttccagcctctgtttttgactccacgccagactcgcagctctcaccctccaacgcagatcagtcattttttttaccatcagaattacaagctcctacaccggtcagtattactacaactctggaattaacacagtcatcgtcctctaccaatctcaacgatgataattttcatattccctccgacgaatcaagctctgttaatgagatgtctgacaatgaggatttgaattctccaactaccaatgaatcatctccgttcttgtcaccggcatcaccgtctctgcctttatcaccggcatcactgtctctacctctatcaccggcagcaccctctccgtctctgccaaaaatagcagaaccagaacctgaacctgaactacttggaaaaggaaaacgcaagaaaacacaacctgtgaggcttgcggattatgccactacattacttcaccaaccacacccgtcagtgactccatacccactggacaactatgtatcaagctctcaattctctgctgcttatcaagcttatgtttttgccatatctttgggtattgaaccaaagagctacaaggaagcgattcttgatgagaattggcgttgtgcagtgtctgatgagattgtctctcttgaaaatcttggtacatggacagtagaagacctacctcctggtaagaaagcattgggctgcaaatgggtgtttagactaaaatacaaatcggatggtacgcttgaaagacataaagcacgtttggtggttctcggtaataaacaaaccgaaggcattgactactccgaaacgttcgctcctgtcgcaaaaatggtcaccgttcgtgcttttcttcaacaagtagcatcattagactgggaagttcaccaaatggacgttcacaacgcatttctacacggtgatcttgatgaagaagtttacatcaaatttcctccgggttttggtagtgatgataatcgtaaagtgtgtcgcctgcgcaaagctttgtatggattaaaacaagctcctcgatgttggttcgccaaacttactactgctttgaatgattacgggttcatacaagacatctctgattattcgttatttaccatggagagaaacggcatccgtttacatattcttgtctatgttgatgacttgatcatcacaggctcttctctcgatgtcatcactaagtttaaagggtatttaagctcatgtttctacatgaaggatcttggtattttgcgatacttcttgggaatcgaggttgctaggagtcccgccgggatttacttgtgtcagcgtaagtacgccattgatattatcacagaaacgggtttgcttggagtctggcctgcatcacatcctttggaacagaaccataagcttgctttagcttttggtgacacgatctcggatccttctcggtatcgtcgtcttgttggcagacttatatacctcggcaccacacgtcctgagttgtcttatgcaattcacatgctttcccaattcatgagtgatcctaaagccgatcatatggaagctgctctcagggtcgttcgttatctaaaatcaagtccaggtcaaggtattcttttacgctcaaatacacctttggtactcattggttggtgtgactcaggttttgattcttgtccgattacacaaaggtctctaacgggttggtttattcaactgggaggctctccgatctcttggaaaaccaagaaacatgatgtggtttctagatcctcagctgaagcagagtatcgtgctatggccgacaccgttagcgagcttctttggctgcgggctcttcttccagctttaggtatctcgtgtaatgaacccatcatgttgtattctgatagtctttcggctattagtctagctgccaatcctgtttatcatgcacgtacaaagcatgttggtcgcgacgtacacttcgttcgtgatgaaattatacgaggtaccattgccaccaaacacgtctccacgacatctcaactagcagacattatgactaaagcattgggtcgtcgtgagtttgacgcttttcttctcaagctgggtatttgtaatctccatactccagcttgcgggggggggggggggggggtattgggctatgaggcctctcccgagcccacttagattgtatagctacactaggttaaatcatgttgttgtatataaggcattgcctctcttacgtatcaacttgaaacgtctttttacatcttcatctcctttttgacaagatatatcaagcaaacatgaaataaattcgtaatattgctatgctatatgctctactcatcgcttgatattgctatgctaaatctgtcagaaatatgtcaaaatatctcatatatatgcttgactttattattagttagaaacattattttttgtaattaaaggttgctatctttgaaaataaatgaagttattaattgttcattaacaagtaaataataactttatttagtgataaacaactaataaaaaatgttatgaatagtgaggtgcatttacaatacgtaggatggaatttacgtatttaccattaaactgctacactactctaattttttttcttaagaaaaagatagtactagaaattattaccacacacatatattctaccagacttgaaactagaaggtgcatgatacaaagaaaacaatattacaaatcaataaactgcaagctctggtcattgaattgtgtaaaatccaattttaataaaagattgattatcgatagactggttaaacgtttttgaactgccactttgaaacatgtgagttacaaaatgtatatgaataacttggaccacgtcaaatatgacaccggcctttttcctataaatactgagctcgaatgcttcctcattcacaaacaacacactacatatctagaaagcattagaacaaaaaaaaacctttgtttgaaaatg

SEQ ID NO: 32771 - DNA, 3000 bp, Unknown
  misc_feature (1)..( 3000): 2750-1469P.txt file - cDNA_ID_3061142; gDNA_ID_1620372; Annot_ID_155033
agactcatgatgtaactaagcaaatagagatttaggatggaactaaacaaagggttccgttccaagataaaactagtgaccattaccaatgatgaccatggtaataatataggagaagaaaagaaaagactcagttccaaactacggtactaatctagtttttggggtggcataaggtaattgcttttgaatgatgtaggcatcacatcagtaatgatggtggaatcatccagatcgaaaaagccgccttcgtcacagtcaaagagtatgacattgttagggcacagtccgggaaaagagctagcaaggacacaaaaaggttcagactttgaaagaaaaatgcagagatctccaatatcttgagtgtaaaccgcgtttccttgttcgtcaagcttgaacaccattaaagcttgtgttttcatttgcgcaatacccttgatgatcttgcttgaagacttcttgtaccacttaaccaagaaagtttcaccagctggtgactcaaccaagtgctcgctcttgcaacatgaatccagtagcttctgtttggtctttgtcagcttgggaaggttttgaaactgcaagctctgcaaattatgcttgtgtgtgcggagatcccatgttccaatgaggtgtcctccagatccgggaatgcaaaacatgttatctttcttggagtacatgacacgagataagtagaaacaagggttttcgattctgatgttgatccactcggagttactttgagccggtctgcaaaagctgagctgaggtcccaaaaacttgacagccacaacacagtcttcatcctcaggagaagatgcggacaatgacacattggtaacgatttgagtttggcaatgagggagagttacaagaggaggcaggggaatgcgtttcgggttagtatccgatgcaaccgggtttagatcgtcttggagacgcagtagtccgtcgtcctgactcaaagtagctatccagccatgggatgaaccgatggttacaagttcattatcatacaacaacgccataggcaccttcttatccaaagaagtgcattcatcttcataaggattcaaaatcacgagttttccctctttcgcaagtcttccacaacgtttagcgctgacgacgaaacaaggaggagtttgcagcaaagaagatgataagccatcattagagagaagaggagatgatctcaccaacacaggtttcctccgaaagcatagtagcttcaagggttggttgagaagcagcgccattgataagaagtgttttaggggaaagcgaggctgcaagagaatcaaataagaaagagtaaacaaaacaaaaccctagttgttgagatgttcacataaataaccaccaagatccgatacaatcttaattggatatcattttaattaaccacgttcaaaccttattatatgaagtttgtttcttcgaatatattttccatatacttgatttaattataaatacttatttacataacaatacatactccagaatcaatatcctcaaattttagaaaaacaatgtgagatgtacatgattgagataaagcttgaagctaagtctgattaagaagaaattaaagtttgcaaaatgtggggaagtctctatacgtgtcagagggtttgagatctgagaatacttgaagagaggctatggagagtaattcgagaagcaaaaataagcagtcgtctatttactatatgagaaaaatcttccttctagatgtgcaaatatcctcctgaaaagttggtcctcgcactgataacaaagagagatggctatgatgatcatatatttccaagctcatcccatcataatcgcgacgtcacatcccctaaaaagcatattaattgccaaagttggtagcataactctcttctaatggcgacttaaaatggaaatatactaagtggatctatatattttcaaaattggaaagtatatatatgtggatgaagttagagaagttagaaatttcaaaaggctttgggattatatttgtgataactcccgatgatattccacatacagataagtaaaggtgctacttagaccaaaccgattatgaggtttagagccagcgagagaccacttctcattagactacaaaacttttttaggtttattcacacacaatgtattatagttcctaatgtatacctattaaattagagtttgtcgaatgttaggattatagttcgtattgacaaacaaatatcagtttgaaaaattaggaatctaagagataataatataattatttttttgggtttaaattgaaatttgtgttggttggaacattcgttgactcatcgtcacatcaaataaaaatcttagcaaataaaatatgtcccataaacatcacataaataaacaaagaaattggaatcaatacaacaaccactccaaagtggatacagacataacaggtgatgagatggccatgtgatttattttccacccgcaacactctaatgcttatatatgaccaatcaaaaaaaccacttaaaccgccaaataaaccgaccttatttttgataaatcaaaacccacttagtcacaaattaaccaattttatatgattacactttcacaaatattcatgtgtagatttctttgaaaattttcaggtgctgcaatcacgagtgaccgaattatttttgaaaatttaaaccgaaatgaaattaaaccgaaccatattcaattttgaaaatgaaatctaaaaccggattaataaaccagtaccataatctgaacggtccaaaaagtattgacccatctctctctcttggtcgctcgttctcaaagggcaaagaaaaaaggatttttaattttcggagaggaagaagaagagagagatattgaagagcgctgaaggcggaaaagactattttgacctcgtcgtctccgtagatcatttttcttcagctcttcttcttcctctttctccgattctccttcttttgattttatctatccgccatg

SEQ ID NO: 32772 - DNA, 3003 bp, Unknown
  misc_feature (1)..( 3003): 2750-1469P.txt file - cDNA_ID_3061146; gDNA_ID_1620372; Annot_ID_155031
gataatatgatcgttattattattatttaatcagggagcttcaacttcaagtcaaaatctagtaaataaccaaaagaaagaaaatatacgtctagtagaaaaaattaacaatgattaacaattaaaaatcaatttatgacctaaaaccacgtacgtgtaggatgatgacaactagagctacactagactagactaagattatttggttatttaaaaattcttgtagatgattggttatccaaaagttttaacttttcatgaatcagtataaactttgattccgctggcgagtcttatcactctatcaaacacattgttatgtagactatagttgattgttaatacataatttaatttcaatcaaaattaacaatgattagagtgtaaatcttttatcaagcaaaattaaaaatacaatgattagttcacgtcaatactcgccgatctcaagggtatgcaaatattgcgcaattaatataaaatgatcttggtgcgggtaataattctacacacacacacccgtaagtattttcataagatcatttcataaacacaatattgaatttttttaaaacatgtctacattcaatgtttacttttgatttggagtattattttcgttaagttaaagtagactacttttgatgtttgcggtccaattcattaaaaaagacaatgatgagatgtgtttgcttaaggtacgtgattatgaatgtacataataatgctcgtgatttttaatgtggcatgtacaaatttgcatcttcttattatcagccttcttacgtccaaacacattaaagatcactatattatgcttgtgttgtaatacattcaatagttgtctatttataacatcagcggctgtaaattgtaatcggcaattgagttactaccacttcgctaaagttattgttctgatcataacaatattttcatttttaatttcgattggtaattttttttttttttttttaacctgagtgaccaaaactcagattaaccttccaaacttcgttaaaaaaaaaaaaaaaaaaacttccaaaattcatagaaatttggatttttatttgaaaacattgactactagtctaaaatgtttgaattagcagtacaaaatgctctaaatttatttaaaaaggacattcaactttttttttttaaatcactggaccactactgattaatttccatcgctatatagatgccttttttattattactaagaaattttttaaactagaacattttcttaccaactaccgatgacaacaaatagatatgcatctttttataagcgcatttcgatatttatgcaaggcaagttaaactttaaaaaaaaatattttaacagaaaagtcaaactcctaatctttttttctactccttaacccctttaaaatttatatacccctacttaattaaatggccatatacaatacaaaatattacaccaaatcaaacttttttatatattcaaatttcaataatgtaagatttctctagttctaactatagacaattatatactttttgtttattttccttaaaaatgtagacatgcaatgcgaggagttaaatgctttgcatcattgagcatgatggaaagggtaatatcttaatttattaaaatttctgacatatccacaagggaatgtccccatttacactcatgtctcttcatgtctatcccaattcgtttgtcctaaagtctctgacattcttcttcttttaccttttctcttaaaaaaacatgcttctgtcttttttcttgttttgtggttgtagtggcgcttgtattcgaagtacgagagaaaacgtaattcgccagttcgcctaattatcaaatttatcagtttgggtttaaactttgaattgttctggacttgttgtaaccgcatatgtgatatatgtgcatagaggacacatcaacaggacttgaatcaacgtcttaaagattgatctactacgctaattaacagagaaaacgacgaaaaatgtttgaaattttagttttatcacacagttaaagttatcagtaatattcccaagcagaccaatcatttcaaagagtgaatggttccaaaataaaatcatattctaactggaattatggattaagttatatatacgcatcatcatatgctcattaaaattttggtaaagctattatcgcatgcgagttcaagattttagcgatagttacgttgctagctcaataaaaagaaattcgttggatctttatatcaaataaatcacgattattgaactttatgaattgaagcaacgtctgaataaggaagaaacatgtaattgtagtctataccgttccatttaaataatttaaatgttggataagatactttctttaaatccatatgcatatcttaaaattgtccccacgaaccggtgtcgaccacaacttttgattttaatacgtgtgagtgaatgttggctagaaagtataaaacctaaaagtgggccaaagtatcttttacaaaattgggtttgttgaaaagtttggtaaaatcaagctaaatataagatgacaactgagtttatgcttttaaaatttcacactactcattagcccactcaacattactcattgtgcgatgtgatattaattacaatcagtagtcaaatttaaccccccaaaaaaatatcaacgcattttctaatttcttcttatttttggtagtttaatgggcttgtaaacataagcttagtaccatgtaaacaaccacaattatgctaaagattgttgctgatcgattagccctactattctaaatctttgtatatacacaatttgttggttatcagattggatccatagtgactttgtacactccaatcattaatataagttaatgggcctttataggctttaaaaaatcagcccattagtatatatcattaaataataatggaaaattagaaaagactgtgaagcgagaggaccgttaagacgacggacgcttatctggaaggagagtcatg

SEQ ID NO: 32773 - DNA, 3000 bp, Unknown; identical to SEQ ID NO: 1209
  misc_feature (1)..( 3000): 2750-1469P.txt file - cDNA_ID_3061152; gDNA_ID_1620372; Annot_ID_155029

SEQ ID NO: 32774 - DNA, 3003 bp, Unknown
  misc_feature (1)..( 3003): 2750-1469P.txt file - cDNA_ID_3061168; gDNA_ID_2926267; Annot_ID_143326
cataatggaacaatcataagaagaagctatatatggcgatgtgtatgcactgcagatggtttggagtcacaggctcatagcctcatatgtttacgttaatcatcatggaaagcgatttttgatccaaaaaaaaaggaaagcgataccaaggagcttgtggagtttatggtgatgctgcttttgcgctggttaagttgaaattcagaaagaaagataacccaaaatccaaattaatgattacttcaaacacttttgcatatggagaagaagagctgttcaacattaaacggtacaacgcagcattgaatttccgtgtcccaagcactgactgatgatcattctctaaagtctctataaatatgaccatgtgatcgtacgtggctcctcatgactgccccaacaagccaattactaaacttgtctttatattgcggttccaaaagatctgatgttgatgttctccaaaacagaaacacattttataagataaatgtaaattaaataaagcaattgggaaatatttatatagagtgatgatgaatacgtgaggactagtttatacaccacaacacaaaaacgcgttttgctcattctctctctctcgcacacacgtcaacaatcatatccatcgatgcatttgacttcctcgttcctccatttacatatgtagatccagttatgaaaggagtactagttccaatttcaatacatttatatttaatattttattcaatacaaaagtgttgaaagggattcggataaaccaagcatttttatgtgtatagaaaaataatacttgactttgcagtttccatttccaatcttcaaagtcatatcttaccaaactcacatctctagctaatatatcccctatattttgttacaaatatatatatatatatatatcttacacaaagacagtgcatgtgatatagaaatcaagatgggaagccaaggcatgagttcaccgagtcccttggtggtgaagaaatcgcaagtggttatagtgaaaccctcaaaggctacacctgatgtctctctttctctctccacactcgacaacgatccttatctcgaaaccctcgccaaaaccatctatgtctacgctccaccatccccaaacgaccacgtccacgatccagcttccctttttcagcaagctctctctgacgcccttgtctattactaccctctcgctggaaaacttcaccggggatcacacgaccatagactagaattgaggtgcagtcccgcggaaggagtcccctttgttagggcaaccgcagactgtactctctcttccctcaactatttgaaggacatggacactgacttataccaactcgtaccttgtgatgtagctgcgccctctggcgattacaaccctctggctttgcagatcactttgtttgcatgcggagggctcactcttgctacggccctctctcattccttgtgtgatggttttggagcgtctcagtttttcaaaaccttaactgagctcgccgcgggaaaaacacaacctagcatcatccccgtctgggacagacatcgtctcacttctaacaactttagcttaaacggtatatgttaactagtattatctaaatataatttcttttagatttagacgcattactaatcatcttgatagtttcagatcagttgacaaaaaatagattggtccatatcttttatatattgttgttttaactttattttatttataatgtgatgttactaattaacattgtatatatgtaagtagggcaatgttttatattgtagttttaaatttattttatgtatgatgtgatgttactaattaacattgtatatctatatgtaagtagaccaagtggaggagggacaagctcccaagctagttgattttggagaggcttgctcttctgcggcaacttctccctacacacccagcaacgacatggtatgtgagatcctcaacgtgacatccgaagatattactcagctcaaggagaaagttgcgggggtggtcacgactctagagattcttgcggcccacgtctggagagcaaggtgccgggccttgaagttaagtccagatgggacttctcttttcggaatggctgtgggtatacgccgcattgtggagccaccattaccggaagggtactacggaaacgcatttgtcaaagccaacgtagcaatgaaggctggagagttaagcaactcaccgttgtctcacgttgttcagctcattaaagaggcaaagaaagcggcacaggagaagaggtacgtgttggagcagttaagagagacagagaaaacgttgaagatgaatgtagcgtgtgaaggagggaaaggagcgttcatgttgcttactgattggaggcaacttggattgctagacgaaattgattttgggtatggaggatcagtgaatattataccattggtgcccaagtatctgccggatatttgtattttcttgccgaggaagcaaggtggtgttagagtgctagtcacgctgcccaaatctgtaatggtcaacttcaaggaacacataaatcccctaaatacatgaaattaataagcaggtgaatgtaattcacagtgtttctttaaaatatgaaaaggacctcatgcgattgtatatttaaagcttttgtttgctgtttgtttaagtttttcacatttggaaagtaatattttacaaaccaataatgtaacgccacgtcagcaacaatattccttctaaagaccccacgccaatattccttagtggagtttttaaaatcactgtttcatctaaaaactgattttagctacaacaaaatataaggccgaaaaagaatgctttagttgggcctaaatatttcatgctgtaaaaatgggcctatctaaataagcccaataaatttatgcgagaacaacactagggttttagtttttcttttgatatataatgtaaagggcgccgttaatcgcagcctcagtggaaacagagcagctgcaaacatg

SEQ ID NO: 32775 - DNA, 3003 bp, Unknown; identical to SEQ ID NO: 32774
  misc_feature (1)..( 3003): 2750-1469P.txt file - cDNA_ID_3061168; gDNA_ID_1620373; Annot_ID_155072

SEQ ID NO: 32776 - DNA, 3003 bp, Unknown; identical to SEQ ID NO: 32774
  misc_feature (1)..( 3003): 2750-1469P.txt file - cDNA_ID_3061168; gDNA_ID_2926267; Annot_ID_204953

SEQ ID NO: 32777 - DNA, 3003 bp, Unknown
  misc_feature (1)..( 3003): 2750-1469P.txt file - cDNA_ID_3061184; gDNA_ID_2926267; Annot_ID_143325
ctagtctcatggttagggtccaacatcttacacaatagtctctttacctcaggagcaaaccagctgggacacttgaagtctgctttacctatcttcctatacatctccataagattagtgtcatggaaaggaagataaccagccaaaagaacaaacaaaacaacaccacaagaccaaatatccgctttcgtaccctcgtatccttttcggttaataacctcgggcgcaacataagcaggtgtaccacaagttgtatgtagaagaccatcttgccgcttgcaatcagcaagcgcacttaaaccaaaatcagataccttaagattatcattgtcatccaacaaaagattttccggcttaatgtcgcggtgataaactccgcggctgtgacaaaaatcaaccgcactaataagctgataaaaatacttccaagcaacatcttctttaagttttccttttgcaaccttgttgaaaagctcaccacctttacaatactcaataacaaagtaaatccttgactttgtagccataacctcgtataactcaacgacattcgggtgtttagcgatcctcattacagagatctctcgcttgatttgctggctaagcccgactctcataactttgtccttgtcaatcatcttgatagctacactctcgttggtatgattactccttccaaaatacactttagcaaaagtaccttgacccaataacctcccaacttcatatctttcagttaatacacttggtttgttctccatccttaaaatctacaaacttcaaactactacctcaaagcatttgagtttttaaacccagtttgttgattccaaatcaagttaggttaactactactgaatcaaaaaagcacaataggatcaggactcagaagtctaaccttttagaccaacaacacaaaaccgatttcgatatctcctgtaacaaaaagattgagaagcaagacgaagagaaaccactcgaaagagaaaggaagaagaaacagtcacttctctcttgtatgatgaaaccgaattgagggatgaatccgaaagacaaaagagaacgaacggatctctctgtttggttgactagtggactcagttctgctcctctgtctaaattctttttatttatatttttggattttatgttttaaaaaagaaataaaggaaaatctaagagttcctttttaaatagttgcgtggaagtgaatagacattagagagagtcgcagagggtatttgttgctcgtgggctcgtccacctaacgcgctatatgcgccgttgatctttgatttttttttggtcggcgatcgttttttttttctttcttctttttggttaacttttattttgtggttttaaaacgataaatcctcctatttattttttattttatgtcgacgataaaagcctctttttttgtgtgtgtgccaacgataaaacctaatattaaaagcagttgtttattaaatatttaatccctggatttttttaattgagtttacaaactgaacttggtcaacattttcaattcttgattctttaagaaacaaccccaaaattacatattttaagtctcggtttgtttcggatgcgcctttagtcatagttatgaattatctatatattataactaggaaagattcaaaatgtgattgtagtaatttcgtgatcgtgaaaaccacaaccctgcaagatgctgatgaatcaatctcatggaatttttgcaaaattaaataattaaacctatagctttaagattgcactagatatatcacatctcaatatcatttatttctatctacattttaagttaagctgtgtaatgaataattttcttaagatttacgtggatcataataaattaatgaaagctctgatgaaggagtttgttaggggaaaaaactgaatcaaattcttgtacgtcatacatattttagtgtggttcgtaactttttcactaaatttttaaattcagttaaataaaaaaaactgtaaatttactaaaatgtaaatgaaatttataaaaaaaatatttcaacataagaagagttcataatggaacaatcataagaagaagctatatatggcgatgtgtatgcactgcagatggtttggagtcacaggctcatagcctcatatgtttacgttaatcatcatggaaagcgatttttgatccaaaaaaaaaggaaagcgataccaaggagcttgtggagtttatggtgatgctgcttttgcgctggttaagttgaaattcagaaagaaagataacccaaaatccaaattaatgattacttcaaacacttttgcatatggagaagaagagctgttcaacattaaacggtacaacgcagcattgaatttccgtgtcccaagcactgactgatgatcattctctaaagtctctataaatatgaccatgtgatcgtacgtggctcctcatgactgccccaacaagccaattactaaacttgtctttatattgcggttccaaaagatctgatgttgatgttctccaaaacagaaacacattttataagataaatgtaaattaaataaagcaattgggaaatatttatatagagtgatgatgaatacgtgaggactagtttatacaccacaacacaaaaacgcgttttgctcattctctctctctcgcacacacgtcaacaatcatatccatcgatgcatttgacttcctcgttcctccatttacatatgtagatccagttatgaaaggagtactagttccaatttcaatacatttatatttaatattttattcaatacaaaagtgttgaaagggattcggataaaccaagcatttttatgtgtatagaaaaataatacttgactttgcagtttccatttccaatcttcaaagtcatatcttaccaaactcacatctctagctaatatatcccctatattttgttacaaatatatatatatatatatatcttacacaaagacagtgcatgtgatatagaaatcaagatg

SEQ ID NO: 32778 - DNA, 3003 bp, Unknown; identical to SEQ ID NO: 32777
  misc_feature (1)..( 3003): 2750-1469P.txt file - cDNA_ID_3061184; gDNA_ID_1620373; Annot_ID_155071

SEQ ID NO: 32779 - DNA, 3003 bp, Unknown; identical to SEQ ID NO: 32777
  misc_feature (1)..( 3003): 2750-1469P.txt file - cDNA_ID_3061184; gDNA_ID_2926267; Annot_ID_204952

SEQ ID NO: 32780 - DNA, 3000 bp, Unknown; identical to SEQ ID NO: 1221
  misc_feature (1)..( 3000): 2750-1469P.txt file - cDNA_ID_3061192; gDNA_ID_1620373; Annot_ID_155065

SEQ ID NO: 32781 - DNA, 3003 bp, Unknown
  misc_feature (1)..( 3003): 2750-1469P.txt file - cDNA_ID_3061205; gDNA_ID_1620373; Annot_ID_155055
taggttctgtaagccttgagggatcaaaccagtaagactattatcagatagatcaagataggtcagaacatgtaaatcagcaagtgatggcgggatttctccggtgaatgcattgcctgctagagacaaagagacaagcttcttgcagtttttcagttctgggatctttcctaagagcctattgtgagagatgtttacaatactaaggacaggtgagtcgcaaaaattcggcggtaactctccactaaaccggttttgtgaagcagaaaacttatacaagctcttaaccaatccaagaccatgtgggatttcaccagaaaaggaattgttgactatctcaacttgctccaatgcagaagccaaagacacagactctggcacttgacctgtgaaccgattattatccgctctaataatcttaatcctgggtaatttccacaacacaactggaaactcaccagaaaatccattgttctgcacttgaagcctctccagactaaggcattcaccaatggagttaggcaatgacccttcaaagaaattcgagtggagagaaaggttaataagccttttaccactgcaaatgccactagggaaagagccagataacttattctgtgagacatcaagagacactaagttcttgagagaagggcctaatgatcgaggaatctcaccactcaggttgttcaaactcagatccaaggttctcaaacttgtcaaaccaacaaacgaagtaggaatctctccatggaaccctgacctatgcaacagaagctgttcaagcttgtctagcttcccaagaaaagaaggaatctcactaaccaaatagctgttttcagacaaatcaagaacaacaagctcacttagcttcccaatagcaggagggacgataccagtgagcaaattacttcccaagttgagaacttggagattaaacaataaccctaaatcttctggaatcataccttcgacatggttactgctaaagtcaataactttcaaggaactaaactcagaaatctgatcagggattgtgccccagatgagattagagctgagattaagagtctctaaagtaacacaacgagacaactgaagtgggataggctgattgaagaagttcaaggagaggtcaaggtgagtgaggtaagggaggtcacaaatggagtcagagatttcaccagaaagattcaaactttgaaggttaatggaagagacgtaaagagtaggagctctagtacatgtgataccagtccagttacaatggtgcgaagaagaagtgttaaaccaacctgaaagagagccttttggatcatcaaaggaggctttgaatctgagaaggttaccaagttcctcgttctctgtgaaagagaaggtcttggtgaagaagaagaagaatgtcaaggctagtgagattgaaaactggtgcttgaatctggtagccattaatgagttaagaatagagaatgaagaggatctgctgaatgagtgaagtagtgagagagtgagagtgagagtgagagtgagagtgagagtgaattgaatttcaggtgttgaaaatacggggtgggttttgcaattataagatagtagggttggttaatggtaaaaataaagagtatagggtttagtttgaaatttcccgttaaattttggtcgagggtctatggggaactggtagatttgtagacaaaacgacgtctcggagattggaatttcggatcgtgtctctctctgtttctttgtttcaatccgatttcgaatcaagccctttacttgtgcaccttcaagatttcgtttttccaggtcagtttcttcatcaagccaacctttttttctagggtttttcttcctttgttttttttctgggagttttctccttcacagtcctaagaagctacttgttaactctgtctttttgcttttgaagttaaacctagttgactttctcaagcttaaagagttcagcttttttttttttttaattggtgattttgttcttaattttgagctaccaaaatcatcgaattaaatgttaatctcttgaattctgtttcggtggtagtttcttggtttgaaatcatagctgcagcttcatgccgaattctcactggttctagatttagagtttagctttttttttttactttactcggatatgaatactgagtaaggaattgagtcaactcggatgtgaatactgaatagtttttgttctagctagagttgcaaaactaagagattcagctactgaagctactttagtgtcattcaaactgaattgaaatgatgtgtgtgagtgtgactgtacctaatttttcaaactcaggcattttcgactgtgccaacaccttaagtctcactgattttgactttgatccgcgagctaagcttaaggtctgaatgagtttctcagactttgtagattgtgcaagctacatgtctgattgggtttgatgaattgctttaaaggttgtgtttttgatgggctatttttgtcagtctgttagctacaaacagattgttcttatatatttgactttgtgacttatggtagtcagcagaatttcccttaggacactttgaataagtaaaggactctttagcattctttagctggcttgtttaactgaaacaaactagagaacctttttcttgactttataggacataattgaaaactatgttagcaaaagagatggtatgtaatgctgtttttttttgtgctcattcagcgcagccaatgctccgggtgaccaacatttgttcctgattcatttcctattgattcgtattggtaggtgttgatctttcttttatattctatcacctaattttgttctttctgtctttttttctttttcttaatttccttccgaatcctggcagtctgtgcacacaagagaaatttcaagaagttgttactaaaagagaggccacaagtggatattgtctttgttatcaagtgttagtacagaaaagtggtgagaaagtaatatg

SEQ ID NO: 32782 - DNA, 3000 bp, Unknown; identical to SEQ ID NO: 1217
  misc_feature (1)..( 3000): 2750-1469P.txt file - cDNA_ID_3061209; gDNA_ID_1620373; Annot_ID_155054

SEQ ID NO: 32783 - DNA, 3003 bp, Unknown
  misc_feature (1)..( 3003): 2750-1469P.txt file - cDNA_ID_3061220; gDNA_ID_1620373; Annot_ID_155049
attaccttattatctcgccatttttatttctaatgcccgcactggagcttattaaactatttggtaaaaagaatcagtgaaccgagactaaatcgaccctaacagcagagatgaaactaacttcagttagatcgacatttccctttgtatagtatcaaacaagaaccggttcttcactccacttgcatttgttaaaatgtgtccaggtttcaaccatagcaaatgagctctcatgaggatgtagtcaatcttcttcaaaatcatgtgtttaatattttagacaagttatagatgagttctacacaatttccaataaacatttctgaggataaagaattgtttttaccaacgtagatgaatttaagttgcctgaaattcaaaacctcccaaaagaaagaataaaaaggtgtggaataagttcttgtattgtttctttatcaaaaaagttataagatggttctaacattttttacatctatgttatatgtaaactatgaataaactggaatgctttttctttttaaaacttttatgaaggctaatttgaatttttatgaaccaacttatcaagttgtaaaggatccaactttagtggtccgcttttgctgcctcagtgatgcttagtaatgatgactatattattatgttcttttatgcatcatcttgatagacttgtcacataatatccatttttctcggtttagtttggttcacaattacgatttattaatgtctaacgaaaccaaagcatttagacttggcgtgaacattagacattttacattgtggatcagatacagttgatcatcatttgtgaacataagacttgtctagtggctttcatagtgcccattataaactaattgggcctcattcacgttcattgagatctgaaagatgaattaagcccacactttggctcttcttcggtaacttattttatttatttgttcatagaaaaacagaaatcacttatctcaatagagccgtttgtgataaatctcttccaacggtcggatcgatttgaagatgaccataaactttgttcgatattttcttataaatatgaaccaaaatctaaactttctctcaaatcttatgtttgttggatagatcaattgggttacttaaatttggatgaacttttgagaagttgtattagatggtgaagacattgcctcagtatacatttccaaatgcttcaaggagatataacttgcaccggttatagcctaattatatacaacgcgtaattgcattacccaaacatattcaacgccgacatcttgactatatgatatgtattgactattattacggtccatgtggaaacagagatcaaatcgaatccgtctctctaagtctatatcactcactatatagtatgtatatgtatcactaacactttccatcaaaattcaaaaccaacaccatggataagacagcgacattgtgtctcttgttcttgttcacattcctcacgacctgtttgtctaaagatctctgtaaccaaaatgacaaaaacaccctcctcaagatcaagaaatctctaaacaacccttatcacctcgcttcatgggaccctcaaaccgactgttgctcctggtactgccttgagtgcggcgacgccaccgttaaccaccgtgttaccgccttaaccatattctccggccagatctccggtcagatcccggctgaagtcggtgacttgccgtatcttgagacccttgtcttccgcaaactctctaacctcaccggtacaatccaacccaccatcgccaaactcaagaacctccgaatgctcaggctcagctggacgaatctgacaggtccaattcctgactttataagtcagctcaagaatctcgagttcttagaactttccttcaatgatctctctggttccattccaagttctctctctacgttacctaaaatcttggctcttgaacttagcaggaacaaacttacaggtaaagaacgatcttttcctttattacatcattcagtgtcttgtctaaacaacgatctttatgttgtaggttccataccagagtcatttgggtcgtttccaggaacagtccctgaccttcgcctatcacataaccagctctccggtccaatacccaaatcattaggcaacatcgactttaaccggatcgatttatcccgcaacaagctccaaggtgatgcttcgatgttgtttggttccaacaaaacaacctggtctattgacttatcaagaaacatgttccagttcgatatctcaaaggttgatatccctaaaacacttggtatcttggacttgaaccacaatgggatcactgggaatattccggtgcagtggactgaagctcctcttcagttcttcaatgttagctacaacaaactgtgtggacacatcccaactggagggaaacttcagacatttgattcttattcctattttcacaacaagtgtttgtgtggtgctcctcttgaaatttgcaagtaaaccaagcttatctctaggattacgaaaaaatatatttgagtcaataatatagacaaatatgtaatgttattcggattgattaataaaacatgaaccaaacctctcatttgatgtattcatagcacattttcaaaatgttttatttgatggattaatcctaccttaatggaaaaacaggggaaatatggataacggaatctctgagtggtttggtatggtttctcgattcgatttgggtttatatccaaacttgaaaagtaaaaccagattggtttaaacaaaaaaaaaaagaagagaaaaaccctgatttccttattcttccaaattcccaaatttctcaaatcgtcacaaatataaattccaaaatttctgcaccgaaacttgtttaaaacgtggtctagtcagcaaaatcattactacatctgtatcgcaccatgcattcatagcctatatgtatatcaatcatagtttccataaaaactcaaaacacaaacaccaaaaacactatg

SEQ ID NO: 32784 - DNA, 3003 bp, Unknown
  misc_feature (1)..( 3003): 2750-1469P.txt file - cDNA_ID_3061223; gDNA_ID_1620373; Annot_ID_155048
tctagagtcgacaaccggatccttaccttcccgattctcgaatccactttggctccactgttcgatttctcacttccgccaaggtgacagttatcgaaaactcccagtgtgataactgtacaaggatcatacacttcccatgtgtattgctcattccatttagggctagagctgtcaatgatggttcttgttctcacccatttttgaccgtacttggcaacacaatacggatctgttgtcgctttaccgtcttttgttttcataggcgatagcccttgagcactcaagattcctacttcaaggatgccaataggagacttccatagttgccttgccgtaggtttcacgtcactgatgtacagagttgactcgtccattacatggtaacctccttcaaggcaaactcgtaggtggattcggctggagaacttgagctcgtgtctcttgtctccttccagagccccaaacccaaacttttcgaggttgtaccatttggaatgaacagctctgtgatctaaccttttctcaaatacgctcaaaggtgagatcagcctccccatgacttcatctttagctggtgtcaccttgttttcgaccgtcaagaagaactgttcttcaaatggctctgcagctacaaaaacaagatcttcgttccacatcggattcgtcgtcttgttaggacataactttgttttcagaatctgattcccaacttgtactttaacgaaagcttgaggtggttggctcctgtcactaggctcaacatcttgcgcctcgatgacattaacccgcagataccacaatttgggagatacatagactttagacctcacgctttggacaccttctccttgaacagaggaagcatccgaatgccaagcatcaggaaatgcttcatcggcttgcgtcccaagccaaaccgctaccataacctctcctcttttcttactctcacctcgccgatcttctaatctgtaccactgaggtgcaagtggactatcaggaggaactcttgtaggaacctcacgcatatcaaacacaaccttcccgatgtattcatctcttgtaaccatctccttatcgcgcacaaagacttcaacagtagaggattggaccttgtcttttgaaaatgcgaaaacttgattccactccgggttggttcttttctcgaagtgtttagtctttcctttgtagtttcctattttcacttccacataaggatcacagttgctggtgacagggtttggaggaagatccttggctttgacgacccgaacatagagataaaacatttgctcaacaaggtcatatgtgcttgcagctcgttcactgccaatccatccggttcctccacgctgtcctccatgtggccatctctctccaagctctggtttcatgtctttaagcttatagtcttcttggctcttagctccatctttggctgccatggttttagattacttgaaccaaaagattctcctgtttctttcaaaacgtttcaattctgttcctgacatacaaaaaaacagaatctgagaattgcaggaaaaaatgattagacaaaacctgtttcttggatgtaaagaaactaatgtatctcatcagaactgatttaaaacctttataattagtatttagtaatttactttcaatctcaaccaagataattgaaaggattcttacctgatttaaacaatatatactaagtggtcgacgcaaatataagctttgtctcttggttctgttccatgaactcattcaagtgtttgcaggaaaacacagaatgtcttgaattatcttttgcaaatgaaaagtaagagaaggattaatatgaaaacgataaatagagagtaaatgaagagaaaaagaagatagcaaacaaaatcaatgaaagagataaatctatagtattcgaacttacaaaaaaagagagctatttttatatggaccaacaatatttcaagaacatgtatatatgtaaagaaggatgcgtttaacttagtaagcagtaccttgagaaagatgttgaagaagctgccataaaattctctgtttgctgctgtaccatagaaatgaaaaaaagaaagaaagaagaatttaagaaaccaagaagttaagagttattccataatcaaatttttgtttgatacacagagagagaacgaaagagaaacaattctatctcaaagaaaaagaagaatcaaaatgaaaaaggaagaaccctaaaaaattacttcttattctctctgtttttctccttctttaagagggaagctgattctttttttttgttatcttcgttttattaaataggaaagcagattcttcgtttgtcttaagacttttaggtacattaagaaatttttcagcagtgacaaaggtagaaatagtagattctctcacacttgtaaaaaattacaccacatatttgccaaattgcatgactgatttcaaggatgaataaacccggataaaacactcaaacccaacatcaagtgaaactttctcatgctttaatcaaaacttttcacaaaaatagtttcgcatcaatatataaaataaaacatgtaaacataaatttacaagaactcacagataatatacttagtgccaaagtgataattagaaacatttccaacaccaactttcccctgtgagtatatatatctttagtgtttctttctttctgcctcattggaataagcatctaaaaaatagctttttggagtttgaaactttttcataaaaagcaaaagggcaggctaggctaaggagtgattattattatttgattgagtaacatcattaccttattatctcgccatttttatttctaatgcccgcactggagcttattaaactatttggtaaaaagaatcagtgaaccgagactaaatcgaccctaacagcagagatgaaactaacttcagttagatcgacatttccctttgtatagtatcaaacaagaaccggttcttcactccacttgcatttgttaaaatg

SEQ ID NO: 32785 - DNA, 3003 bp, Unknown
  misc_feature (1)..( 3003): 2750-1469P.txt file - cDNA_ID_3061240; gDNA_ID_1620374; Annot_ID_155113
agctggactcctgaaacttggcaggtgtgtgaattagcttgttgggtagataaaggaagaagctttatatatgtaatggttgaattttttttttgttactttgcagaaacagaaggatgatatattagctagtcctattaagagtagatcgaaggctcatgaagtgattaagaacatgttggctagtttgggtgatcaatacactcgattcctatcaccagatgaggtttttgttctttacattctatgaatttgattgatggagaaaggactcttaagttgtttcagttactcatatcattgtttgtgtcacttgtttgaagttttctaggatgtcgaagtatgacattactggtattggaattaaccttagagaagtttctgatggtggtggaaatgtaaagttgaaggttcttggtcttgtattggacagtgctgctgatattgctggtgtgaaacaggttataaaccggtctagtttctttcttgtagtttcgttcgctgttgatctcacttaaaaaagtgtgcaatgtctctctctttgatagggagatgaaattctggctgtcaatggaatggatgtcagtgggaaatcatcctttgaagtatcgtctttgttacaaggccctagtaaaacttttgtagttctcaaggttattattcttaataataagatacatactaaattcattagtacttgatttaagtttggaatcaagatttttatgtagtttaagcatattgcaggtgaagcatgggaagtgtggacctgttaagtctctgaaaatccagagacaagttaatgcacagaccccagtttcttaccggttggaaaaagttgacaatggaacagtctctgtcgggtatattcgtctaaaagagttcaatgcgctggctagaaaagatttggtgattggtaagccttttcatgttgttacatcaaagttatcaactttcggtcccatccttttatctacttgtgtttaaatagtacacatccttttcactatgtgcagcaatgaaacgactcctagacaagggtgcgtcttattttgtaatggatcttagagataaccttggtggacttgtgcaggttcattctacaattgtaacttaagaccatttcttctcacaaataatttacaggaacttgatttttcacttagcccttcgtttcttggttatgtttatttcaggctggaatagaaactgctaagctgttcctagatgaaggagatacggtaaatcaacattcatttagaacttttaaaacattgtcaatcgttgttcaggaatatgaaacagaatagcttgcttcaacttacatgaatgagttccataacgattggcttaaacttatgttacatgttgcaattgtgtaacaggtgatatatacagcggggagagaccccgaggctcaaaaaactgttgtttcagataagaaacctttgatcactgccccacttattgtatgtgatgaatcatgtaagccagttaatctttcacactattatgttattttgcatcttgcactgattagaatccttattattgttgcaggtaatggtaaataacagaacagcaagtgctagtgaaattgtgagtaatctcaaaagatttaacccacgggaaactcttctttttttggatgttaaacggatgatttgtgtcatatttctccaggtggcctctgcacttcatgataactgtaaagcagttcttgttggcgaaagaacttatggaaaggttattccaaaggcttactagtttcataaccaatctatcgattttgaattgtttttgatcatcttcatgtcatttgattaatgggtttcagggtttgattcaatcggtgtatgagctccgagatggttcaggagttgttgtgacaataggaaaatatgtcacacctaaccatatggatatcaacggtggtggaattgaacctgatttcagaaatttaccaggtttagttatgcccttgaatcttgatgtttttctttgtcttttgaatatctgatgtgattcattaaccttgtttttgatatatacaatatgcagcttgggatgaagttaaagaacgtttatctaagtgcagtattctccaacaaagttgacatgctatgaaactcatcaagctgtgtacttattattctttgctcaaaccacaacaaaaaaaagctaatgcatacacgatcgaatctggcaaaaaaattgggtatgtcaaagctaaaggaaacatttgagtgtatattaagtttgggctgaacttaaagactctaaataataatattggtcattcttgatcttttggacaaacttagcttcatggccattcttgatcttctggacaacctccaacggatttttatttcatttttttctagtagataagccataagatttttagtggatcccaaaagggcggtgactcacccaaccctctgaagacgaactccacgacggccacacagattcataggaaccgttgttaaccactgaatcaacactgcgaaacccaccaaaacgccaccaacttccgccataacaaccacaacaagagaaacggttgagccctgtggaaccccgaagcactccacgaagtcctcaaccgcgaaccacgccttagagcctccacatgcttaccaccagagcagcgactacatcagtgacgaaaccacaccaccaaagacggaaaggcgcccctaccaactcctgaaacataaacaagaagcttcaacccgacaatgaagatcatggaagcataaaagtaaaaatagactgacaacggatggcgggttaaaatctagtaaaattttatgctcaaatctaataatccggataaatctatttaaattattttagagttggggttaaaaaaataaccataaatatcttaacaatttgtgaaaattcaccctttgtaaagtagcattcatagtttcatacgaaaacccaacacctggaaaaaaagaaaaaaaatctaagtcttgtctaccgatg

SEQ ID NO: 32786 - DNA, 3003 bp, Unknown
  misc_feature (1)..( 3003): 2750-1469P.txt file - cDNA_ID_3061248; gDNA_ID_1620374; Annot_ID_155099
ggttcttggctcactttatctattttttcgggcaaaattggatattataaattcagacggagaagacaagatcaaggaaagtaaaagctcaattgttctaaaagcccctaaatgcttacaagttacaactattcacttttttggcctcgtagttctattccctcaagatttaagcctcccgtaaaataagacatttcactttcaaaatgtacaattgtgctgggtgtattaggtttgtagaaaaaacaattgacttcaggtagattgtaattgtagtgctaagattggcaaagtaacgcgatagcatctttgtgactcgtgaatatgtaatgcattgtatagtgtttgttttacgaaaatatgatgctctgtaaaatagaatggcaacatgctatcaaatagaatggtagcatgctatcaaataaaattccattgaaactcatcaaatttttgtttggaaacccctaactatgttatattgcaaatcaatgaaatatatgggataatttcatgttgtcaattatttactctctaaatttttatttatcactttctttacatcccgaaaactgccaatttgtcaactcgaatttgtaggtaagaaaatcttgcgaaatttcatattttatgtagttttaaaccgtgtttgattgtcaatgaagtaaaaaattaacagatctgttattttttaaagttgaaatcatgtagacaaattacctataaatgtaacaagtaaccggaaaataaatactggaaatgcagttaaatagagttgggcaaggtgggtgaaccggtattcacgtgggggcattgatcttacaatagccaagtcaacaatcaaagttgtaagtagaaagctggtataagttgttcaccacccgagtttttttcttctaacctttcatataaagtcttattgtcttatgttacttgtttaaatgagtatgtacaattgtcactattcacacccaaaaaataggtttataatttgatcgtttcaaacgtaacttttgtgtttgtatttttactttcatgtgaattttacttttacatttttgacttacaattgtcactattcacaaaaagtaccagttcgttaaatttgcttcggtgcttcaccgtaatagcagccaaatccacatttaaatataaatccgttttggttcaattttgcttagcgtcagccgtcaactacgtgactcctgcatcattctcttataacaaacataaaattttaagaaatgaaaatcttgttttctcctacgtatatgtaatgtatcatagttttcagaaatatataaaagtagcattttaacatgtttgagcaaatgtaatacttttgtgtcttaaaagtatactatcaaaattagacgagaataaatgaaaattgatgttgagaattatcattgggtttttattgggccaaacccaacacaatttctataaacccaaacaatttgagaatctgaaagaatatattccacacaaaaaaaaaaaaaaattgttattgaatgaatctagtgcacgactggctaatctcatgtctattaaggtaaaagtagggtctctcctatacaaaaattgaggcaaactacgaaatcaggagactagaagtagacattctccgataactttgagaccaaaagcgacgaattgttttatagcttccaaaactcactggcttgcactatttacgtaggtacaaatacatttgactttttacaaatacaactctacattgaatttttgactaattcaacatccgttcgtatcagtcaattctacattacattgactcaaattatactaacataatttgcccgccaaaaaagactttgaccctttatataaactattgagagaaatttgagaatcgacttggttggaatcattacaagatgactagaacttattactaccaactctagtttagagtttcatacacaaacaaaaaaattgcatgaaatttgatcagcccaaaaataactcaaagccccaaaaaataagttaatgaatgaacgtcacgtgaataacacgtgttggttttctcaaaaaaaaaaaaattttttctcaattctcgtaaaacctaattttcaatttcttcttccttttgttaatgatgataaaatttgcagttttgagttatctatactaacagagttaaaaaaacacaaacacagagatgaataagaaactttcatattgaattgaaggaatgaaaaaacaaattttacaaataaactagatatacaaaaaaaaacagagttacaaaaaaatcaaaactaacttttgttagaatttacaaccacaacagaggaagaagaaagcaagcttggataccaaaaccatagcctcgatgatagacatgattctgtatctcaaagtttccaaaaacgtcatcttcagattcaatctcttccactttagccctcctccaagtcccaaaaatttcaatctcgtcctttctttagtcgtcttccatatcgaaagcttcccttttctcatcatcttctcaaaattttgagctgcttcaaaaaccaaaatgtaacaaagaattagggttctgtttttgtttcaggtgttgttgttataataaagtcttcgaagagtttattttttatacaagctaaagttgagggtattttggtagttttcacagtcatagattcgaagcgcgtttccatgatatcaacgtaggtgttctgacgtgggagcactctgtttctccaaagaatttcgtggatatattttttaactcctttatatagataatagatttgtttttatatatacataccagttgtttttactgaatttattcttttttagtttcaaatgattatcctaattcttacttcttaggaatgtataaaattacgaatttttttaacgtcagattgatcggaaaaagattgtttatttctgctaaatttatatacacacagcccaagttttttttaatggaagacatacattacaatattggaataattgaagcccatg

SEQ ID NO: 32787 - DNA, 3000 bp, Unknown; identical to SEQ ID NO: 1236
  misc_feature (1)..( 3000): 2750-1469P.txt file - cDNA_ID_3061251; gDNA_ID_1620374; Annot_ID_155097

SEQ ID NO: 32788 - DNA, 3000 bp, Unknown; identical to SEQ ID NO: 1234
  misc_feature (1)..( 3000): 2750-1469P.txt file - cDNA_ID_3061255; gDNA_ID_1620374; Annot_ID_155095

SEQ ID NO: 32789 - DNA, 3003 bp, Unknown
  misc_feature (1)..( 3003): 2750-1469P.txt file - cDNA_ID_3061259; gDNA_ID_1620374; Annot_ID_155093
tagttttttttggtagggattaacttcttctagctcgtggtaattgttttatatatcaaatatatattttactaatatatatatatatatatatataaataatactaaatatgatgaattaattctatggtaaaaatgtcagtagaagtagctacactataaactttggtatgttatgtatatttttatataacgaaagctacattttgggtattgtttttatcagggaatgattgatattgaagcaacttttatttagaaattcattaaaacattttaatggttctcttgtaagattcacacctatctttaaattttctagtcaaaaaaagaaagaaaaaaaaagcgagagagcttctgtttttcaaaattagtgcaaaacagaacaaatgcgaaattgtacattttttcttattaaaaattattatagccaaaaaaagaaaaatattatggcctcctatatttgtccccaatcatcctatttattttgacactgacttttctcacccctattattaggcaagttctacaaaaatgatggccatgaaaaatcattatgagttattttccctcgtggctcgcgatggttatgtttttttgacaccgagtctcacgtgacttccacgtgaactatatgagtggaggttttggatatggatcaacttgaccatatactagatttgagaccaagacaaaagagagttcttaaaagtctcccaagatcaaaacagtaaaccctaatgattttctataacccttttgttgtatggaattttagagaatacagaattttagtgtctctttctatagttttaggcttttagcaaaaagtctcaccttttctttgtaatttctctaagataaattgtttttcgaaaaatgctcaaaaagtactgcaaatcagaatgtgtactgcatatcttctatctacgcgaacaattggaataaagcactgttattctctcgtgaaacgttgatacattatatacaacacatatgagtttgaagtttctgtattacagttttctttttgaacagaaatcatttaatgaaccgtgttacttttttttgggtaacatgaaccgtgttactataagactatgaattataggaatcttctaatttgtcatttatgtacgagttaaattgtatttgaagtttcatcaaaaattagtacttgattatgtcgaatattatctatatttctagtgataatttagtgttgttacatcaaatattctaatttagaaaagaaaacaacatgtgtgtacgatataaattgatagttttattttatttaaagtaatgagatgcccttaaaacaaaccttttactcattataataatattatcaagaacaatcttgatcaaacaatgtatttatcatttacagccaaaagtaaaagaatttgtacttgatatagactccatacaaactgtagtaagagagatgatagaatataaatgttccccatttatttggtggaggaccaaatgtggaccaaaacataacttagccaatcgcatcttaaggcaatcgagaagaaactacatgcatgggcatgcaactatactgtttcatttattttgaaattcatttggtccaaatttatcttcaattcctttaaaactagatgtacatgacaaggttgaagtagggaattcacgtaatcatacttttgactttgacaactatatttagtcattcagtgttttattgctatatcgaattatgttcaatgtggcaagaccacgagattatgtttcatttagttaacaatttatgaagttttgaaaacctttgtgtaaaaatactgtaacattacttaaaaacctttctgtaccagtacaatcatttcgacctatattctaaaatgtaaaagtaattcttacattattcttctattaaatgggaaatcaataacttatacggaataaatcactcttaaacttaaatggtcaatttcaacatgtatagtgatcaatttggtaaataatatttgatgatatgttagtgtatagatcaacattccttttaagtggttgataagagagactataaaattttaatctccgagtcatcattccaatataagtgttctcaagatttgttgctctctcatgtcctaatcgcttagggttccaatccaaaccaatgagtttagtcacatcacttacaaatgtgtatatcaatatatctttacggaaaaaagatatattgataaaggatgtacaatcaaatacaacaaattagtatgcaatgaaaatacaattttagaccagaaccacaaaattacaactactcaatatatcgagtattacaatatattgagctataattcaacttttcacctatagttagctagttttgaccataatttgtagtatagtagtatgtgttagtacgtcgatgtgtcaacattcatgttcaaacttgcatattacatgttattgacatgttcttcctgtagtatacaaattacacattttcataacttcatatatgaatctcctgcaattttacctgcaaactattggtcaaagccttttaaatgggctagatcaagcccactaactgccaaaatattcacttcatttattcttgtagacagtatacacattatcaaatgtacacacattttcatgatttgatcttagatattatttcatgcaattttagcctctattgctaggctttcctttaaaaacttaccgggctaatcaaaacctcttaaaaagcctccatatcaaaagcccatcaatgttacctcgaacttagtggaatcaaatacggtgtcgtttgatagaaaatgacgaaactagccctttgaccgttcaggaaaaagtcttccgacatataaaaacggagaagcgagaagacgtgtcggctgagaggtaagaggaagagagactcaaaacggcaattagcgaaagtgggcgggaggattcttttccggcgactcttttatgtcttctcttcctcttcgctccggtgagaagatg

SEQ ID NO: 32790 - DNA, 3003 bp, Unknown
  misc_feature (1)..( 3003): 2750-1469P.txt file - cDNA_ID_3061283; gDNA_ID_1620375; Annot_ID_155140
agaaattgatgctgtaaaacaaaggataaatattagtcatgaaaaatttgctccagtaaaatgaaagagaaaattatcggtgctacttacatatctgatatttgagcttccggagagagacgggaaacaaagagcgtcttttttcttacagcaactgcctgaatataacagccaagtgtgttagctcgactctttaaggagaaagaaagaactaaaattgcataacaacaaaagtagattcatcccccaaataagtcatctttcgactttgtggcaacagttctgttattaaatatctaagcctgacatattttgaagataataagaacaggtacctcaacaaaattgggagtttcatcaagtccttccactgctgtctcatcttattctatcacaaggttttgtcgtcgaaggtagtcttcgtaactgaaacatcaaaaattctagtgatctcataccaagaactacacccaatgtgctcatgataacaaaactcacaaggaaaatagttaaatcccttaccaaagcttctctgcaaggttgtacctagttaccaaaaataatagcgttagtcttctgtaagggtatcaaaactccaggaataagtcacaaccagtgttacagaaaacgtgaaaatcaatttacttgggtcgtgtagggtatggagctgtcttagccacttgaagaaaaatctgatgatcatgcaaatattcaccattcttcttttgcagcgcctacagtataaaagatttagtcagcaattgtacttttcaaatgactacttgaatacctttttcataattacaacaaaactactctcaccttctttgcttcgttagaagaagcaaagtcaacaaagccatagcccacatgcttggtttacaataagtcgaacactaacaacttctccaacatctttgaagaattctttgctgtaaaagtgaaggataaaatatcagtcatagaaaacttggtccgagaatgaaagtggaaatttgaggtgctacttacacatgcaatattttagtttggggagagagattggcaacatagagtacttcctgaattcaaaaaaatagagattggcaatattttagtgtgtgaataatattcatccctaaaaagaagtcatctttcgactttgtggcaacagttctgttattaaaatgtgtgagcgtgacatattttgaagaggtacctcaacaaaatcggaaggtgtctcattttcttctatcggaaggctttctcgttgaaggtagtcgttgtagctgaaaaattaagaaaacctagtgagctcttcatgtattcaaaaattcaaccagtgtaatcaaactcaagaggtaaatagttaaaatcccataccaaaccgtgtaatctatgcaatacctaattaacaaagttaaaagcgttagtctagcagtaatattgtatcaaaagctctaacagtaattaataaccagtgtcaccagaaacaaatgtcaataacatggaaaattgaatttacttgagtcctggaggtcgtggacgtcgtggaggctgtggacgtcgtgaatacacataaagaaaaatcttataatcgtgcaaatattcaccgttcttcttatacagcacctacggtaataaagagtttattcagcaatcgtacattcaaattgaaacttagatacactatatatttttcatcataactaactataaactagtctaaaccttttttgcttcgttagcagaagcaaagtcaacaaggccatagcacctatggatacgcttggcggttacaaaaagtcgaacacgaacaacttctccagcatctttgaagaaattgatgctgtaacaaacagtgtaaggtaaaaatatcagtcatgctcagagaaggaaagtggagattgaagatggtgctacttacatatctgatattttagtttggggagggatatggccattaaagagcgtcttttttgtcacctggatttaacagccaagtgtgttagcacaagattcttaattgaacagaaatttgtacaaaatatctagcaaatccgttggttgtttcctcctgttacatatgatacaagatcaaagagtagccattagaagaagacagtgtaaagaagattgttttgtcaaagaagaagagtaatacgaggccatcttagggttaccttattctacttatgtctcttgagaatggaattggtcaccaaatcatcttcttcagggttacgcttacctaaaagaagagcaacaaaaaaaaaactcttgagacaagtttaacacattagataaaagagagagagagagaggcaaccaaaaacaaacccaataaattgctactagaagtggccatggagaagatgaaacgaggtttatgtatttttccgttaagagcaagcaataatatagccctaaagaaatatagacctagcctaggaagaagtttctaagaccatccttatcaatgaactcttacataaagttctaaacaattttgatatacaaaataatgtttaaacattagaatggctcttacaaaaaaagagaataaagaaaaaaaaaacttagctaagagccatttttcatttcttaagcacacttttttatttttttattcttattttatttaatataatattttgatagttcttatgatattgttaacaacctattgataaggatgctctaactaatcttataaataaaacaatgaatctggtttggtctgggcgtaacagaaattatactcttttttttttttgtcaagaggaaattatactaagaagcaacagattaaacattaaagcgtatagtaaaattaattgtttgagaatcttaaaccaaaccgaaccggtattaaaccggaaccaaattggcaatgaaatttagatgccagtagtaacccgcttgattcgtttgaagtgtgtagggctcagacttgaccggagtggactcaatcggcgaatctgtcacggaggacacggggaatcaacgcggcggagagtgatg

SEQ ID NO: 32791 - DNA, 3000 bp, Unknown; identical to SEQ ID NO: 1242
  misc_feature (1)..( 3000): 2750-1469P.txt file - cDNA_ID_3061287; gDNA_ID_1620375; Annot_ID_155139

SEQ ID NO: 32792 - DNA, 3003 bp, Unknown
  misc_feature (1)..( 3003): 2750-1469P.txt file - cDNA_ID_3061317; gDNA_ID_1620376; Annot_ID_155166
gcttaaaacatgaatgttgaaactaataataataccttttggagaagatcttcatactcatctggagatgtgtgaagaggtggagatgcccactgaatgagaagggacctagcatattcatatttcaaaggtaccaaatggtaagtgggccataaactcgtaaaatcaaactgagaagtcaccaaaatcttataatctggtaaatcaatttgaaattttcgaagcaagaactcggatccctgccacacatcatccaacaccaacaatatacgaccatcttttgtgagttcctccagaagatctcttaagccagtttctgcttgagaatcatcgtcaaatgtaattgctccgcaaccgttgtcctggagtaagttttgtactatggccctgaaattaggagtattcgacacaacgctatagaagattttcttgaattctcctgccaatgtaacaaacactacatgagaaacaagaaacatgtgtaaaaatcaaaactttaagacacctcatatatatacataccttcgatctctgggtcgtcacaaagcttagtaaccagcgtggtcttcccacaaccaggaggaccagacaccacaaccacggaattgtcaaggagtttcttcttcagctccaccaatggccaatccaatccaaccagaaccatattatcaagcttgggaacagaacaacgcttcgaaacaagcggaggagcaggagaaccactcaaacggtcgagcttcttattgatgttttggaaataattgttaagaatagcttccatggaaggcatagacttcaattggttcctaaagagaagaagctgaagttgaacctgacagaacttgagcatcttcctattgatttcctcaacttttctcgtgtacttcgatttcaagattatattccacttctcgacatgtgaacacttctcaaccagtaaaagagctttatcgatcgtgtctttaagatcttgtagttccataccatcttgcatcgattcgatctctttgatcaccggaagcaatgactccatcgtcgatgcgagctcgttagacacagatttgaaagctaacaccttctttgcctctgaaatcaaaactttcagaccttccgagaccaaagctccagcaacagagcctaatcccaaaccaagccaatcgaccacgaccattcttgtttcctcttcagattcctttcctccaaaatttgccaaaacagagaaaaccaagaatgaaaaaatagctcacagatttgtctgtagaaactgaaaatctaacatgttgagaaagatttagacaaggaagactatatcagatgctttagatttgttgcaaagcaatctcgtagttgacttcacttcacagtgcctggaaactgcaatcaaaatgtttttttttctgacgtcatctttctttacgtcattgcaatcaaaagtttcaggcccattgatacatatatttttccttcatacggcccattttgatagaccttatatgggcccataaaaacaatgcataattgagaagctcataaatcaatagaatatgatcaaacaagagacatagcatgtgactgtccattatttgtgagaacttccacatgtcggaattgggtcaagcccatgttgactcttttatattactcgtttagtctaaagtctaaacagtgatcattaagagtctattaagaataaatacataatcaaaattagtggttcatagtttaattaattaagaaaatgatgcctaatcaactactcctcacatgcttcatcttttgttctaatatataaaatcatgccggatacatcattgtgttgcttatgtatcaatgcatgtatgtatgtattcgatttcttctaacgtcatttgtcgtttctcatgtattgtgatctgcatgcatggatggacctttgatatgatcggtgagttcattcatcatactaattagatatgtaattaataatataattgaaaacattttaataggtggaccataatattacaccgactaatttcacaaccacgagtttcttttgtcaacttttgcaacttacaatttaaaacattagaattcatccaaacaaaacaaataaaataaaaattatctttttctatcagatttgcagtaaatcagcaaaaatggcacagctttcaatagctcaacgccgagcccatcacaattcacaacagatgctcgttcccaaaagcataatactccatacataaacctttttttttaaatgtagggaaccagaaacatcgttaattagtgccaagaaaaataaacaaaaaactttcttaattgatttgtttgtctttcgttcaatttctgactctttttcctttttcgttttctagttttaaactatttccatttagctttttatggtaaccgttatccgaataatgaaagctaagctttggctggaagcaataatcatataaaccaaaacgcgtgaaaccattcaagtccgttctcaccgcattatccactaccactttttctcacattaacaactttattttattttacactaatcaaccaaaccaccaaaacttatacttttacaacaaaccagaccagcattttcaaatgtgaatgataatggataatgtatatagatcaaatctgccgacaagtatgtataagattcatagttctgacataaaatataatctgtgtttaaaatctaaagggtgtaaatttaaaagttgttgaagttgatttatgagagagttgattatgattatatttgaccaaacccaaaaacaataaaataaagtcactcgagatcttcactgtcattgattggaaccacctttgggactcctttttttttcttctctcacttacttatgtcacccacaactttcgctatctaattgcactttttatagaccaaagtccctacattactctattttctcaaaccccatttagaagaagagttcttagctgtcttcaatctctttgtctgtatcattctttacggaagccatg

SEQ ID NO: 32793 - DNA, 3003 bp, Unknown
  misc_feature (1)..( 3003): 2750-1469P.txt file - cDNA_ID_3061325; gDNA_ID_1620376; Annot_ID_155150
gaggagagagtgagagttgagcgagagttgttcggccggagaatctcgggtttgattggaccggagaaaaccggaattcatagagaaagaatggaagagaaagagcaatggcgggtattaatggagaatgccggttttgaatcggttaagctgagtaattacgcagtgagccaagcgaagattctattgtggaattacaattacagcaatttgtattcaattgttgaatctaagcctggcttcatctctttggcctggaacgatttacctctcctcactctttcttcctggcgataaccaaaccaaaccgatccggtattcttagttttgttttgttttcaatgttatttttggttagacaaatattcaattgttaatatactccgtggtcagagtgttttgtttttcttttagttcgaacgttgaattaattcaggggtaggttttgaattctctgaaccttatgtgttttttggtaacatcatttggatttgtgaactaggtttaaaaactggtcttagtcttgttgttttctcattagataatttaaactggtttgcttctttatttttggttggataaagtgaccggttctggtcatctgtttgagatgtaattactatttcataaaattaggaagttgaaagccaaatatatttgtaactactcttttatttgtaattttgctcaaaaaagtgatgaaatgtagttttgatatatgaatatctaccattatacataagtatatctgaacatggtacaacttatgaaagctaaatgtcaatacttgcaaagatataacaaatacaagttacatgaataagagatgtgtgttgaatttataagtgtcattttcttttcactttaaaacaaacttcatcttcttttgtttcttatgtgtcaaagttgccacagttgctctatttgagtctttcagtgtcagtctcagtcactgtactgattttacttttttttgttgagtgtgccaatgatgacatcactcccacgtcctccatccgtcttcttttaacggtcacgtggctcccaccctcttttctcgatgtctttaccgacttgttctagcccaacttacttgggccatttagattttttggtggcccaagttgctaaaagaggatttatcatagaaatctgaacccgttgcagcgctcaacacatgtcacagtcctgacaaacacgtattcaaatccttgttaagtcccgccacctgtcaccagagcaccacgaggcaaactctgatcaggacaccgtcgtactattatgtcggaagacaggaaagcttaattaagcttaaacctgacgtatttaacttcgttaactctaccttactaaagggttttaatttaaaacttatcatctcctcgtaagaataaaaactacttactctataaatttaagcttcaagaaacctccaaaagcagagaaatgatcaacgcttttaagactatccgatcactgccctcgaataccaccgtctcgttctgctcaacaccatctcgattaggccggaaagtcactggagttagttttgccaccacttctgatcagcaaaagatggataaaaagcctgaaaatccaaacgagaaaaccgggttcgtctcctccccatatgtgtgtagttgtttctgattcgtaatttggatgttattcaaaaaaaatttcgttctcttctttactttgatggagcagtgacgtgatgtcgcattcttatggagaagggtacgcaacaaggtctgacgaagaagggtttggaggaatctatggaggaaatcaaacacttcagaaggaaaacgagatccatgagaatcaccctggtactcagaatagttagttatcatatacacgtttattactacttatatgatcacttttattgtttacgattctgggtgtgtgtgtgtgtgttttcatgttattgaagattacgacaaaacgcaaggtagcgaatcgaaggagaaggagaaagcaaggaaccagacacaatcccactgctaaagaaaaaatgatgatttagtgtctttgttctttatgctttaataaaatcagacttgtgctctgtagttcgtagactctggttagagttttttttttgttaattgcgttttttgacccgtaacctttaccgggtttttgttggttatccttatcacttttgtaacactcgttgaattagtagtttttgttgattgttgaacattcccttaatttgactgtgtttgtttatttatgaacaaatctacggttttttagttgaaccgtcgaggaaaacattcttagataacgtcagcaatgaatattagcctgttttcggactttcgattccgatgcaacacgttaaaagtaacgtcagcgaagataaatttggtaaattcatctgaaactccaatgctgatggaacttagctggtgtgttgcgtgttcataatttatgttattagtaacgtcttagaagttggaatattcactccaagttcgcacttcaaaactttcaacaagtttttagttcttatcgtacgtctcaaaacagagttgaggagatttagcttctactgtttagtgttctacacttgcttcgtacaaagaattgaatttttatttccatagttacatgcacatatttgtattaacaatctcttattattggttagtatcatatctgtagttattcgaacactgggggcaaatttcatttaatcaatcacctaacgaggctatgatgcatgattaacgaacgttaaagccaaaatgtcaagactacccccttattatcagctcgcagttggtcaatgcctcaatggtctgaagttcagactctgaactataatacaaggtcaactcaacccgctggtagtaacgaaagtacgaaacagtcaaaaacatatcttaaaaattacataaaaaccggaaacgaagttgcagaatttacagtttctgccattgggacaatcattcgatctcatcattatccttctttctctccatg

SEQ ID NO: 32794 - DNA, 3000 bp, Unknown; identical to SEQ ID NO: 1257
  misc_feature (1)..( 3000): 2750-1469P.txt file - cDNA_ID_3061372; gDNA_ID_1620377; Annot_ID_155203

SEQ ID NO: 32795 - DNA, 3000 bp, Unknown; identical to SEQ ID NO: 1258
  misc_feature (1)..( 3000): 2750-1469P.txt file - cDNA_ID_3061378; gDNA_ID_1620377; Annot_ID_155200

SEQ ID NO: 32796 - DNA, 3003 bp, Unknown
  misc_feature (1)..( 3003): 2750-1469P.txt file - cDNA_ID_3061380; gDNA_ID_1620377; Annot_ID_155198
aaaaaatctccctttctttgataatacacaaatcaatcaatatagagataattaaaccacgtctttacagagaatagaagcaaatctttgagctagtaacattttagtataaaaatctcaacaacaagtcatttacatcattgcaactgttttgttctcttcatttgacttgggggttgtttgcttgcaaaggaggctttgtttgtacgtcgtcgtttttattccgtatataaaatataaattaacgaactaatctttaaagcctctgagacgagtagaaggttctctctggtgaagaaaccaatgcatttcggcgacagcctgaaactgaaaagccatcgatcgaccgagaaagcgaaaagagagagagatgagactcgtcgtctcaagctgtctactagttgcagctccttttctctcctctctgttacgagtctcactcgccactgttgtcctcaattccatctccgcctcttttgccgatctcccagccaaatttggtcaatttctccccctcttcctttttccttatccgaaacaatttctcgaacaatctggttaaaaagaagttgattttgattctcagacggctccgtgaccaaaaacggaatctgtggagctctatacgtcgcagatcctctcgacggttgctcaccgcttctccacgccgccgcatccaactggacgcaacacagaactactaagttcgctttgataatcagaggcgaatgttcttttgaggataagctgctcaatgcccagaactcaggttttcaagctgtgattgtctatgacaacattgacaacgaagatctcatcgtcagtaagccttttgcctcccacccaagtttaaaattccatcttttcttctcctgatgagctagggttgagctgaatttcattggagttatttaatttagtcaacgcccccataagtttggagattgaccaacatctgttttgcacagtgaaggtgaaccctcaggacattacagttgatgcagtcttcgtttcaaatgtcgccggtgagattttgagaaagtacgcgagaggccgagatggtgaatgctgccttaatccgccagacagagggagcgcttggactgtgttggccatctccttcttctctctccttcttatagtcactttcctgttgattgccttctttgcacccagacactggacccaatggcgagggaggcacaccaggaccatcaggttagatgcaaagctcgtccacacactcccctgcttcaccttcactgattctgctcaccacaaggccggggaaacatgtgctatatgtctcgaggattacagatttggagaaagcctcagacttctcccctgccaacatggtacttactcctattcttctgtggaaataaactggcaacttgccacccttaatgtgttcattgaggtcttggaaatgtatatttatgagacacagatcttcccttcacaggattgaaacatgtgcttactattctaggaagactttgataggtttctcttagattctaactttataaaatagatttctttctagcataaattcctctgttttagggttgaaggtacaatatattccgtttctgtcaattccagtttgataggtaagcaccgaatgcgaactttttggtattactcattgcttcgaatgatatgatgggtcgaatatgtacatcagaagaataaattaaagatttgaccttttttagtttatgtaagtgggggtaattcatagcagttggttgatttgaagctcttatgcagcttttcacttgaattgcatcgactcttggttgacaaaatggggtacatcttgccctgtgtgcaagcatgacataagaaccgagactatgtcttctgaggtgatcctgttagactgaaatgtataaatcctttcagtagttattttgttgtttttgcgttgggttcaatacactgtttgtgttgttttgttgcaggtacataaacgagagagtccgagaacagatacaagtacgagtagatttgcctttgcccaatccagtcaaagccgttagagttattatcggcttagcagctgaacactcatatcagtgctcggttacctggatcaggtccaggtttgcatcttatattgaatggttaatcatggtgggataagtttaggtaaagggaccggatctgccatactggtcgtgctttgctggattcccagatcaaaaagatatgagttgctttgcctctttttctttgcatgtgtacatttacatacgctctgagtcatgtgtacatttgatcattgtgtgtgtgtgtgtgttatagattgaaaaaatgtgtgtgatagtacagatatgcaaacaaattgatagaaaacaaatgttggtctaatcagattttctctctccgatccaggcaaatctctaatgttatcttgttgataatttctttgcctaaagtttgtataatatgaatattgaatctgattcccttacatgggggaatggaatccattgaacgtggctttgattttgtcttgtctgtagtaataataagaaaagaacacgtcatcctcatctctacctaacgactcatccaatacgatgactcgttcatgggtttgttagttgcgcaattccatcaccaaaactttctattacatactcaacttcttttgattactaaattcagccaacatttccttctcatctctaatcagtgaacacgttttctatgcaggctttggggcctatcttaccatagctgtctaagaagactattatcttatattctttattgtagatttcatttacttgcgtatggaattggaaacaaatttctaattgttgaatcatataccattatttttatattggccatgcatgtgtataagtggaagatagaacaatattaaaacaatattattgtgtttggtcctatttattactctctgctctcttcctgaagcttcttcatctttttgtttgacaagaagaggtagagaagaagatg

SEQ ID NO: 32797 - DNA, 3000 bp, Unknown; identical to SEQ ID NO: 1262
  misc_feature (1)..( 3000): 2750-1469P.txt file - cDNA_ID_3061387; gDNA_ID_1620377; Annot_ID_155195

SEQ ID NO: 32798 - DNA, 3000 bp, Unknown; identical to SEQ ID NO: 1266
  misc_feature (1)..( 3000): 2750-1469P.txt file - cDNA_ID_3061393; gDNA_ID_1620377; Annot_ID_155193

SEQ ID NO: 32799 - DNA, 3000 bp, Unknown
  misc_feature (1)..( 3000): 2750-1469P.txt file - cDNA_ID_3061401; gDNA_ID_1620377; Annot_ID_155186
tgaaaccgctctctgtttcttggccgatcaaagcccctgtcaatgctcccagcaaagtccccactgaatcaaatcaacaaagaagtcaaatcatattcatatcgtaattgcagaaacaaggaaaattcctcagggatcacagagattgattaatgaagatgaatgtgaagaaaagaaggaacctaaagcgaagaagaaggtgaagagagcggagaagaggttggcgagaagggcagagacggcgaaatggaaggaatctttaatccggtggaggacagagatgggagacagagaataataaccatccatatctgcaaaagagatgaagaggaggagggaatgaatttgtgttttctttgtctggaaaaacaaggaacctttcttttctcctttttatttgaagatataatcaatcgattagaaaaagagaccaaaggcaaaggaaccttctctccgctgaccgaaagtttctttattaattaataatcacgcgtctcatctttcttaatattcgaaaggaaaatatcttacgacgacgagtggatttgattatttaaagaaaacgatgagtgggtaagacttttgcgcccttcttctgacttttttggcttccaatttaatcaaaaacaaaaaaaaaaacctttacttctctttattatacaaacaagttttgtgttaacattatactatatgtgaaacagaaacaccacccaacttctcatcaatccaatgcgcttttcttaatccattaaacatacagtatatgtatgtatatatcaaacgaatcacaaagcctacaatgtatcatcccctaacttacctctacaagcttgcttctctattgctcctcatttcccaccgctgtcctcaaaacttggtgacccactctctctcagtctcaggctcacctcctcacctttccctgtacgaagatcagatcagagtcttcttctttttacattttacattctacattctacttttccatccatttacaacaactaatatatattattttttaaggcaggtagtgtgactcattttatgtgtctctcacgcacacacatcacttacttgaagaagctggaaacttaaacttacctcaatcatccctcaaaccttgtactcgtgtacacgcaaccactttgtggacgaccacttattcccttttataacagcacacccacctgcccaattggaccaaattagtgatgggattccacgaatttagtctcgaaaccaactatacacaagcactatgctttcctctcattcatcattttatatgtctgcaaactcatctactcaccatgaagactagatgggtctagcgtcgcatcaggcgtcatgctccagaaaagcaatgcatctcccatctttggtttcacagacaaccctcctttcccacactctgacaactcattccaccatggcactgcgctatagtttcccttggctgcaggaaacactgtttcacccccctcctcaacatctgatctgcaaagtccctaagaaccgttataggaagaacatagaaacagcttatggaagcccaaagttgcttggtcagttacgtacaggtacatgagaactgtggctatccgctgtcccccattcctagtgttatactcatccatgaagtagtcgtaatgaggctcatacttttgcccaatctcatagtgcagaacttgaagaccttccccatgctctgcatgttgtagcatcaacagaaccagtcaggataatgatagggctgcctaagaaatctagggagaaacgggatcaagaaattgtcaaattattaaacaaaacagaaaactagatcataccaactggtatgaatgtaaaatctgatatccttttctcaatttcacggatagttttgtcacgccctcttgcgagaaatgtccctgaactcgttcgcaccctaggatgtggggttggtcagtaaaggagaataagcttctgaggattcacttaatactactacaagaggttgcattgagtgaaaagtataaaacctgctatctgtgctctttccagtcttctcgtcgacaacagttgatttctccatatgcggtttagctagctctattagatacttgcattcctcctttgtctatccagaaaccgggtaacaaaaccattccgtcagtagcggctaaccggggaaagcaagcgaaccaagagcaaatcaaatcatcactaatcacttccctatcatttgctttctaagacattccttacaatgattatatctctcaaggaaacgtgcaagaatacattgaaaatacagatagagaagatgaatatgggagccaaaacagatttaccaagggaggaaaaaaagtcaaatctgtatatggataggtcataggctcaccaagaaattgtggtaaacagaagctctgggttcccaagagattatttcaacccaacgctcgttctttgaatcatcttcgccacttctacgggaaaaaagagaaggaaaagttaacccgatcttgaagcacactaaattgaaattcaatattggcatgggatggtatcttacctctgaagtgtttttcggacaatagaagtgagatcattggcttttgaggatccggcattgttgctgggcaccgagagaattccaaaggcgagaagaatcaaaatcacgaaagtggacatgatcaatacggcgaagacgagcgttgaatgcgaggatttccgagctgaaggacgatgattcctcggtctcgccatcatttttgcaacaaggatgagatccggccgagcgagattcgaaagaagcagagcagcagcaacaatggagtttattttcttactcgtggtgtctggtagattgactaatcaaaggacgaacgggaagtcaggcccatatgtttaagtaaggcccattagaaagtgaggcccattgaaattgtcggatactacatcagaggccggcgaggaggagaggagaaagctccgttattcaagattattccgataatg

SEQ ID NO: 32800 - DNA, 3000 bp, Unknown
  misc_feature (1)..( 3000): 2750-1469P.txt file - cDNA_ID_3061408; gDNA_ID_1620377; Annot_ID_155181
tttgtttgtcatatctcaggctccaatatatgtgaacaaagcaatagtgctggaagaggctatcaaaattggttatggaggcagaccgcagagcgcaaagcctgttttcaatgttatccttgacaggtttttagtttgttaatgaatctcctgggttagttacactgtctcactctgtcacagttgctaaccacatggtgggtgttcttgttcagcgctcccgatggaccagatcctttatcggaagagcttaaattagtgaggaatatggatttggcgtctaaagaggaaaggtacatcgatgcaggtatacaaactgttctggatggcatctatatccagtgtgctttgcagactcctcatttttttcttgtatcacattttgcagcgatgtggagggacagactgaagaaccttcagaactcgaggtgagaagacaattgttggtgataattgagatgcattaatgaagtgacattgataattaacttgttttggttgcagctctgttgtatataataagggtgtagaaactcctgagagctatgagtagtgaaagaataggagctaagaaaggaaatggatgtagatataatgtggtggatttcaagggtatggagagagaaatataagaagctcatagattgatggtaccgcatgtacctgagaggaagctcttagattgatgggatcgcaggatgtattcaaagtaaatgaaagatgtatgaataacctgagggaatgtgtaaatgtaaatggaagaagactaaatgaaatgcatttctttaagtgtgtatagtatttttattgaattggcgataagaagattatttaggagaaagaaactgagggcagaagcagacaaaacgaaagagggacggttacatacagtgggaaagaagagatgtggattgttgtgccttcataaatgtctacttgtggaagactaagcagtaagttaaaagaaacgtgaatgatttcccctgaaacgatggttacacaacactcccttattcacttggttttcgggttaaagttagaaaaataaaagaggtggcccagctttggtgcattgagagtagcagagttattaaatgcttcgcagaattgcagttgcacattcactcccttcttcttcttaatctccttacagttacagacattctctcacttgcgttcttgtttcttttacaaaacagatacactatgtttccgagagagtccctctgatattggcctggttcactcagattctcttttactaactcatctgattgagccgtgtcaatatctcagtcctctctcgtcgcttctctcgtattttgaagtttgcctcgttaggtcacaccacttgttttgtacacacgatcgagttgttgatatggtgttgttgtctttgtgtactcatcgatcactcaatatatacacatatattgtctgttgccaagaacagatggacctttaaggtaacaatcttgtagatataatcgttgatcggatgctcctttctcctttctaattgattttttttttaaactatatatatagagatttcgatgcaatcaacacacactcgtatttttatatattttaaaaagatgcgatgagcccctccctccaagctatcacatcagacagcaaagagaaaggagggtcatttattgatgattacatgcggaaaggatgcattattgaagaagaaggagacgaagagataaggaaagatgtttggtgaatggtgagtcatcaagcctttgtaggaaggccattcttggcccaggcactatagccaccgacgatatctttgactcccgtgaaaccctgcaaattcgcaaattatatatcaccaacaaagtaaaagtcagaaagaagagctttgtggtggagcttactgcatggagaagatcggtggtggctttgatagatctaccaccgctctggcagccaacaatgatgttatcggattgtccgaaatgggaggagacttgttccaggaagtcggggttctttgacatccctgtttcacaatcacaaaattatatccatcactcagttatcaactaaccaaataaaaacatacctgatgctcctcgattcatgtaaggcacgttgatcgccccacaggcatgtccctggctgaactcttctggagtcctatattcatcatccccattacatcaagatcctaatgatgctatgttgatgattgaaatagtcaaaagagaaaggtggggcggtacctgacgtctagatagcggtggccggctagaagaaggtcgtgggcgactgttaccgacaccgatgatgggactctgctctcctccgccatttttttcaatggcttattattatatttgactggacaaagacttcaataatttcattttatataaattagttgggaaagtgattataattgggccatatattacaaatacataatgggcctaagttgctgctttatgggctaagctgttttcggactgtccttcatattttcatattaccattccaaaacggcatcattttagctaacctcgtcttgggtttacttgatgaattttcaaaaggtttaaggcttctgaatgcaattattcattagtaaaacaccctttacacaattcttaccattcttcgtcagtcgatcagatcaacgttttaccgtctcactgatcgacgggaaagagacgacgacgtttttaacctttgggttgagatccgatccaatatttcgaaatcgtgattccttgtttgtgacctctctctctctgcctccacactcttctctaatccctcacctcaaggtaagcttcttctctggcactgattacattcaaatctctcttctccttgcgttgcttttgctggtttattcgaatttcacgacttgactcctttctcttttgattgttgattcaaatcccgattttgcgcttactagttgtcgtcgctctcttgagtgtctgggttcatctttctgacatctgctctgccaagatg

SEQ ID NO: 32801 - DNA, 1895 bp, Unknown
  misc_feature (1)..( 1895): 2750-1469P.txt file - cDNA_ID_3061420; gDNA_ID_1620377; Annot_ID_155173
aagcttgagtgtctttcagttcttgcaaaattggggcctcttttcacaatctgttcaagagccgagagtcctgctgcaatggaggatttacctgtctggaagcatgaaaatcgtgttgaatctctgccaacaaaggacccagttcttgcagtatttggccagaaagctactcaagttgatgaacccgaaccacaggtggacgtcagtctaggtgcttctggtcctgccctagttggagaagattttgcgatgccaatcgtggtaacttcaaagggtcatgccgtatacagtggtgaattgaagattaatctagttgatgtgggtggtggtggtttgtttagcccaagagaagcagaaccgttttctctagaaagccatcatgttgaaatctgtggtattgatggggcagagggcaacaatgaatccgagtctgaaacagggagcataaagaaaattcagcaatcttttgggctggtttctgttccatacctgaaggaaggagaatcatggtcgtgcaaactggaaatcaagtggcatagacccaagcctgtgatgctttttgtgtcattgggttacttgccacatggcagtgaagccaatacccaaaaagttcacatacacaagagcttgcagattgaagggaagatgcctcttttaataagcaatcgttttatgttgccatatagaagggatcacctattgctcaataggataaagccagcccctgattctgaagacgtgtcttctctgccgctgaacgaaaaaagtgtgttagttgtcagtgccaaaaattgctcagaaatagcgctgaaactggtgtccatgtccattgaatttgatgatgaacaaggggaaacttcatgtttgattcagcagggtggtgggtgtggagactccccaagctctgcaaatcttgcgccaggggaagagttcaaaaaggttttcacagtcataccaacgacgagaactccaaagcttggtttgggatcaatacatttaaaatggaggagagagggaggtaacataacagaggcatatgtttcaacaaagcacaaacttcctgaagtaaatgtggaggcatcaccactggtaatgagtttggactctcctccatatgccattcttggagaacccttcacttacgctgttagaatctgcaaccagacacagttgctgcaagaagcaaagtttggtctggctgatgcacagagttttgtcctgtctgggtctcacagcaatacggtttcagtccttcccaagtcagaacacgtcttaagttataagctagtgcctctgacttgcggtgaacagcaactcccaaagataactttgacatcagcgcgatatgctgctgagtttcagccatctgcggttgcttcaagtgtctttgtgtttccctcagccccacaagccgagaaagccatctctaccagcaagtagtgtaacttcgcatgacttgggttttcagatgtctatgcagtttcagccatatgtggttaagacagacatattgaatcagtttggtaaattttgatcctgaagtgtcgcctatgttgtattttcatttttccttctgttgttgataataatggatattttttggagaacccaaactagacacataggattaggacacaatctgttttgagatgtgttttgtggcaactgtttttctttcaatgcaaaaagtgtgtgtgtgcttaaaacgaccatacatggtcaagctaacgcagataaaacattcaatatttcgttgtattgggccttttgatatttgggcttcaaattatcacttgacgttgggtttgccttttctcacttgacgacaaatcagaattagcatctgtttagattggatcttgatcactggcgggcgaagttggagaagattgatg

SEQ ID NO: 32802 - DNA, 1649 bp, Unknown
  misc_feature (1)..( 1649): 2750-1469P.txt file - cDNA_ID_3061430; gDNA_ID_1620378; Annot_ID_155248
cttacgtgaactaccgtgatttagacctgggaaggaacacgaaagacgtgaaaacatgcatcaaacaagctcaagtctggggagctaactacttcaaaaacaatttcaacagattgatgatgattaaagcaaaggttgatccagagaacttctttagacacgagcagagcattccacctatgatgtaacgaggtcaatcaaataagaataaattagaagaaaatcagataatggttcttctgtatttcggaaaaatgttattctagctatgcttgtagtagtactatgtttcacctaaaattcgatatgttgcttcttagtacctaattcttcaatcaactcgagaatcctatttaaagttttgttcttgttcttgttcttaatggaatcaagtcgttaaaaacttaaaatcgatagttcttggtaaattaagatcgttatacggtacctaactcttaattaatgatcacaaggttgtgatgaaaccttgaatatttaatcaaaactaacgatataattggatatttttggatgtgatctttgttgcatctaaaataattagatatattggatttagtagaaatagagtttgcatgcaccaatctacatatacaattttgcagcaattttctgaaataaatcctggagctaccattggcatttaataattgtttttgataattagaaagaaaatctttgaattaaatatttaacaatcttcccaaaatctctccatattaactacacgattagttacttaaataaagcttccaaaatatttaatatcatttaattactacaaaattatcatttttgatattgtttttctacatgactataacaattcgattataatcatcaattgtaactttaaaaaacttttatatataaacttttatatgtagtaactttaaaaaataaattgtccccgcggtataccgcgtgttaaaatctagttatatttaaaagttaaaactaacaaaaacgaaagtgtacttgatagaaacatagcttatatggcctaaatgtggtattaagtcttccaaagcaaaccatgaatagtttaagttttctagtgatgtaatgcatataattttatggattttagatagtgttgttttgagaaccatagtgttatttatatagagattaattcttaatttggcccttaatcaaattagaagttattaagtatatccagatatttacttttcattatatttatgtctcatgtcatttacttcatatatcaattgagtacataaacttagattaatcaaacaataaccataacatactgattaataccccaattaagttttagagaagtaactttgaattcatatgactctttttaacttaattttggacaactgaatgtgcattattttgtcgctttacaaacccgtggaaaatgttggtcacgttgctatcatttcacctaatcgtttcgtttgacaaatcaaaccatctttgaatttagagaaaaattcaatggaccttattttatcagaatcgctatatatttattaaaaaaaatggaaactcatttcttcttttacaagaaagaacaatatacaacatttccatcttgaagccttattgtgtgtttagcttctctcttgcatataatattcgctgctaggatg

SEQ ID NO: 32803 - DNA, 3000 bp, Unknown; identical to SEQ ID NO: 1272
  misc_feature (1)..( 3000): 2750-1469P.txt file - cDNA_ID_3061448; gDNA_ID_1620378; Annot_ID_155241

SEQ ID NO: 32804 - DNA, 3003 bp, Unknown
  misc_feature (1)..( 3003): 2750-1469P.txt file - cDNA_ID_3061490; gDNA_ID_1620379; Annot_ID_155280
ctgaaatttcaatgcaagagttctgatattttggagcaatatccatcagaaagcactgaagtgtgaacaaggcttacctgattaactgcacacactgcagggacgttcatgtcaaacaagacattgaaaatagcagtcttaagttgccgccttgatgccttggctgattcagtatctgataacaaatttaataaaaccttaaaactggaaccacgagatgtaatcctgaacataaacaagtataataacagtagctaaccatcaaaatggcagagaggtagtgataccactattggctgcatagagggctttacctgcatcctgtaagcaaactatccacatgaaatcgggaaagcaaaagccatagagacaaatgctaaaatcattcagctgtcactccaaaagaaacgaaaaacaaacctggtgaaaatggttgcaaagaactgttgaagtctagcataaatcggtgactcaatgttaccaaattcctggcgatcgatcaaactagtaagaactatcttgtgttgcaagagagaagacgcaagcttactatctttgtaaatataaataatgatccgcatttagtacaaaaactatctcaccaaaaaagtagcagaacgtccagaaggagacgcatacttgctccaaccaaacttacaatatccagaaccaccttcaatgagtcgtagacgacacatacagaaacaaacgagacatattgagcacaattgaatgacataaatctatatgattatccagaaagaaaaacaaaaacacaaagcataccatcaataatgatagaaccaggaacttgtgccctctgactataaatgtgcataaacgacaactctcctgattgactagaaatcattctgcaaaatcgttaaactttgaatcatctacaatgttttaacactgaaactaccaaattcaaaaagaaacaaaattcaaaccccatcaccaaaattctctaccgataaaagcaagcaaaaaacactcaccggagaggataaccagaacgcaaactagtttcagcgaagaaaatggagtcccatggctcttgagaacactggagataaaatatccagagacgattaccactagctacgcatttccaggctttgcacgttaagcccaatttcacagcatcttttggctccatcatcatcagtatctggactagaatatccatcggtagctgatcaaacgcaccaagagacgatgaagaagacaataacagaggaggaacatcgatcgctctctgatgattcaccaaatccttgccactattcgatcggttccacaccgatccccatactttcttcaggatcatcgtcgagtttgcggatttttgttttttctcgaaatcagaaattttcccaagaaaatcgaatcaggaaaatttgataaacacggcgttttttctttggtgtgacgtcgtttctagttgggatgagactgactgacgtgtactgtttaatataatgacacgtgttcaatagcgttgaagaattttggtactggctcactaatgtcaataatcataacgatattttgtgagcccaattggaaaaaaaaaactcgaagtggtcaatatcacgtgctcaacttttattgttgttgttgtgaattacaaaatttcatagaaacagaaaaataccaataagtattgtttttagtggatttttcttaatctggtcgactccaaattttgttattttgttgtgagagcagtcctcttcctttttaagagtgttttgttaccaggcctgatcatttggttcctctttaaaagtgttgttactaggcctctgatcatttggttacttggatcatttttggatcgtatccattcagattcggattttgggtcttgggattttggttttgttaagagattttaattttcggtttcgatttggttcaattatatatggttcccaaaaatatttagttctacgaaaaaaactttcaatttcaaaaccgtttataataaccttagaaaaagtattttgttactttggcttccaaatttttagaccggcctacgggttaccattcggtttggttcagacttggtactggttattctagtataggaatcgagattctattcggatatttatattggtttattatgttcgggaattagtccgggcctagttgttaattgggttaatatctgatccaaaccaatttggcaaaaataagtaattccatgatgtatctgacacgtggatactaggtattggctgctattagttgacgtgtatagtatttgaaaaaaatgattaactaccttttttttatttacggagcatagatttttttttggagaagctgtgtataaattggatcctcagatccggtgattacctaaatcgcgtcaattctcaacccagttttcagatttggtattcgattttatttatgtaattctcatgttatttatcttttctgttgaaacctctctttctcgaaactactaatattagggttttctgggtttgagaccacgatcttatcgaattattaatatcctttttttttcctgtttcaaacatagggttttagtgcatgagatcgaataatatttatttttgtttccgtttctagggtttattcaattttttgcgtttttacgttgcaatttttattgaaattcagatttctggagaagtgaattttgcggtaagcgtaatttagaatttgtaatccgtattctcatggaggattcgaatataatatgagctctaaattgattttatgtttgcaactttgttttgtttatgtttttttttaattggtttgtgaattttgattataactaaatttatgaattttgcatggttgtgaattactatattgcaggtttttggaagctaacttattgttggaggtggagagatatggctgactttggtttgttctgtttcccttgtttaatggaagttgtttcatcatcatcatcatctctgtgattgtaattgatctcacaccatg

SEQ ID NO: 32805 - DNA, 3000 bp, Unknown; identical to SEQ ID NO: 1279
  misc_feature (1)..( 3000): 2750-1469P.txt file - cDNA_ID_3061494; gDNA_ID_1620379; Annot_ID_155279

SEQ ID NO: 32806 - DNA, 3003 bp, Unknown
  misc_feature (1)..( 3003): 2750-1469P.txt file - cDNA_ID_3061501; gDNA_ID_1620379; Annot_ID_155270
attggatacaagaaagctctaagaccatgagcacttcttagcatcaccacagctccaggagccatatgcttctctaaatgctcaatagctttgacctttgactctttatccatcccaacaagagctgccaagaaaacaacatcgtattggtctaacccctccttagcgtttaatacatcagttgtgtggaaaatcatgcgtttggaaaggtcagaatcacgagaaacgaggtttgaagcgagtgtgttggcgtgtgagtcgatgtcgaagttgtggaacgttgtgttggggaggtggaacttggccaagacgatggaagtaagtggcatcggaccggaaccaataaaggcgactttggtcgggacatgggttgtgtgttgagataggagatcgaattcgagtttgcctagtttgagatagttgttgtaataggggaagatgtgtaaatggtttagagggttgtcttcaaaagagcctaagattgctgaaaagtgttgctctaaataaccttcggcttcaccacaaagcttgatgagatgagatctcatgtctttgactttttcatcgtgtatctctgtgacatcgatgttcgtgtccgttggtaagcacgtggacacaagttgtctgaacaaagtgtcgacattcttggatggttttaagctctcgaggtttgagatttggttgtataagtccatgatttgcttcacaacgaggttgttttcgcaagccatgtcgacactatgaagagagaatattgagttttgaaattgttttcaatacttggaaaaaagcttgtgttgttgtgttgccttaaccctcgcaaggggtcgttatttattgacgcatgtggggtccattcttggctaaattttgttattttatttatttgattcgattcatataggttacaaatatttcctctaggtcattttaatgtatgttttagaactattgtttttttgtttcaaaacgtttcgtttccaaataagtcctcacaaattttataactgacctttatcattactatcctcaaaatagtaaaaataccatgtacaacttaaaaaatgtaaaaagaggacaatactgttacctattttcacattgcttaggaatgagagtaattaatggctgatcaagttactttagtcacaaattggcggggaacaagacaaactagtaacttatagaatcatatacactcttcaactaaaaatcgcgatatgttccatttatggattttattgggtttggtttcatgacgaatgaatttaccaaaataataagagtttaacacacattagaattggcttcttttgttacacataatagttttagacacatattttgtaaatcagtaaatggtaaatgccaacatgcaacgcaaacatttttttcttttcattttgtttatcgtgttttcatttacaaatttttaggtctattaattatagttataaggtaacggaaatgaacattttaactatattttcatgaagaaaaacgaaaaggtaaccaaaactcaaaaaattaagagtaatttttctccacaaattcacattaaatattagcgttactcgtcgagtgtaaatattccattagtgatgtgtgcgtatgcgtatgcttatgcttgtcattacgtaatctcactgttatgcatgaatggaatctaaaggaaaatactacgatttagtcattatacgtgtagtcgtgaataattgttaattgtatcaatcatacgagataacgtatagttagagttggtaatttaggcatgtctcataacatttttaagtcgccacgaaaatgcatcatattttttttttttttttaatgtaaaagaaataaagatgaagtaggtgatgatagcccgaaaaaataatgttctatctgaattttatattatatactgttgaattctaaacagtcatcaaacttaaaaatcttagattccattcactactcatcacatgctaatgctttgttgggaataaatctcagtcctttggggtcactcatccaattcagacatgtttttgtttttgttttttgaagaatattgttagacacgtaaattaattgaactcgctataatatccgaatcaaagtttgtattctaaacatgttttttagaactgaataattctgaattacatataaaaaggaaaaaataaatctgttttattaaagcaccaaactgaattaaaacatactactatataggttttgcaatagactgatgttacacatacattaatttatatcaataatgcctcttgcatgaaatgaatggccaattttacgtagctctcatcatacgttaaacgatcctataaaagaaagaagcggttctgttttcagatttgaatattaaccgtactttactaagatttatattcttgtcaaaatgcatctattaattatctatagtagatatggtaatgctataccctttaaattaagtgcgtatacatcatggtcatgttgagtttgagtgcgacgatccacgtagtcatatactcatatggtatcaaaatttctggagatttagtatggtaatcgaaaactcaaaaccctttatgatttttttgttaaaacttaaaacaaaacctttaataataaataaaatttgataggtatttagatatgtacttgcatattatgtcggacttttaaaataaaagtttagatcgtttgaacatccaaaaatcattaagtaagtcagataaaaaaaaaaaaaattattttttttatcataaaaaattaaaggaaaaaaaaaattaattgtttttttgctattgatgtatgttgtttcctgttttcgttcaacacatcgtgtcgtttttatacccggacattgttagtgtctaccatatagccaccacagcaaaacccgaacccggaaatattcgggtcgggtcgaagttgcagaatgagatttgatttgccatactttttgtcgcctgaacgcaaaaaccttgcttaaaccctagagagatagagatg

SEQ ID NO: 32807 - DNA, 3003 bp, Unknown
  misc_feature (1)..( 3003): 2750-1469P.txt file - cDNA_ID_3061509; gDNA_ID_1620379; Annot_ID_155265
ctttgattatatattgactatgtgattcgtcgtccacattaatttaagcatgaatctaattattcgccttttctaaatactaatattagaaaatttcctcttttttggattggttggttttccatattatcagcaagtatctaaatggttttcttactacagtgtcttcgtagtcgtatgagtggttacaaccaatggaattttatcaacatggccactcataagacgtagcattatcatgatcaaccataatatatgttatattcattggatcgacaaattaacaaagaaataagtagttttgatcgatgcccacttcttttcacacttctgccactacattcttggactgcttctgctactaaataccccacagtggaccagtttttattattataattgaatttataaaattgatacagacaaatgcttgtatatacttaattagcagaaagaaagaaaaaaaactaagtaaaaaattgcccatcataatcatcgatcagatccacttaattagtaatttataacactcacttagtaatatttatccttagttgcttatatatatatccctagacgtattttctattgctctatcatcatgtggtgagatctctgacctaatcgaaacgtgatatagatccagatcttgttccattgtcgtaatcaagtctacatcttttaatttatcttaattgttatcatcactattaactttcttaaaagtaagaaaaaccatcacacttcattataataaaaaccatcacccttcattgcatacatatgtgaacatgtataatttggaagctgcttagctataacagtcattaattgtcgacgacactaattcaaataacgatagatgcgatagacaaaagaacaatatggaccatttaatgataatcataagatttgagaaagaaatcaaaattttaacaagtttggaaaatacagttgggtacttgtcttttctcttgcatcttttgctgtctctttacttccttcttgtttgttggtttttggcttattgttttcccttttatttttcctctttatggaccatattcatttaactctccccacacatgttcgtctcttattttaattttattttggtatgactctcttatttatttattaaaactaaacaaatactccataagttataaaccaaagaaagaagttatagatcaagggttgacaaaacgttggagcttagtccaaatgatgaaatgcctcacacgaaatatgtacatacgtcgaattcaaagcgttagcaaaacttttggtcttaaagttgaggtcatttgtaccacggtgcgcctgagaatgatttagacacactagtactgtttatgcaaatgatttagtatgtacatttcatgtaaatgtggtagaccccaagagatattcgtatttttgtgagaaagaaactttgttacttgcttaccattaatgtaactctttaaaatgaaagaatatctgttgtctctaacttacaacaaaagttacatattacgaaacatattacatcaatatatgattaacatcaccagtttttaagtgaaatttacggtaattagagtacacactattccataattaaatacctgcagaataaaaccatgttgtcgaaatgctttctctcactttactatgtgtatagatatgcacatgcataaccatctctctacatatctattgatacatatttaatcttttgattctactatggcatgtgacttgaggtgtggtgttatatctttatatataatcttcttgacctaatgatgcttgacccatgatcttaattttagtttactttatcttttccataatctttttgttttgtccagttcctcctttttaatttttctaatcagtattctaaatttccagtccaagaaattggatctaaaacaccttcatcttaattcaatatatgtatgagcaagtgtatatatgtatatggatattaattagtattagcatacgtatgatataaacagataattacagcgaatgaaatggaccgacaatgctagcagagatgagcattagtaaatttaattaatctttcacataaattcctagctttcatgtgcatttcacactcttcaagattccatgtttcaactactaatttaataatttatatatcagaaatccaaagtagatatctccatctttctttcagttatttactaatctcatttttaccactatatagccacttcagactctcccaaagtaaacaaaaaaaaaaacaaataatcacaatccaaattatctaaatgtttctttcgaagcattagaaaaccccaattatgttatgcgtcgtttatcaataataggtagtagtagtactactagtagtagcattcaacaaatatcattattagtaactagaagtctagaagtcattattgatctgagtaaacgttatcttccttttgtttcttaaaagataacaatccagaaataacaaataatagggccaattctaacatgtcattttctgaatttgataacctaattttcttagatgatttatgactatgtaatagttagatctataggagttttttttttttaccatttatgaataatattatcagcatgcctcatctagaagcatttaccacagataaatccacttacaagaaaaggaataaatataatttaccactcttttcatctatatttttatttaattttcaacttatataattctgttttgttcacaaacaaataatggtgaaaaaataaagtgacattgtttggaaaataataataaagggaaaaaggtagaggtgctttttgggatccagatcttcctttactacttcttcttctctctctctcctttggtttgctctgtttttatatatttctataaaatcaaagtaaaaaccaaatccatggggttcttcgcttcacaatcccaacgcacctctctctctatctctcacttcttcttcttcctctccctcttcaccaatg

SEQ ID NO: 32808 - DNA, 3000 bp, Unknown; identical to SEQ ID NO: 1283
  misc_feature (1)..( 3000): 2750-1469P.txt file - cDNA_ID_3061517; gDNA_ID_1620379; Annot_ID_155261

SEQ ID NO: 32809 - DNA, 3003 bp, Unknown
  misc_feature (1)..( 3003): 2750-1469P.txt file - cDNA_ID_3061530; gDNA_ID_1620380; Annot_ID_155308
ttctgaaaggtgcaaaatgcaattatttgtcataaaagagagaatcccaataattagtgtatagtataatctaaccattatttacttaacaaatatggatttggaagcaaaaggaaatgactgtaaccagattctgcatgaaccccttcttatctattcaatgtattcaccattaatgccaatataacaaaaggacatatattttggacttccaagattttttttttggtcgaaatggactttcaagattttatattctaagattttgcaatcaaaactcagtagaacaaaaatgaagattgtaaggatagtgaaatcaccttaccttgtcatatgttgccttctcttgatcattctttggttattgtctcatcatgatcataatcatcactcttgtgctccatacatgaatactatcagaggaacacaattctcgcatcttcaacctgtaagatcaagattatgatccaattatgatgctttttatttaataacattatatattgatagatttggtatttctgatcataggaatcttcaggcttatcgagtctacttaaagaagcagctacagaagacaagatagtgattattaccatggtcgatcgagaatgggcaaaacctgactctattcttgatctattcctggagagtgtacggattggagaaagaaccaaacacttgctaaaccatttgatcgttgtggctttagatgatcaagctcttcgatattgtcttcgtgcccacccacattgttaccttcatagatattctagaaaaaaatcagaatctttaaaaccagatggtcttgttaccggttggaacaagaagtctttggttaaagagatcttagaactcggctaccacataatgttcaccgtaagttctcttaatgcaaatgtttccctttctacaaccagtttttatagaacaagtatgactttgtattcaagaacctaggttaggtacttaggtgggcacctagctagattggcatatcccgctccatgaataaccttagatggtggatttatgagttttttccacctaatatatatttttttttattcaaatttattgtttttgtccatctaattcttcagaatcattatttctaattattatatatgtcttagaatagtgaaacaactagagtttgaagtagaagaaatgttctgatatcacaaagccaaaaaaatagatcaaaatttattttatttttatctaaatcatttgtttgtaacaaattgtaatattgatttgttaacaagttttaaaattgaattattgattgtagtgtttatagaccatgttgtttacgtttttggttacatagacgcttaaaattggttgcaggaagcagatgtgatgtggctaagaaatcctctaatgcactgcaacccacaaaatgcaatatcagtggcttgcgggaactcattaattgatcatcaacatgatcatttaacaacggaaaacacaggaggtttcttctatgccaagtccaatgatataaccatagacatgtttaatatcttgaacgtagaaagggttttgtatcctgcaactggaaaccaatccttgtgtgatattgtcaagcgcgaagatgtaatcaaagcccttgataagaaagtcaccttcttggatgatgctaactttgggaagttttgtcaaccaaatccgcaagatcaaagcaagataacaacagtccatgcaagttgttgtcatgatacaaagagtaaggtgcgttacctaaagctacttctccaggaccggaaaaatatgaatccgcaatggattattccaagccagttatgcagatgattttattcgttacaattttttttaacatatgtataacattttgtacaacatgaaagaacgaaaaactacattaccttaagaccatgtttataggtgattttatttgagtatcataagcccaaaaatcattttttaatgcagtaaagcatgtatttgggcatgatctgtatcagtccactgatacttttgatactgagtatcagatgacgtgacatcacaccattggttcagcgaaaacaaagaaaaaaaagaaaaatcttctctcctctctcactgataatactatttttctttcgttctcttctacaaacctaaaaaatcagagcgataaacgaacaggtatgattgaactgaacctaaaaaccattttcctttcgtttttatatatttattttcgatgttgcaatttttttctttttatgatatttaaaccggtctcaccaatagaaatcgatttattacgagtatcatacaaaatcttaaataataaacaaacattaaaattaatattaaaaaattactaatgatattctatgagtatcaactatatacatgctctaagttttgaccaaaaagtagcctcatctgaagattcatcctctaaataactcatcttttagactttgtggcaacagttgaaggcacatgggatcaatgttatctaccatgtagattatccatccgaaggataggcgcttgagatcttttgtctatatgcttttaaacaaagttctcggcgggatggttatgaagagcatgcagcaaaagtagttaagctttgcggtaatcttccactggccattcgtgttgtgggttcttcttttaatggagacagctaagatgagcggatgcttcaattatatgggacagaaactaatcttgatagaaaaattgaggatttcgtcttcagagtgggttatgacaaattgttggagaaacatcattctcggtttcttcatattgcatgttttatgtgacaaccatgggtcgaagaccccaatatatttttgtattctttattgggctgactttatcataaagcccataaggcccattactttattctgtaggattcgtgaaacggccttatgattatgaattctgcaataaaaaaaattcgtgatttgtcgttacggaagaaaaaagggaaaaaatcgcgaagcttgagaacacatagatatg

SEQ ID NO: 32810 - DNA, 3003 bp, Unknown
  misc_feature (1)..( 3003): 2750-1469P.txt file - cDNA_ID_3061538; gDNA_ID_1620380; Annot_ID_155303
ggaaactttcagcatagtaattttacaggttatttactgactgatgtgatgaaaaacataaacgatatagatgaagagaaaactttttaccactttctaaaaagttatttagatcgttgtatttccccaacagaatttctggttctattacaactactggttcaagtttctagttccttctaaactgtgtgtttcgtaatggctttaatattttttatttgggcttccaaatattgggccattggctctgtaaaacttttttttctgatgctttatataataagacaataatgcttaattgttttagaaaaaatcaaaatataacatgcttaattgattaacattattatataatttattattttgtattttttgaatataaaaaccttttctatatacatatataatttagtgtacaatttcaggatttaatatgtggtatgacaggcagaatctttttttagtagtatagacaataatgttagattttacaaatttttttttgtattaaagttaataattgtgtataagtacaattaaaaaaaaaattgatgctgataaaatattcaaataagatttaaaccgtattactacttttggttgatgatattataaatttgtattaatattgatccaaacccgttccaccatataactctcgtgaaatattactttttataagtttaaatattaataatgtttataaagtttaaatagttcaataatatatttcaaaaattaatatgtttttgccttttacgtaatgacattttttgtaattcttactaaaacaaaataactctataaaatgtaattcaattttttaatgtagataatgttaaaatttataaataaatatttagtttaatcataatttatgattgatatgtatttgagtttttggactacctttcacgtcatttaatagcctacattgggtagttttgtaacattctttgaaataataatattatcttaatctatatatacatttttgcagtcattttagcaaataaatcttatagttggacttatttacaacccaatgccattagcattaaatctttttccaaaataattaattttactttaaatttttaatttaaattgtcaattacattatcaatcaaatttaatccaaacaaacttcacatcaatcccttaaaattagcataaacgtattttattaacaatattttaaaacaaagttttttgtttaaataaatattgttcttactaaacgttttttgtttaaataaacaaatcatgtatttgaacttatttacaatatcatgctacttacattaattatttaggcataaaaatatttatataagatttaaatcttctaaattcttgcttttagagttattatatcattacctaaaaggcaaaaaatattatttttttgaatattattatttgtatatttaaacttcataaaacattatcaatatttgaaattatcaaaagtttaatatatcaaaaaaattaacatcattatataatatatagagtttaaaaaaatctcaaaaaaaatttcgtcatattttgtgattcgaaattttaagaatgaacatatattaaccaattggcaaaaaatgtgtggattcaacgtcccgcaacgactaaaatattttgacaatgattcataaacatattataaagaagatcaacattaataaaataaatagtttttttttttgtggacgggtttggcaggacgttacttagtaacaatggtaaactataaaataatttacaaatttttatatatattaattttagaaaatgaattgtcttcatggtgtaccgcgggttaaaatctagtacatgtacattttactaactgaaaatatgagattgattctttatattacactgataatgaatgattcaaaactaaagatcagagtgtaatatagtttagcttagaaaataattaaaacaattttattatttatttagtttcctaaattttagtttagattcagaaaataattgtttaacttctttagaagatgataaacatatatggaagatttgaatctctattcatatatatttaaaaaatcaataatgtcaatataattaaaggatagtttagaagaaattttcttgaattctaaataattaatttgtatttttaaacaaatattaaatactgtaaaaacgaaatattaaataaatatggaaagaaaatcctgccttaaaagattttgtattattgaaaccgatttttttttacagcaaatttaaaccaaaaattaataaatacttaaaagagatcttaggaatgattttgtttgaagtaatgatttagtcgcaaactctagcaactaatcaactcctaaatcataaaaaccccaaaatatgcgtttttctttaaataactataattgtaattatctttaaaaatgtaacttttaaaattataaataatgtttaagataattataattgaaaatttcaataaaagcattttagagcagaattttgttttatccacttttggactattttgatctcatatacattttcctataacaagtgtagctttgttgattggtataaaatggaagtaaaaaagtggaatattccttattatgtcttttattttcacaagcccaatacagtttctacgaaatgtatatctatttatccaccaaaaaaaaaatgtatatctattttatttgtttcttatttaattagcatcaccacaatttggtgcaataaagagtatcaaattatcaaaacataaaataaataaatttataagccaaatattaaaataaaatctaatataataagatttgttcctatcccaaatcctaaatgtaagtacaacacattatttataataaacaagacagaggtctgatatttgcgttgaacagaatcgttgtcacttgttcagtcttcactacggagctgttttttttcgattcgccggaaaaatcataaaatccaaatctacaaccacctttttatcgcaatccaatg

SEQ ID NO: 32811 - DNA, 3000 bp, Unknown; identical to SEQ ID NO: 1285
  misc_feature (1)..( 3000): 2750-1469P.txt file - cDNA_ID_3061544; gDNA_ID_1620380; Annot_ID_155297

SEQ ID NO: 32812 - DNA, 3003 bp, Unknown
  misc_feature (1)..( 3003): 2750-1469P.txt file - cDNA_ID_3061548; gDNA_ID_1620380; Annot_ID_155296
tgtatataatatttacaaataactattcaattttatttataagaaaatacatatctcataatttatcttattataggtgtaacattatttgttcttaatagtcgtttaaatgtggtttattaattatatacatatacaatcttaattaattacatgctaaacaaaattgtacaagatggtatattggtattcagtccacttttatagctttattattcagttgtggctctaatcaaattttttttagttctttttcaatttatgcaatatagaaactgtacggaaaggagatggttcggttttgcatgatattttccagctataaatggcatggtagactacttagcagcaagtatttgtataaaatatgactgaaatcttctgaaatatctcgggctcgaatcctttaaacgagcattgagattcgagatatatcaactaagctctccatataaaggaaataaacaaatatgtatggtcgaagccgattaaaaagcaggcacacacaaacattaaattatactataggcaatgtgactttataacatatatctctctccacataggtctatatgataatttaattggatggttatccaaagcacccaaataattctgggaactgcgatgtgtgatctgattggcttattgctctttattaatatgagatttataagtatatgataaaattaggtgtatgggtcccatgatcaggctaaaacagcatctggtgttttttaccacatttcaagactcttgtatggtccttctttgtcctcccaaccaaccaaattgcatgaagtgtcctccatttcaaaattgaaaaaactggcatgtcagggcacatttggaaatatatacatgtgtatatattgtgtctctatttatggaagtgtaaagcaatgacccataaggtcttctcattgtcctatggtcggatctatgtacttatgtagctccggttctagggatgtgctctcattctatagctaaagtcatcttggtgtggttttgggtgtgttaatcatttaggttcggttagaacatttcacggaataaacctatcatttgcatttgatatctatgaaaaacatttcacggaataaacctatcatacgtatctttcattacctttacataatacatcacacaaaagcataagtattctttcaccttgtcatttttttttgggataaattctatcggtaaaaacatactgaaatacgctagagtggattcttttcacttgtcataaaacccaataaaaatcatatttattattttattattatttaagttcgtttcttaacataatacattaccactatctaatacctcatataaaattagatttaaaatcctataaacacacactaaattctgaaagaaataatgttaggttgtttaatttcttttttttgtttgtcaaatcagatatattgatataaaacaaggttacaaaatatataaacattataatacaattattatacgcaaatacaaaaatttgatacaattttgataaaggagtgaaagtaacccgacattacaagcaaataggcgttggtcatgatacataaatattttttaattataagaaaattactattattttaaaatcacaaattttaaactgtatattttcttaattaggcactgatgaacaattcgtgatacaatgtggaaacatgtctcaaatcgaaacccttatttgatatgttattaagatacctgctggggaggtgcctcatcccaaaataaactaaattaattaacattcatttaggtagaaaaattactataatgacatacttaatcatataattatacttttccttcataccaccaataaaagcagatcgctatctagctcttagacaagataatagcatagcttttaattttgataaagctgaatggtccttgtagataaagttaagagaagaatatgtttttttttttacaaaggcttgttttcattcattcacataaaaacaagtacaagaaggagtgattcaaagatcacaaagtttaaaacataattaaaggaggtattccccaaagccaaaacataatagaggcatttctctaagacacgaaaggaaatgcatagcattcaaaccgactcatattaaatcatctctcataaatgaaaaactacttccacttgagacactaaaggactcaccaatcaacatattaagaaagttactgtttcgtggcttgaaaatatgtagaaaagcttccaggacgatgtctcattcattaattttctgatgattccaaattcgttttccgaaccacaacttatgattgcaaaaacctaatgattcggcttgagttgagtcatgatgagaatttctcctgcttaattaaaattctgtttttaggtataagagattctattcagcaaagatattcaagatgagtaacagatattaaacataccatgaacattcacaaacctgtgggaattaatatatgaacttacctagcaaaagcgaacatgtaatttctcatttacattttcccgtactatgtaaaattgaaacacattttcaagtttaaggaagattataattttggagtcgatgtagtatcccgagagcatacgaaacatatgttgtattttcaaatttgcgcctctcgatattgaactacaataatgcatgttagattcaaagcagcctcgctttggaccctataaaatgagttaatgcaagccataataatttatcgatcgacatatttactaaacaagccagaatgtgatctcgatctcagcctgtgttaatctttttgtaattgaacattctggactaatgaactcttcactattgaaaaaaacaacaacacatagatcatttacacaaagtctccctttactaaatttcaagatttggtccatttattccaatgagaaatattccagatattttttttggctgttgactgtacggataggcccttaatgggcttttaatggattaaattaggcccatg

SEQ ID NO: 32813 - DNA, 3003 bp, Unknown
  misc_feature (1)..( 3003): 2750-1469P.txt file - cDNA_ID_3061563; gDNA_ID_1620381; Annot_ID_155328
acattcatacatccatacatgcatacattcatatatacatgcatgcttacattcatgcatgaatctatgcatatttgctttcttgatttattgattgcttatttacttatttgatttcttaactagcttgcttgttttttttttctctctgtttacttacatttataacttgtttacttcttgtttgtttctttgattatttgatcgttactcactccatattgcttcatttcatttcttaatctgtgtgtttacttccttcttattcccttcattgtttgctcagaccgtacatgcaattcacttgtttacttatcgtcaatttcttgatttctttgattatttggcagtcgcttattcaactgattcattcatggcttagctctttcacatgtttcctctttgattctttgtatctttacttctgtagttgttttcttacatgcttactttacttgttttattgtttctttcatttttttgtttactcacatcattgtttatttatttatttgcttctatttagttatatacttctttcattgtgtataaattttttgaatttatacaaatgtactcatataattttgacaacaatatgaaaaatcgaaacactaataaatatccgaataatcaaaccgaaactgaaatataaatattatttcaaaagttattattataaatctaaaaatatcaaaataaataaatcaaaaatactaaaatacctaaaataaccgaaaaatccaaaaattaacaaagttttttttcaaatctaaccaattcctcatatataaaatacatgtatggagcctccaaacctaaactctaaaaccataatctaacctgaactagtacccaaacgcctaggcctaataacgtatatgccacttataaaactttataacatttccaaattttcattaactgtataataatttattatagatgaatataacactttagctagagatatttcaaaaaaggtcactcgggatggtagaataagatcgtatctatctataagtggacctttgtggcttcattctcttaagatatattagtcgacacattatacatgttaaattatatatattaatattaatttgaattgaaagtaataaattattattgttttagttgatacaataaaagaaaattttaaaaactcttaccaaatattaaattatttttgtttctacaaaataactctaattagtcaatagttaatacaattgaacaaaaaaaaaataatttgatatgtttaaaaagtattaataaaagatagtaaaaaatagaaaatattcaatagtttctgaaatgaaaataaatttttgttttaattgtttatattaactaaaacaatcgacataaaaaataataatattaatattgatgagagatatgggtgcctcgtcatcaacggtgcagaatctctgttctctgagtcggacccgtattcgatcgattttgtgtcgaccggacggcagcaggattagccggtgagaaattccaaaccagcgggtgggttaaaaaagggaagggagctaggaaaaagtttcacttttcttgaagtgaactatggatcctgcgcagcgaatcttcaggtcaaggtggatgcttctgtgtcatatcgctgcaagttggttactacaagaactagtcttaccatagtccatagatggttgtttgaagattcctctgcaaggtaaagctacgaaggagatgatcgagcttaacgttgagaagttcattgatgtgggaacagtggatcaccgcagtgaaactccgtactcaattcctaaatcgaagctgactctagagtatttgagagaccatacttattttcgtgcaagaacctccatgattgcagcagttacaagaatccgacataagatgtgtcttgcggcgaagaataggggccggactgcataatactattatttcaagttattcactgcctaactctattgtcttgtttattttaacgtgttagcattagaaccctaaggttcgatatattacagtgatcaatatgacaacatgtcatgtaaatgtaattccactctccttttttcttcttcttgatatgtaattcattctcttttcttctaattctaaacttttttttttccactcattctaaacaattaataaactcatttcttataactttttccttttgaacccaaaaaaagaaacttttttgactagaatccgatcaactatggaaaaggactattgtgaataatctcctgaattaactagaaagtgccaagagctccattaattttaactggattcaaacatcaagatcccaaaaagatgcaacacttgtaataataatgataaattagattttaaccgcgatacaccctgagacgatttattttctaaaactagtgatttttaaattaaatgattatgcattatattgcaaatgacatcatgttataaaatatttttttatataaatattttaatatatagtttgcaattgttataattatattatatgatattttggaagagttaaaaaaataccaaacaaagttgataggtaaatcataatttttaatcttaaccatttgttttaattttaaccagattcattattttaactggattcaaacatcaagatcctaaaaagatgcaacacttctaaaactaatatagattaatcaaatcaaaacattactaaatcaaaagttgagatcacaatcattagaacaagtcaatcgagctaaaaatatccaacaaatgtgtcaaacttccatataactctgatctcatgaactaaatatggattaatcatcctaatctccacttaatccggaacaccccatattccaacactttactgacatgtgtcagaagatgaaagctccatgagagctatataaattatggaacctttggaggaacttaactcaattcaatctcataatcacacttttattcaaagaaaatacttaactttcttttcactaaagctattcgaaaatg

SEQ ID NO: 32814 - DNA, 3003 bp, Unknown
  misc_feature (1)..( 3003): 2750-1469P.txt file - cDNA_ID_3061585; gDNA_ID_1620382; Annot_ID_155357
aaggaataatttggttaatgtgaagcgttagtcaaaaaagttatatcaaaagaggactttgcagaatgtctttttctttagaatctctgtttattaaaaagaagtgggtccgttcagaaagaagaaagagttactttttataaacaacttgtctatttctggtaaaggtttcaaaattccttcaaatcaacccaacacaatgaatacaagatggggccaataggaatagtaaaacaagtggtcaagttagtaactcaaaatgcaaattacactctccctaaccaaacttaagacaatgatgatcagacagagaaactctacttgaaacaaacatgcagtatagtggatgaagaaagagtacctgtttcgccatgctacaagctttctctgaagagttgagaatctcgtagtaaaacactgagaagttaagagccaaaccaagcctgatcggatgtgtaggtgctagatcagcaactgcaacgtccttcaatacaaaaacccacgaatgagcaaaaatacatattttcagaacaattatatattactaagacatattagggaagcaattgatcttaagcccaaatagtaaaagttgactacttctaacgataggatcaatacaatagctagattcgagaccaatttacttattatgagacaactgattacagattagctaattgaagtaatctcagaaatagggttttagctccacaacaggatcgattcaaggatttagggaatcaaagatatacctgagcagctttgtaagcgatcatagtatcttcagcagcagttttcctctcatcaccagatttaaactcagccaaataacgatgataatctcctttcatcttcaggtaaaaaaccttagactcactggcagtagctgaaggaattagatgcgaatcaagtaacctgagaatcccagaacagatcgaagaaagctcagtctcaactttagatctgtaatccttaacaagcgacacgtgttcttcgttcttcctgctctcttccttttgctcaatcgaagacacgattctccatgccgcacgaagagatccaatcacgttcttatacgcgaccgagagaagattcctctcttctacggtcagctcaccggccggtgtagctccacttacgagctgttccatgaattgaaccatctcttcgtaacgctcggcttgctcggcgagcttcgccatgtagacatattgatctctgcttaaggtcgtcgccattagagaagaagatctcgctttttttttcgatttcaccggaaaattttgaaatcggaggaaatttctggaagaaaaaaagaaattgagaagaagaataaaaagcttcaaagccgagtcataatgagctgtaaaaggaaattctcttcactcgcgcgtgattaacacactctgataaacgacgtcgttagttgaaataaggattaacagcgtgaaacccacgttgagtgtacgaggcgcgtggctaggtttcggtttttttgataagagcgagtgaatggacgataataatttagtgcgtcagcttccccaactagttgacactgttcaaggtcaaatgttagaatacgggcttttgattaggctttagatgggctttttgaagcctgttaaagctattaccttgctggctaagcatatgcgttttcggcgtgacctggacacaactaatgtggtcggagaaaaggcatatgaagacaagaaaaagttgtccaaattctttctttcgttgatattaatttttcttttggtcaatactcatattctttaatttcttatattgttgattaaagaaaattaattattttcattttccaatactttaaatttaaaagaccggatcaaattaattgaattcgttttttgtgggtttttatttgttgattcattgtaaatttcaataaatgagaattgatgaaaattatgctatattaatttgattagtcaaatgagataattgagatccggcaggacatttgtttggcatgaaaaacaaaataataaagagttggttaatcaaatgcgaccaaatcattagatcgaaaaatctgaagaaatcgattactcatgtttttaatactggaaagttgtttagattatttgggttaacaaaaatctgtatacactcgtagttcttactaatttataacaaaacctaaattctccaaaactaatgtaatgcaaattgattctctgatagacgcaccgtcacgcgcgcataacgttgccgttatgggagaaagaaagggcgtatcttcacttgccacgtcagttttacgctaagcgtaataaaagtcgccgtcaccgttaattgacgtctccatccaacgccgctcttcttctccgctctcaccgtatatatttttttcctatggtggcgcaatttttactaaacttacataaaaaaaaaggaagattaaataaaaaaagagaaagaaatataagagcttcctcaatcgatcttccatttttcttcttcttcattgtgaaatttgagtccaatgactgtcactggtcgaattttccacctgtagtcaatttgaagaaatttaaccagtttgttctactggaaaaatttctggtttcacacttgtgttgactctttcactggaaaaaaagaaacgaaaaaactccgaagagtcttctctgggcagtgtaagtaagctaatgcattaacattttttggcattgagaagtagatcgattcttcaattttgtgagtttccgttcacgatttcgctttctttcatgtgaatttcgtgaaagagagaaaaagtaattctcatctttcttgctacattctctttttgccgttttcactagaatttcgcttttgtagccttcgattcgtttgatttcgtttgatttcgtttcagttgctatgttttagggatttcattatagaactgagatttgattgttgaatgtgaatgaaaattttgataatttttcttctgaaatttaggttaaaaggtaaggagcaatg

SEQ ID NO: 32815 - DNA, 3000 bp, Unknown; identical to SEQ ID NO: 1294
  misc_feature (1)..( 3000): 2750-1469P.txt file - cDNA_ID_3061589; gDNA_ID_1620382; Annot_ID_155356

SEQ ID NO: 32816 - DNA, 3003 bp, Unknown
  misc_feature (1)..( 3003): 2750-1469P.txt file - cDNA_ID_3061649; gDNA_ID_1620385; Annot_ID_155429
ttataccaaaacaaaaagttatcactggactctaatttatcggcccaatatatcggtccttttatttgagttgggctagttacaatatatcggtccttatcacgaagtgcccatccaatacctgcaggttggtttggagatagccatgaaccatcaacgaagcaacaatacgaattagcttgcttaagaattaatttgagctattccattttctttcagactttgcactttctttgttgcttcctgtttatgctttacgtctaatccatccatattcacagcttcgaaccacaatttacagtcaaagcatggctttacttattacctccggtattgcccacttcctattattaaataaaagatcatttctcattttccatatcctcctccagcctatagaagggtttaactttaaatgataggatccctttaaatgatttaaatatttaattgtctttggaaaaaaagagagtcaaaattgcctctgcaacaactaaaaaaaaaactaaaaagggaaacaaatcctcatcgaatacagtgaatatggaaaatggggaatcaatatcaaacaataccattcttggaataattctcggattcatttttgaagaaaaaacaagtaatggcaaattttcccaagttgtgtccccctttttataagaaaagaagactcagcaattgaggtttttagagtgagcaagaaccttgtgtagcaaaaaccttaaatccgtcatctatgggaagtataaactctgtggctgaagctaaaacagaggaagatccttcgacaaatcagggagatggggacgacgaatcacctagaaccctaattgaagatcagagagatgtggaggaatcaaaaaccctaagtgaagatcaagtagatgtgaaggaatccaaaaccctaattgaagatcaaggagatgaggaagaatctaaaaccctagatgaagatttggatgaaacagaggaagagagtggagagtgccctttatgccagttcataaagggaggtgagtgtaaagaagcattcacagaattggagaattgttgcgacgaagcaaagaagaacaatgaagatcacgtaagtaaatgtaaggaggcaagactcatctttaagacttgcatgtatgataaccctgtttactatgagccccttcttgctggtgaggctagagcgatggccaagatgttgagcgagttgttgaacgcggaaaaggaagctattatggctggtgagcctgcagtcattgcgagggcgtttagcgggttgcaagaagagaatgctgagccaattctgcctgctgaagctgcagcgatcgggaaggcgtttcgcgagttggaagctggaaagaagaaggagaaggaagcagagggatccgagggtaatgagagtgatcatcagaatcagaattaggtaaagctttttttatgagcatattgagacttacattgatctgaatgaaaattcaaatttcgttactcttaattttgtttaggtgtgtcttcttatatacaccattggttatgtaatttggatgcatctataaaatactgtcgtaatcaccttcttctacaaaaaactaagaccattttaatatacattttgattttttttaagataagactttgtgcaagagtttttatccaatgatagaatcttaagtgagacttgagtagtacttatgctcaacttttgaaacaagagatagaagtaaaagaaagaagcacattcctttggcacataaaagtcatcagcagtggtcttcaggatcttccgcaatacgcttcaacatgaatagcagccatacggtccatgaagtgatcagtggtaatcactgcaagatgatcttcaacaaaatcttcaatcttcttccagtcacgatcaaacctaagaaacagagagcagtagtatcatcagcacaatcaggtcctgctaaaatcaatataatacttttaaaaaaccacacaagtataaaattattacagttgaagtgcttcaagaagcagatctatttagctaatcaaaaaagatcaattaactcaaggaagcagatcttttttagcttaagttactactgacctaacactatcataaacttccctctcgttcacttatgtatctgccttgacatatcagtttatatccctaaaagccagcaataatattgaaggatctaacactaaggaaaactaaaacatgcattgctcgccaatccaaacagaaactcaccaaatcgtaagtttcgatatcatccaaaccaaacaaattgaatgcctggggagagagagtcttactgaggaaaaatgcttcaattagcccaaatattaaagtcccaatataaggagactttttgttaaatttttagcccgattaaacataacattttttaatcagcatgcaatattttcatttaatgtgctcggttctgtcacggacactgacatgtaatttttcattttcacgggtgagataattttcagacaatattagaatttttttcttccctttgtagttattcgaaattatgttattgttgggaagtaatgaaaaaaaactcaacaaaattcgatttaatacctatccataatattattgatcctaaaaatagaaaaggataattttgctgagtcagaaacgtgatattcgcgacgttgtttccggataaagagtaaacgtacgactgctttaactcacctataaaatcacgaccgtcgatttcatttatgtcaaggggcaaaactgaaaatcacacaaaaacaaacaaaactttgcttacgtcacatcattatctgtgactaattcttaatcatcatcatcatcatcacttacttaaatctaaaaaaatctctgtttgtatatatattatctttgcgatttttatccaaatcttccaaagcttagttttttttttttttcaatttctctcttgcgttttcgattttattacaagaactttgttttgggcttcatccatcgttcaaggttcgttgaaaactatg

SEQ ID NO: 32817 - DNA, 3000 bp, Unknown
  misc_feature (1)..( 3000): 2750-1469P.txt file - cDNA_ID_3061653; gDNA_ID_1620385; Annot_ID_155426
acgagagggaagtttatgatagtgttaggtcagtagtaacttaagctaaaaaagatctgcttccttgagttaattgatcttttttgattagctaaatagatctgcttcttgaagcacttcaactgtaataattttatacttgtgtggttttttaaaagtattatattgattttagcaggacctgattgtgctgatgatactactgctctctgtttcttaggtttgatcgtgactggaagaagattgaagattttgttgaagatcatcttgcagtgattaccactgatcacttcatggaccgtatggctgctattcatgttgaagcgtattgcggaagatcctgaagaccactgctgatgacttttatgtgccaaaggaatgtgcttctttcttttacttctatctcttgtttcaaaagttgagcataagtactactcaagtctcacttaagattctatcattggataaaaactcttgcacaaagtcttatcttaaaaaaaatcaaaatgtatattaaaatggtcttagttttttgtagaagaaggtgattacgacagtattttatagatgcatccaaattacataaccaatggtgtatataagaagacacacctaaacaaaattaagagtaacgaaatttgaattttcattcagatcaatgtaagtctcaatatgctcataaaaaaagctttacctaattctgattctgatgatcactctcattaccctcggatccctctgcttccttctccttcttctttccagcttccaactcgcgaaacgccttcccgatcgctgcagcttcagcaggcagaattggctcagcattctcttcttgcaacccgctaaacgccctcgcaatgactgcaggctcaccagccataatagcttccttttccgcgttcaacaactcgctcaacatcttggccatcgctctagcctcaccagcaagaaggggctcatagtaaacagggttatcatacatgcaagtcttaaagatgagtcttgcctccttacatttacttacgtgatcttcattgttcttctttgcttcgtcgcaacaattctccaattctgtgaatgcttctttacactcacctccctttatgaactggcataaagggcactctccactctcttcctctgtttcatccaaatcttcatctagggttttagattcttcctcatctccttgatcttcaattagggttttggattccttcacatctacttgatcttcacttagggtttttgattcctccacatctctctgatcttcaattagggttctaggtgattcgtcgtccccatctccctgatttgtcgaaggatcttcctctgttttagcttcagccacagagtttatacttcccatagatgacggatttaaggtttttgctacacaaggttcttgctcactctaaaaacctcaattgctgagtcttcttttcttataaaaagggggacacaacttgggaaaatttgccattacttgttttttcttcaaaaatgaatccgagaattattccaagaatggtattgtttgatattgattccccattttccatattcactgtattcgatgaggatttgtttccctttttagttttttttttagttgttgcagaggcaattttgactctctttttttccaaagacaattaaatatttaaatcatttaaagggatcctatcatttaaagttaaacccttctataggctggaggaggatatggaaaatgagaaatgatcttttatttaataataggaagtgggcaataccggaggtaataagtaaagccatgctttgactgtaaattgtggttcgaagctgtgaatatggatggattagacgtaaagcataaacaggaagcaacaaagaaagtgcaaagtctgaaagaaaatggaatagctcaaattaattcttaagcaagctaattcgtattgttgcttcgttgatggttcatggctatctccaaaccaacctgcaggtattggatgggcacttcgtgataaggaccgatatattgtaactagcccaactcaaataaaaggaccgatatattgggccgataaattagagtccagtgataactttttgttttggtataaacaagtgaataataataataatatctcctagttagaccaatcgaaaaaacaaatgaaaaagcttttgtaatctatgaagtttgttttggattataaaaaaaaaaaaatctatgaagtttgttttcgagtggagaaataaaatatattaaaaaatatcttaaacggtgagatattttatcttgaaaaataaatatcttgagaatatgtactttcagaaatcagtaaagccaatgtaatccacttgtggacaaatttgaaaaaagccgacaaaatacttttctaaaaaaaactggcgtctttggaatggtatttttgttttgaacgttaaagattaaaatttaaacactaaaaatatgtttattgaaaaagaaaatcctaaaaggatattgtcgaaaattagatatcttccagcaaatttagaatcaattatcttcttttctttgttctttcattttcttaatttaaggcggaaagaatacaagcaataaaggaaaaatagaataaaagaagaaaaaagcaataatgacagcccaatccacgtagcttaccaacttgagaactgtgacgaatatataaaccacaaaaaaaacatttgtttatgaaatcagttgttgagaagattacgtagctaaagaagataacacattctctcaccccacgagactcacgatctacgagtcactcacacacactaaccaatcggtcaataaacaacacaccaataatatcttcttttgattacttcaaccggtcaatatcatctaaaagtcaaattcttgatcccacaaatcacattcttattagttagagtttactccttccaatcataattcgaacccttcaagattttcttctctctatctctctgtttctctctgtttctgagatg

SEQ ID NO: 32818 - DNA, 3003 bp, Unknown
  misc_feature (1)..( 3003): 2750-1469P.txt file - cDNA_ID_3061657; gDNA_ID_1620385; Annot_ID_155424
ataatgaaacattggtttgtcttattacagtatatacaccccttttatttaattacctttaatctaacatatctctcaaatcttatctggcttcacattttgaatttgagatttagctggatccagtatttgaacgttttcttcatcaacataaatttttgctcaaatcagtattttcttttcaaatcgatatataaaagctagtaatgatttcaataactagtaagaatataggttcatgttcagtaaaaaacatatataactcacatgatgttaattccagacttccagtattaagctgttagaaattatttgttgaaaatcttggggatatatgatatataaagaattaaagattagctaggaaatgaatcaagaaattgattatttaattcaatttaaagaagcaatacacacctatctaagcttatcctcttatgacaattaaaaatatcacccacactaatcagctcgattataatgtcttaaagattgggttttgtcaaatgcatcgattctagggttttgaaaaaagacaacaagaaacatttgcgttgcttttatttaaagctctgaatttcctggtgtctttaattttttattatattatacagaatatattttattatattgtagggttattaaattatacagaatattagttgctcctttatgaattttgatggtttcctcttgttattttgttgcctagttgggttccttatctcacttgattatttaagtaactaattaatcattttaattaaaaaatatattcttttgtaaatatatgctttaatttttcaaaagatatatttgtgataattcaaggtcaattagtgtaagttgtctggttgttcagatcaattattgtattcaagcttctcctgattatgataaatatagtcttaccaccaatcaatttaatttccacaattagatgtccttggccgcattaataaatcctcgaaactgatatttgcttaagataagaaaagtaaaataaagtattcgtatatataaggttttagcgagctaaatttaatttgatataccgaatcggcaaatcccataaacaacctccgatcaaataaatccttatcaccgttacttgttattgatacaaacttacttacttgatttgacaaaaaaaaaaaaacttacttactttaaaacgtaactcttgcatggttggaaaagccatacaatctttttaagtaatgattgttgaccagattcatgtaaagcaatttgttatataaattatgaccattttaacgacagtatatatatttaacaatgtaattaataaatctacggttaattttgcaaaaagaggcaaaataatttaattagatgaatgacaatttggtagataagaaacttaatgtattatttagttgatagtatttttgagttttgaaactattccatctaatattttggtagatggctatagtaataaaataagatgcaaatcttagttaagaaaatacaaatgtaaacttacatggcgataacacaaatccaattaaaattttgaatttccacagagaaatcatataagttaccataaaaatgataaccctcaaaaacttagatgattgataaagttgctaaagacgaattcacgatcattattatagaggattacagttctaaatatttacagatttattatgtttatatataagtcatgcatctattcctattcaattctattcgaagttgaaaatgcacccatttcgcgtagactatagaatccatatgattaaactatacctagctaaatgcatatatttatggaaaaagagactataagtcaaagaacaagagtttctagaacaaaaatgggagaaaaattaaaaacggcctagacatggaaattgatgcttactttaagatgaagtcaatcttattttgcaaggagtcgtaaccgtatatgtatggtcttctcgatatcgacgttgctccttacgacgcacgcattttcatacataccttcggttattttctttcttctaactgcactttctatagttgaggactgagtatgtttgaacaaagttgttcttttatggttctcgactaattttatgatgggcatatatgtttcgattggtataaatgtacaaggaaatgtcggaattttaataactaaaaaaaactgtgtaacaagagaatccacacatacacattttgtcgtcatcgccgagatttagtatactggccggctcagtgtttatcatttatttttttgttccagtgttcatcatcttgttaacggaaagtaaaaatatttataatttgaagtttatttctttggtcattatacattatgcaagttctgaaaactcacttggtttcttacccaaaatttctatcataagaaagtcagaattttgtatccctttttcattagaaattgaccactttataaacttcagcaaattatccaaattcaagaagtaaattaaaatagctaatgatatttgattggctgtagagggaacatttcaacccaagtcacgacaaatcaagatgatggtttgtttcctgccctttaatttgacctattaattaaaatatataaaagtgataattggacaaatttttcacgcaagtgtttctttacgttaatgattattaaaactgagacaacttttaacctttttcaaaacaaatgatataatttaattagaggtttagaaaactaatccaaaatgcagaaaaagcaaaaaccctagttagaaaaatatacaattagggttgaagttgaattatgagaaagacattaaaacgcggagaggacttcatatagtattttttttaatatttacttttcagttataataatcatcaactaatatcctctttttctcgtctttatatatcatctcatccaagcattagatcatttcatcatcacaccaaacataattaacacttggaagagaacaacaacgacaagatcaagaaaagacaaagatttgtaagaaaatg

SEQ ID NO: 32819 - DNA, 3003 bp, Unknown
  misc_feature (1)..( 3003): 2750-1469P.txt file - cDNA_ID_3061661; gDNA_ID_1620385; Annot_ID_155418
tgttccaggtgatttcaactgttcatatacaaaaaaccatttcagatacaagaactttataatatgcaaaaacgaaaaacagagattgttttgttgaacttacgtaaagtgttgtgactgttcctgcggagtttccagggacaagcttcatttgcatggagactttaccaaacaagtactcgtttttggattggaatccagaaccagaggatttatctagagataaagtgagaagctctccattgttcttgatctgtccacgaccatcaccccaagtgatctcaacgtctctttggaaattagctgaaacagaggaggtgatgataagagaaagaaacagaggaagcaagtaagtgatcgccattttctagagattgtagatattcttgtattgagttagattggtttgtggtttttgagggtttatggaggaatgtatatatagtaagtgagtgaagaagatttttaagaggcggttcgtatagaggaaggttcgtatggcgaaagaagaagccgcgtctttgaggcaacagctggtgattgggccatcttgtagtaaaagcctgtgttttatttattggctttggaaatcacgcggtttttgtttagtaatgttacctttttttagtaattaattattacttttatttttttggtttcagatttaattggatttgggagttttttcctcagaaaaagttggatttgagagttggattctttaccaccggcttggaccgaccttgacagaggtagagttttagtctaatagaaccaaattattctgttataaaccaaaaaaagggggaaagtgttggtttttaaaaagttaattaaaatatgataaaacttttgagattttttttatctaaaagtatttatacgattttctgacattattcagtggttttccaattttgtagttcttttgttattactcttgagtgttattattcactaggtagtaatttttaaaaaatgaaattgaactttgagtaatttttgtggtctcatatttgagtttttttttttttttgattgactgacacttaacaaatttagattggttaaggtgctaaagaaaataggataaggatcaacattgtattttatgattttgttttattataaaaaagctttgatgaaaacaaaatttgaaacggggataagaaggaagatgccacgttaaagagtggatatggtagtagttggtaaaatgatgaaattgactgactcaaatgtttaattgtcgtagtggagacagctaatacattcaacttggttggttggttacggtcgtggtcaggaagcttcttttgtccaaatggctagatcctgtgatgagcagtcccaactcttacgcaaagtctagaattcagcatttgatttcattttcttttacttcaattctcttaaatgtttttttgtagatatttttctttacgaaaagttttgttgttttggatttgatatgtaaaggaatttctttttgtatcattataatatatttgctaatttcgggggttataatcctctatcttttaaataattgaaatttacggatatggatttcgaaataatttcatgaccgcggtgaaaatcccaattttaatatgatgagagacacatttcttaagttttgggtgaggaaagattaacaggagatattaaagactatacgtaaaacaatatatcgttatgggcctatttaaataaagcccacgaaacttccgtccgcttaggtgaaaggtttcaaaaacaaaaaaaattggtcattggcgcttcgtctcgtctagttgacttgctcttaaaggttagtcttgattctcttatagagttataggaatggccttattacgattgttaaaatttcgcagtttgtatgttagaatatcgtcatctccggcgatgaagttgctcaatgattttttttacaacctatatctgaccagttcaaccggttagcagattaatgacgaattttcccagtttgaagttaccggtttctagtactaaacccaaaccgaaaaaaagttcggattgtgggttaaccagtaagtctaggtcaggcgtgaaaacactggtaagaactcatattagtaatgtttgagacaagacaatgacattggtttttttgatgtctcacaaactttaagggaaaaatcctaaaagagactcaaaataaatataatttggacgtttaatacccaatatttttttgttggaaaaaaatatctcaaataataaaatacttaatatataaattattgatagaatcaaactcacgttaatagtcgctaagggaagtaacgtagccatttaacgtcgttaaatttaaccatttgaatatatattagatgttttacggtttatacaatgatatatatgtggtccagaggttaactatttccacttctacacatgacaccagggttcgacacctgacaagtttttcttttaatttttttttttttggtctttgtcctcgccgtcgacgacgtcccagagagatgatagcccatgaacaagagcctccaattccaaaatttcaggcttttaaactcttcccctcctagatcgatctccaatcatcacatatcgctacacccacatcattcaatcatagctctcgtatctccaatcatcttttcattcacctaatcttacaataaacgctaaaactctcatacccaatcgcaaaagagaatgaagaagaagctccagcgtctaaagagtacggattttataactgtggccaaatcatcctccaattgtgctatccgggatggtggtcgacggcggctctagggcgaaggaaaaaaaaaattccaaaaattaattccaaaaagactcttgagagtcttgattccccattttccatcttcactgtatttgatgaggattttttttccctttttagttttttttttacttgttgcagatttgactctcttttttttttccaaagacaattaaatcatttaaagggttttgcctctgatg

SEQ ID NO: 32820 - DNA, 3003 bp, Unknown
  misc_feature (1)..( 3003): 2750-1469P.txt file - cDNA_ID_3061685; gDNA_ID_1620386; Annot_ID_155443
ataaacaaccaggacttgatcattccttgctcaaaaaccacacaatccaggtatatatatatatggtttcagaaattcgtctgctacatacattttagatttttaaaaatgtgagttttgaatctggctattgtttttgttaagatgaaaccatcattatcaagacatgagctaaagaatcaaactagcaacaacaaaacatataagaaggacatagaatgtccatatggaactattcctgtattgagaaacacaaaagaattcaacaccaaagcccaactcttggctgccaagtatttcaatccgttatcagctgatagccctggaacacatgtacgcattcacttttctgttaataccttagatctaattatatattacaagtgttcatgtatattggtagatcgctggggtaaagcaacacggtggtccatatcatggtatagaagctaagtttaatgcatataacctaaacattggagaagatcaagcctcatatagtcaaatgtatttaggcagtggacattatggcgaagtcaatttcatttcaacggggatgatggtacgttttacattttattgttcttttttttccttaaaatctattttacgttatgggtagtcttacagtagtgcaagtctttttaacagataaatccaggcatttttggtgacggacgtctttggacatatggattttggatggtaagcatgtgaacatattatatatgctgaaatcattaaccaaataatatgtaaatattacatatgattttgatagggtaaaggtggaaaaggatgttataacatggcatgtccagggtttgttcaagtatcgaatgtggttcccttagtcaaacccatgtaccttaagccaggggagcctgcatcgttgcaatgggccatccatcaagtaagtttttaattttctacacttcgtttgttttttaataatatgttttgcagattttttgtttgtttcaattattttttaaagtttctaggcaatattttcatgtcattctcacttagtagtgaaggatttatgattcttaaaactaatcattaatacaatcaaatcagtgatatcagactatatatagcctttttggtccaaacactttgattagcacatgattttactatgattttttttttaataaatgaattttgttttgtctcttaaaaaggatgaacaaacacgaaactggtggattatacaaatgtcgccttatacatatatcggttattggccaaaagagctattttaccttatggataatggtgctactatggttggagttggaggtgtagttcaggcttcaccttctggtttaagccctccaatgggtaatggtaaatttccggcaaaaggtcctttgagatcagccatgttttccaatgttgatgtcttatattccaagtatgagaaaggtaaaataaatgcgtttcctatagtggagttgctagatagtagtagatgttatgggctacgaattggtaagagagttcgattttggactagtccactcggatactttttcaattatggtggtcctggaggaatctcttgtggagtttgatatttgcgagtataatctttgaacttgtgtagattgtacccaaaaccgaaaacatatcctatataaatttcattatgagagtaaaattgtttgttttatgtatcatttctcaactgtgattgagttgactattgaaaacatatcttagataagtttcgttatgagagttaatgatgattgatgacatacacactcctttatgatggtgattcaacgttttggagaaaatttatttataatctctcataaattctccgttattagttgaataaaatcttaaatgtctcctttaaccatagcaaaccaacttaaaaatttagattttaaagttaagatggatattgtgattcaacgattaattatcgtaatgcatattgattatgtaaaataaaatctaactaccggaatttattcaataactccattgtgtgactgcatttaaatatatgttttatgtcccattaattaggctgtaatttcgatttatcaatttatatactagtattaatttaattccatagatttatcaaagccaactcatgacggctagggttttccgtcaccttttcgatcatcaagagagtttttttataaaaaaatttatacaattatacaatttcttaaccaaacaacacataattataagctatttaacatttcaaattgaaaaaaaaaatgtatgagaattttgtggatccatttttgtaattctttgttgggtaaattcacaaccaaaaaaatagaaaggcccaaaacgcgtaagggcaaattagtaaaagtagaaccacaaagagaaagcgaaaaccctagacacctcgtagctataagtaccctcgagtcgaccaggattagggtgcgctctcatatttctcacattttcgtagccgcaagactcctttcagattcttacttgcaggttagatattttctctctttagtgtctccgatcttcatcttcttatgattattgtagctgtttagggtttagattcttagttttagctctatattgactgtgattatcgcttattctttgctgttgttatactgcttttgattctctagctttagatccgtttactcgtcgatcaatattgttcctattgagtctgatgtataatcctctgattaattgatagcgtttagttttgatatcgtcttcgcatgttttttatcatgtcgatctgtatctgctctggttatagttgattctgatgtatttggttggtgatgttccttagatttgatatacctgttgtctcgtggtttgatatgatagctcaactggtgatatgtggttttgtttcagtggatctgtgtttgattatattgttgacgttttggttgttgtatagttgatggttgatgtatttttgttgattctgatgtttcgatttttgtttttgttttgacagctatg

SEQ ID NO: 32821 - DNA, 546 bp, Unknown; identical to SEQ ID NO: 1312
  misc_feature (1)..( 546): 2750-1469P.txt file - cDNA_ID_3061695; gDNA_ID_1620386; Annot_ID_155439

SEQ ID NO: 32822 - DNA, 3003 bp, Unknown
  misc_feature (1)..( 3003): 2750-1469P.txt file - cDNA_ID_3061732; gDNA_ID_1620387; Annot_ID_155493
tgtgaagatatgtctaaggtttgtgttatcattgctgcaggtgctcctgtacattgcttttgctttggtactgatatttcctttcgatattttctacttgtcaagtcgatattttctgctgagaacattatggaggatagcttttccactgcaggtaaagtgatagacagctgttgattaaaattaaacttgcaattggcgaatttctaggttttgcttaatagctggtttataagtgttatgcttgatcagtgacgtttgtgtttgttcaaactcttacattactttggtatctttgtataaattcattcatttaggcataaatatctgatcctgtttcttttgtttcacagccaattacatttccagacttctttttggcagatattctgacctccatggtaaaggtattaaatttcaaccagttctctgagagatcttcctaacttctaataattatgtggttaggaatatattgatagcaggaggcttagtataacttgtgccttttttattggccaactactgctctttagcattttattttgtgctgataactataatgccgctgatacttgattctcattcaagatttgacatcggtaactatatgcaggtcttttccgacttagagcggtccgtttgccggatggtgcatagacaggtaattgattcatttttttgtgacatccaatgtagattagaaatatcttatgctggaggaactagttccatttatttcctttgatctctggaatatatggatagctctgtagctaccaaaatttatcctccaagactgaaaaacagcgggatatgatttatttagccaaattttcgctatcctagttttgctgatgaaccaatggaaatcctggttgtctgtctaacatgcacgggtctcataccgtgttgtctgttgtgaaatgatggaatatatgagattaaaatggactttcaggtcgctacaattgcttggtttgaagctgacgctgtctgtggcagtcatcaaattgcaatcccattggttcttgttttcccctacatttgccgtcttttgcaatgtcttcgacaatacaaagatacaaaggaaaaatcatctctattaaatggtaaaagcctaaccttctagcattaatgttaaattttcccacactatgaagaaagatgttcttttcctaccatcaatcttatagttgatctgtgattttttcagctctgaagtattctacagcagtacccgtgatcttcctttctgcgcttaaatatcacgtgatgcccgagagctggacatcattttaccgaccgctctggcttttctcaagtgtcatcaactcactgtactctttctactgggatgtaactcgggattgggacttgaggtaataggttgaaactgcatcttcctatccactaagcagtatttgcatatcataatcacataacttctctctgttgtgcagcggtttcactaagatattcaagtttagccgtccaagtaccatatcaaacttattatatggccgacaatgggtgagattcagtttccaatgaaaccgccatagtgttttcttcgtattgtgatgtctgaacctgtcaagtattgttgcaggtatatttctgggtgatagggagcaatctggtgctaagatgcgcgtggacatacaaattatcagcacatttgaggcacaactacataacggtgttcacaatgacagcgatggagatgttgagacgatttcaatgggtatttttcagagtagagaatgagtggaacaagatcactaaatcacatccaatgggtgagatttcacttgaagaagataaactacttggttctactacacctcatgatgtttagcatccaactatttttgtttatttcctctaatcctatgcaaaattctggttttcctattcggactctagacacttttagattatacacaatttttcatgaattgaaccaaatttaatgaatgacatattaataggaaaaaatattttcatactgtttaactgagacatcagattatatacggagatctgctataattaacctacaaatttttgtaaaattacctaacaaaaaaataatatagaccttctaagaacattttccccccatatatggtgttaaatttaataattctaagaagaagaaaaatctgagaattagggattgaagtttaatttagggatttatttgtcgttttggtcacaaacatagagccgataacggaggataacgtcggctaatgggtctgttaaacgatttaacgacattggacctgctcaacggaaagatcatgttttaaatattggtcaacgataagttgatgttttaaatgggttactatgaagttgacttattgaatgaccactttttgaaagttaagggattaaacaacatttttctctcattttagaatgtgtgtacaacatttatatcaaatttaaaaataataatattgaattttaacagtaaatgaatgttctcatttttcacatttcattctctatttttattatttttacactcatcctcactttcctctccctgtctcataatcccaataattatgttacgatatttttactctataatttgagttttgcattattgttcggttgttaaataaagtggatgggtttaagtgcttaatcacactttttaatataataggctgttacacctaatcgtgagagtaaataattgaaggcgaacaatggaatttatccctaccaccatttgttattaaacaaaaatattataaaattatatgtaaagaaaataaaatatagctagatattgataaagagagtagcactaataatgaaaagcaaattccaagttgcccacttgcaaatcaatctttcacacaaataaaaacaaagcccataacgtttcctctcttcaaagtgcctatatcatcaacacaagaaacaaccaaaagagactaaactaaactcctaaaactcaagatcaaagacaaagagatg

SEQ ID NO: 32823 - DNA, 3003 bp, Unknown
  misc_feature (1)..( 3003): 2750-1469P.txt file - cDNA_ID_3061759; gDNA_ID_1620388; Annot_ID_155533
aaacacaacaaattaatcatatcctcccaatgtttaaaactcaagcttaagagttttttttctcctgcaagctacaatcatttttgatagaaaatttataccttttgatggattcagaaatcagaagtctccttagtccttaaaaaaagaaagtttagtacgctaaaacaaattcaccctaaaactctataaattgcctatatttccattgggttttcccgcttttttcttctcttgtaaatttctataattttccatgttttagaagctaagttagttaatatcaccagaagtcggtttaattaataataaattctcaggccaatggcttaaccatgcgatgatcataatcactagattgttaattcaaaactaatcttgagtattcaaatgaaactacaaaatcaaacataaaatgcgtgatttgtgaactaccacatgataataattttagttgaagagttttaacgtttactagggaatatatttccatccaactatattttttcaaggatatacataaaataagacttttattgtttcgtaaaaaatgcatttagttttaaacaaaaatctaaaatgatacttgtaatgaatggagtagtagaaaataaaaattcaatgcatatagtaatagaatattcacaatcttatttaaaattccttctatataacaccaaaatgacaggcaaaagacaggtacaaaaagcaaaccaaaacatgtaatgtaataaactcatcaaaaacagagctctgtttatcttttcttccgtcattcgaatggctgatcagattgagatccagagaatgaaccaagatcttcaagaaccattggctgagatcatgccaagtgttttaacggcaatgtcgtatctcttgcaaagagtatcggagaccaacgacaacctgagccagaaacagaagccctcaagcttcactggagtaaccaaaccttccatttccatcagaagctatctcgaacggatctttgaatacgcgaattgtagctactcgtgttacatcgtcgcatatatatatttggatcggttcgtgaagaagcagccatttttgcctatcaattcttttaatgtccataggcttataatcacaagtgtcttggtctctgctaaattcatggatgacttgtaagtaaataattctgaggctaattaactttttgaaatttactaatgagttaacattttgtttaattgttaatatctttgtgtaacaattttaggagttacaacaatgaatattatgcaaaagttggaggaataagcagagaagaaatgaacatgcttgagcttgacttcttgttcggaattgggtttgagttaaacgtcaccgtttctactttcaataactattgttgttttctacaaagagagatggcgatgttgatgaagatgaagtctctgtttcttgaaccttcttcattcaaaatctcttctaagacgaaacttgtgatgtatccacacgaggaagactctttatctactcaccacaacaagaagcaactcgctgctgcttgattatatttatgcattgggtcgttatcacgttgtgtgatgtaaaacctttttatatatccgagggttcttgattagtgatgttagcttggaatttgttttgtacatctagagattggtttctttactcgatacaagttgaactaaatgcaaatctgataatatttgttttcatcaaatgatcaaacacataccaaaaacactaaatatacttaatattgataccaaaaaaaagaaagaaaagagatcacacttaagagacatgcagacattataagatacgtcgagcgcataatctatataaaaagcatacaaggcaaaggaagataagttacatttaacagaggaccaaagtccaaacctaataatcttttaatattgcaaacgcttatactcctcccaaaatattatagttgggagaaattaccaaatcaaacgtccttacggatgaatcttactaccatggctcaaagcggcaacttcaccgttgaaaccaccaccaccaccaccgccaccagaccgaccatttccgcttccgtaaccatatccaccaccacgtgctccaccacctccagaaccatatccatacccggtacctgatcccgatccagatccataaccgtatccggatcctcttccccatcctgttggtgatctacctgagcctgccccgtaaccccatccagatcctggagcagagccccaaccccaattgtactcccaattcggcccacggcccgacccactttcgcctggcatgttacctctcgaccatgcaaacggacgtgaaacagaagtctttgcagtgattaaaaagaaaaaaaccaacaagagccctttgatcattttcgatatattcttagggtttattttcttttatgttttacttcaaaatcttgttttgttatgaagttattgtaagaaagcttctgccaccatttataggcaacaacggtccgtaacaagttggtttgatagtgtgagatgggccagacacacccttttgttaagtcgtatctcgaaactaaagaaattttgttaggaaaaaagattaaacaccatttttttataattgtttacttagacataattatcaactgaaaataagcacctaacacctaacaatataattacaagttcaatcatgaagtcactagctacgaacccttttatcatatagatactaattaccatgacttagtgcccaaattttttttactatgattataagattattgttaattataacgatattgccaaaaacgaaatgaaatgtagcctctattatagttggtattaatgtattatacaaaaagtcaaatgaaatgatgactatttgatattattactgatctacttgagtttttttgaagtagaaaacattatccttcaagaaccaatttaagatgcatctcaacgtcaatcccactcacaaattttctagttacgggcctgtgatctgcaaatgatg

SEQ ID NO: 32824 - DNA, 3000 bp, Unknown
  misc_feature (1)..( 3000): 2750-1469P.txt file - cDNA_ID_3061767; gDNA_ID_1620388; Annot_ID_155526
tcctaagttacccatatttttatcaatatcaatcctaatcttaatataactggaatttacttacttttatcttcatccatattagttaatatctcatatttcctaagttacccatatttctatttcttccaaagtttttacatatatatactcctatatatatttgcgataaattcagagtataatttttttaaataactttgtgatataattcgatccaatctaaacgcgttgagatctaattggatacttggaaatttagatcaatataggaacaaagtcctcgtttccttatttagggaaaccttttttgtttatttgtttattgcagtcagtgtgtgacacatacaaaatctacggtggtaaaaaatatgattagtttgatcaaaaattaaaatctagtaggttctgagttttagatttttatttaatctcgactaagattccgattgcaatttttatatattaaaataaaataaaaaaacatggtaatctgacaaattgagagattccacctgtttaatgtgttttttcataactgaaatttacgctttctaaagtacattaatagcagcatatttataaacaaaaacacattagcttatagtatttaataccttcaaaatgataaatttcgtttgaactctttataaggtaaaagcgtaccctttaaaataataaccacccaagtcccaaatgtcatatatgaaaatggtttacgtattttttgtcacgagatgtaaaatatttatatgcaaaagctcctacacgggggactttttggtattctttcataaaaatagatcgtgctttagtagcattagcatccatggcgaatcgaaatgggtgacaccttttagtacaagtacttgggccgcaacacttggggacaattgggttttgctccaccaccataacctaccattaatttatgaagggaatattaaagcagaacagtgtttaatcttgctaatccaaattcttttcccggcaattgctaaatgtgaaaaaatcattaacgaaaaaatttgaacatcactaatatagtacctttggtatctcagggattgacaaatgctcaactcctcctaaaggcatatcttcttccacatgcttatctccttccgccggtttatctttttgtggcggtttgtcttcctccaccggtttatctccttccgccggtttatctttttgtggcggtttgtgtccctccgccggtttatctttttgtggcggtttttcttcctcagccggcaatttatcctcctcgaccggcttatctcctttcagcagattgtcttccttggatggcttgtcttttctcggcagcttatctctttctggcggcttgtcttccttcaacggattatctcctcctgattgcttgccactttctgccagcttgttaggcccatcaggcctacctcctcgtgcatgcaaagtagctctggaatactcttctttcctaagtgtcattcacacatacataatgttaactaacacacaaaataaaaatgtggtcaatgcatgtatgaacaaatttcaattggtacaatcaaagcattagaagagttaattagttactttaacttaagtaattacttgtagagccatatgaggagggcgatccccaatgctccgaggctaccagaagctaggaaccccgttgccaagaaactcgatgtgattaccgccggtacgagaatcggactaagaaccaccaaaaccggtatcataacggttagagccacggccgtaccggcaaaggttaaaccggtgaggatcatgaaggatacgacggctataccggcataaataggagctttgtctttcgtgccaaagaaatgcatttggcagtaatagaaattttgttacaacgtaatctgattgtgtattaaagagtgggtccagtggtgagatcgacgtgtacgacacatgactgaagagagtatttgtcctgtccatgcatgcaactgacacctttgttagtgaagttgctctacctcacgccaagttacttcgctttttttgttcacatcttttttgtatgtattaaaaaatttcacatttttttggcctcgttcgtttacttttcttctttcgtaaacacacacaaatttgaaaaaaggaactcaactattatatatcaatttgaaaaaatcgacacaatatgtgaaatgaaagatatgaactagagataattagcaggcaaaataaaatctgataagtattgcaagtttgcgacgaacaaagagtgaatcaaaagactgcaattaaacaaaaaccacagtatctgcaggctatatgaaactacaacttcaaaatgttaccggataaattagtttcaattttcgacgatatgtagcatagtgtggttaattatattgacgaaacctttgtattgattgcaattataagtgtaaattttggcaagttgatgtgtaagctccttcgtggatccaacaaataattaacagctatggccgatggcgttgatgagtggtcgcttctttagtcatagcggtcagacaattcaacttcattttattttatttatttattttgccatcattcaacttcatttcttggatgaaacaaattcaacattcaaaatttttttttttttaatatatatataaattatagatattccattatactttagtttccattgaaaccactatttgatggatgattcttcatttattcttgtcgaccaaattaaacttctaatggttttaggtctgattagtatttctttcaaaaacaattttcttttaagagaaaaggtcatattactaaggaatagcaaagaactaaaactaataaaacaactagctctaagcgtttttttgtgcatcactataacaagagacgtgcacttttaattagtagtttagtactatataaaaccctattacttgtgtggatttcgaccaacctataacaaacaacgtttcggtataattttaagaagaatatatcacaacaacaatg

SEQ ID NO: 32825 - DNA, 3000 bp, Unknown
  misc_feature (1)..( 3000): 2750-1469P.txt file - cDNA_ID_3061771; gDNA_ID_1620388; Annot_ID_155515
ggactgtgacggtaataaatattctgttggtgccacgtgtaataagtttttctcttcacaaaaatggtccttcatcttcttttagtatctcatttgtgacctaagcttctaatttcacagcttatcatccccttaatgttttaagttttttgaccatagagtaaaattattttactataaaattaaaagcaaaaaataaaatttactataaaattataattataaaaagtgaatgtaaaaatgattccataaatttacatgattgatagtaattattctgccaacttaattccacatgtatatcagtatttatatatagaaaatgatggtttttctacatagtcaaattccaaaacaaaatatcagtattatggaattaaacaatcaaagtttgcaacttggtatgtccaatatcatcgaaagagctttatcattcagtcgttgaaaaaagtatagccatctttttcttctatcgattttcaaaaaaaaaaaaaaaaaaaaaaaaaaaaaaaaaaaaaaaaaaaaaagaggaagataatgaaggtaggcagtgaaaagtctttcttcacatgtcttttattgtccactttcgatatctcatcagccagaaccgaaacaaacaaaaactataagtcccacactcaagtcaattaaagcactccaatggtccaacaagtttcgtcgtctaccttgaaactcaacctttggatgattgatatacaaaaatacaggatctaaaaacacctaccgaacttgaatagtaggtgtgttgtgtttgagtgtctctctaggtaaacatggtagcagaagaagcaagaaaagaagccatggctaaatcagtatctggcgggaagattacttattttgtggtggcttcatgtgtcatggccgccatgggcggtgtcatcttcggctacgacatcggggtttcaggttcacatatatattcttgctaattaggatatatatgttctttcttttttttgtttgtgtttgtgtttgcgtttgcaaaaagaataaatcatatttttgaagtagaaaacattttagtttttcataatatttaaatgaaatgttgtggttctctaaacctaaacataaatgcaaacatgtaactatataaatatgtaggtggagtgatgtcaatggggccatttctaaaaagatttttcccaaaagtgtataagctccaagaagaagatagaagaagaagaggcaatagcaataaccactactgccttttcaatagccaacttcttacatccttcacatcttctctatacgtttccggtctcatcgctactctgttagcttcgtccgtgactcgttcatggggtcgcaagccctctatatttcttggcggtgtgtcctttctcgccggcgctgctcttggtggctctgctcaaaacgttgctatgctcattattgcgcgtctcttgctcggcgtaggagttggattcgctaaccaggtaacaaaagacaagttgattaatgatgtttcaattttctctgtatgttgactggtttgttgttttatattttagtcggttcctctgtatctctccgagatggcgccggcaaaatacagaggagcaatcagcaatggtttccagctctgtatcggaattggatttctatctgcaaatgtaataaactacgaaacccaaaatatcaaacatggttggagaatctctttagccacagctgcaatacctgcttcaatcctcactttaggatcactgtttctcccggaaacgccgaatagtatcatccagaccaccggagatgttcacaagaccgagcttatgcttcgccgtgtccgtggaactaacgacgttcaagatgagcttactgatctcgttgaagcgagttctggttctgatacagattcaaacgcgtttttgaaactgcttcaaagaaaatataggcctgagttagtgatggctttggtgatacctttctttcagcaagttactggaatcaatgttgttgctttctacgcaccggttttgtatagaaccgttgggtttggagagagtggttcgttgatgtcgaccctcgtgactggaatcgtgggaacctcgtcgacgttgttgtcgatgcttgtcgttgacagaatcggtagaaagactctgtttttgattggagggttacagatgctcgtgtcgcaagttaccattggtgtgatcgttatggtggctgatgttcacgacggtgtgatcaaggaagggtatggttacgcggttgtggttttggtgtgtgtctacgtggccgggtttggttggtcttggggtccattaggatggcttgtaccgagtgagatttttccgttggagataagatcggtggcgcagagtgtaactgtggcagtgagttttgtgtttacttttgcggtggctcaaagtgcaccaccgatgttgtgtaagtttcgagctgggattttcttcttttatggagggtggttggtggtaatgacggtagcggtgcagctgtttttgccggagactaagaatgttccaatcgagaaggtggttggactttgggagaagcattggttttggaggagaatgacgagcaagcgtgatatccaagaaaccaccattcttagccattgaaaacaataaaaaaaccagcacctcatgatttgagatgagacgcatcttttgttgccaaaaaaattattgcatataagttttaaaattttcaaagttcaaactaaattaaggatatttttttactattcacgtaacaataatcaaatcacatgatccaagattcgattattgttcaaattattttgtaaatttagccatagtttcattttttcacttatatgtttgtgaaataacgatttgtgtttggaattaaaattaggggtgttttataaatatagtaaaactaggatagtgataatgtaatatattgaacgttaaaggacaaagatgggaaatagaaaataaagttaggaggcagagaagaaatgggggccataagaaaatg

SEQ ID NO: 32826 - DNA, 3000 bp, Unknown; identical to SEQ ID NO: 1345
  misc_feature (1)..( 3000): 2750-1469P.txt file - cDNA_ID_3061781; gDNA_ID_1620389; Annot_ID_155552

SEQ ID NO: 32827 - DNA, 3003 bp, Unknown
  misc_feature (1)..( 3003): 2750-1469P.txt file - cDNA_ID_3061785; gDNA_ID_1620389; Annot_ID_155549
cattgtttcagctattcgtataaagcaaaaataaagatttttgtgttctgtgtagtaccttcaagaactcaggaacgagctggaatttatctgcagtagacttgataggagctgaaagcttttccttgtcaatgaaatgatcatcattggtcaagctgtttcaatagaaagagtaacattagacatatatctaaatagttcaattaaaatccaaaatcaatgaagaattaacaaaaaaaaaccatactctaaatcttcttgatcaagtcccatcgctcttaactttgcaattaagctgtcagttatctgaaatccatggagaaatataattaacatcaacacatcataatcacaagagaattaaaccacaaaaacccaaatactgaatcctagttttccacaatttcatcaaaattcaaataaaacccagaatttcccagaaaccagtcgttttgagaattgaagacgaagcattgtgatttacagagaagaaacagtaagagaagtaaacctaacgactctacgagtaccggaaatttgtggaagagattgtgaggggattttcgtgtgatttcaaaaaggagattgaagatgaaaatcgaagaagagaacctgcgattcgaaggagattgaagctggagttgatacagtcgcttcgctggctgaagattttacacagtcgaagtcggttaagggaagaggtttaagagacggcgaaagggttttaaacagtatctttgcgtttattacttttttttttgtcatcctttgcgtttattacttattggtatttaattcactttagtagtccttcttttctttttacgttttgaattgttacccaaacttcaaagttgattaatatttgccaataaccacaattggcctctaaggagggtgtattcaaattagaatttaagaagaggctcggtatagtttaaggcaaatgtctttgttttcttttttttttttttggccggaaaacgggagaagtctcccgctttattattcataacaaaagaaaaaagaactataaccgaacaaaacgtaaccttgagaccccattggcatcttccaacaaaatcggattaacaatatccggtggaagattaaaagaatagaaacctaaaggtaaagaaaaagcatagttcgctaacccatccgctagacggttagcctccctatacacatgtgacacacggactaaccagtcccttgataaaaaagccatagcacaaacgtactaggaacgacagggggtgagagtcactgatccctgaagttaaaaaccccaccacaatctccgagtccacctctagctccaacctcgcgacccgcctctcccaagctatgtaaagtccatagtagaccccccacagttctgccaaaggagctgtacaaatcccaatattaagcacaaagcctccaatccaattgccttcctcatcccgcaacgcaccacctgcagtcgcctctccgggattcccatgcgacgccccatccgtattcagcttgacccagccctcatttggtttcctccatgagacttgtcgctctacccgcacaatctccttcgtattcccggggagctttaagtgagcagctgaaacctcatttgccaaatccttaatgaaccgtagtctatcccgacagcggccaacctctccaaaaacatttccacaacgccatttccaaccccaccaagctgccaatgcaaaaactgtggaccaaacactgcctctcacctcaccgtggtctcccagatttacatacaaccactcaagaatagacttctcaaagaaaaggcgccgtttgctcaccgggacaagccgtagccatattccttccattgcagggcaatctctgagaacatggataatagactcttccgctcccttacaaacttgacagatgctcgtggtactcaaatgtcgacgatgcctttcttgattcgtcataatggcttgttgtgctactaaccagaggaagagtctcactctctcaggcgcagtcacgttccatacttggtcaaagaatctcttcatatcttgtctcggcgcctcatctctagtaagaaaagaataggcggtgctcactttgaatctcccatcttgactctccccccacgatattctgtctctagctcccgttatatcatctaaaacaaccgattgtaattgtaatctgttataagaagatatatatggagctatcgccgccatatcccaaccgatcccatttctccaaagatccctagctcgcattcctttccaacccgccggaagctcctgaaccaacaactcagctagaggaatatttgttagccacttatccatccaaaacagaatctcccgaccatctccaatcacccaacttaagcccgggattaccacctctctcatacccaacgctacacttctccaagtcgatgagcagacgcttctaactttagtccaagcaccatcccgaacatcttgtactctgtacttacatctcatgattctcgcccataagctatgatgatcctgaattagacgccatcctagcttagagagaagagctttattcatatcctgagctttcctaattcctagcccaccttcactcctaggtttacaaactcttttccaggaaataagatgctgcttcctttgagttacagagctgccccataagaacgatctagacactttgtctaacccatccaacgttgatttcggcaaagcaatggtgctcatggtgtgaaccggaatcgacgaaagcactgccttggtgagtgtaactctccccgcaagcaatgtctttgttttattttgctactttagtctttattgggtttgtggtactggtaggggtttaatttttcaaaactaaagttaagggtttaaattcatgttgttaacaacggtcacgggtttataaccttaaaaaatagttcaccgcatatttaggacaggtcctgcttgtgacatgacctactaactcagcttttcgtcggagatg

SEQ ID NO: 32828 - DNA, 3000 bp, Unknown; identical to SEQ ID NO: 1343
  misc_feature (1)..( 3000): 2750-1469P.txt file - cDNA_ID_3061793; gDNA_ID_1620389; Annot_ID_155547

SEQ ID NO: 32829 - DNA, 3000 bp, Unknown; identical to SEQ ID NO: 1349
  misc_feature (1)..( 3000): 2750-1469P.txt file - cDNA_ID_3061811; gDNA_ID_1620390; Annot_ID_155587

SEQ ID NO: 32830 - DNA, 3003 bp, Unknown
  misc_feature (1)..( 3003): 2750-1469P.txt file - cDNA_ID_3061815; gDNA_ID_1620390; Annot_ID_155586
ggtttgattttttttttataaagtttttttttctattacgaagcccatacattttggtcaataattagtttcgttttttttgttccttttttctgttttgcacgatctcaattttgttttgaattatttttataaaaattaaattataaaataccattattaattaacgacaaagaaataccatttgatattcatattttgtagggttccatattgtcacgtttcattgtgtagctatagccagatgttcaactttgatgttgaaagtttgcgtgggattgtatcccatcaatccaaaataaatacccataaatttaaacttaacaaaatacacttcaaattattatcaagaaccatacatgtgtttatctttctctacccgtggattcaccatgaaatgttcatctagaaacaacagttagattaactcaaactgcaattacataatttgagtcgtctttatatatctacgtaaaagacaagtgaaaagaacgatactactctcttggttacaactaattcgggtaatcttaaggttctatctacaatgtaaaatgaatcgacgacaataggaacggcaatgcgctgtaatttgtgctccaaacaaattaatttctgcatctaatgaatgtagacattaataacaaataagattcatttaattattttaccaaaaagtaaagaaggtccactgaatcacgtgaaatggaccattccaaattcttcggaaactttaaatacattactagattgtctcactcacctaatagtaaaatagtatagtggctccacaaaattgccgacactgtattttgttttttcttcttaaaagtattcaacaaatacatcacatacaactattttccgaaaaaatataaaaacaaatactaacttttaaatttggaataattatcataaatcataaacaattttaaaaatatttaaactatgtggttggagtcagaattcaaattttaggtgggaccaatgtttggattgaaaattatagttttgaatgtgatgcaaaaaaaaaaaattaattgaaaaattacgactaatatttgatattttttttcttttttaattaaaaaattaaaatttgggttttcagtcacaatcttctcaaaatcgtaactaagagcatttccaaccctactctattttagagtcaaaatgcaaaaattttctccaaccctactctataattgactcaaaatagaaatttctgcagattgactctatatatagagcaactctattctcaactctattttttatttcaacttttttatttatactttagtccctcaaatttaaacttttttatttaatacatataatcattttacaaacaacaattacaacacatagttttataaacttaacaaacaaacaaatactaaatttaatatatttaagaaccaatgtttaaaacaattatcctttaaagttttcacacagaaattaagaaatatatttaatatattttttaattcttttattggttaaaatgttaaaacagttaaaatctatttggaatttttattaaacatttacattaaaaatctaaaacgataatattaaaaaataaaattttagttatagaacaacgattaaattaaaaccgaaggaatatatcgcacgtaaacagaccttttgacaaaccgcaatttttcaaaacgttaatttagttgactttttggttacctcgtatcgcgttacttagaccatctccaagaagacaccaaatcaccaaatttggtgataattttgctccaacgtgacactataatggacggcataattgttttttggactattcacaaaacaccaaaaatttatattattttatttatatttttgatttagttttatatttaaattgttggttttttaattaaagacaagtatactattaatattttttaatgttttcgtttttgtaatatcaaattttaattaagttaatataaaatgataatgtgcacaaacttttgaaataaatatcacattaattaaaatttaaaatacataataaagcttaattaaacatttaaaacataaaattacaacatttaaaccaaaaaaacataaaaacaaaatgcaattagataaatttaaaagacataaagaaattctattatttaaaatttatcgattgtaattttatattaattaaattaaaattaagcagttctaaatttaattagtatttatcaaactattaaaataactattactaagtattagtatttaataatataataatgaaaattttgtttttagtgtgagatttagtgtttatggttggagatagaaaaaaaatctgaacactaaaacactaaatttggtattaaaatttagagttttggtgttcaatggttggaattgctcctatagatttaattgttacctttttaccatcattgtatgcaaatgttgactttttggttttggagattaccaaaagattcatcgtctactagttcttcgtagataacatagtatatctagaaaactcggaacgaaaattttataaaatgtggataaacgtgaagtcctaaagctagcaaagaaatttggtcaaacgttagtttattaatttctctcaaaatattagctatttagtaatattacccaattatataaggatagacaaatgttacttacccaacaatatttcaaatagatgctttgtttctacttgatgcattgttataatgaagtggccgctcctttttttttattttgtcaaacattataatgaaataatgaagtatgtttttggagaacaaaaatgttgtaaaattaccaataatttgggtagtggagttggtgtacactttaggcttatattccattaacttaatgacgttacttgtaatcattgtccaatcagtgacgtcatatatgattttccttttgttaatcttttcaactgttatgactgggtgaaggaaattatcatcttcgtccctaccaaatttttcagcagcgaaaatg

SEQ ID NO: 32831 - DNA, 3000 bp, Unknown
  misc_feature (1)..( 3000): 2750-1469P.txt file - cDNA_ID_3061824; gDNA_ID_1620390; Annot_ID_155583
atttttcgttaaagggtaactttttttgatattttataatatatatatatatatatatatatatatatatatcttttctaacaaaattaaaatactttaattaattaacatgaagctcctaaaacaacactcaatgtttttctcttgtctagaatatatagttcattccatgaaaacatagactagtgaaatgagtagatacatcctgataaagtcatttagtaaattgtgaagaaccaaagaccatcaatctcgcttctctacaaactggtcttctttactcgctacagtctcagggtactggcgcgatagaattgagagcttcgttgctcgatatctccttcaagcagcggttcacaccatatggggtgagaggaataggcgaagacatggtgaaccacctaatccgggaactcgactaactcaacggatcgataaacaagttaggaattgtatttcagcaatcaacgcaagtggagatagccggtatgacaaggccctccaagtttggttccactcaagaatatgagtaaactaattcatagataaattgtttatatagtttttttctcggcaaaagttcttgatgtaaaaacgctaattttttttttaatttaatttaacattgcattaaaaaaaaagaaccaaagaccggtccaacgtttttgtttgctctatgcaaactaaaaaaactatcattttaatttttatgcaattttattttaatatatttatgttcatttgttaaatttaccttatatttttacattcttttgtaaagttaattgattcgaaactgttatattttttctgtaaatcaactcttcattaaagccaatggagttgtttttaagaacgaagtatttttatttctgactagatcttctcaaagtttcttaatcatctagaggcaggacacgtgttttatgtttaaaaagttttagaccccatttgatcaaatcaaactgtcagagcatctccattggtcatattaatggatgtttttactatttttataatataaattaaagacatttgtgaagagagagaagagaatagtgtctccaagaagacacaaagacatctcttaaagacattttctacctacttgttacctttttattggttataatgcttttacaatttattaattaaaattttaatctatctaaagacattttacttttatcaccaatgtggttgctctcacaagtttggccccagttggacaaaataattgtcgtccaatgaaaaataaaaactgtagagcaataattatgggtgttaggctaaataaactattttttatggtttcattataattaaatttaattgtgggtgggtctcaactgaccccatattccttcacttggatctgtcttccaagtagcacaaacacattatgtgagagcaagtaacaaacgactcacctagtaatttatccaaacctttgtaaaatcagaccaaaatactcctaattaaaaccggttcgaaaaaccaaatgttgagttattttgtttttgtatgaatgtaaaataatactcaccaaaaagaatgtttacaataaatgcatcgtaaaaaccataatttctaaaaccttctggaaccagaaacgcattccaccttcataagtgcacgttaatgccatggtactcaactgattgcagacatttttatcaatcgttctcttaagcgtatgtgccggtgttgatgtctctccatgacaacgaccattacgctcccgccagagactgtaaatagtgatctgaaaaaatacctcaatgtgaaagtgtatataggtgtagtggacttagccgagattagaggaattatggacctccagattgtagtaaacctatgatcaaggatgccatgagctagagctgaccaaacttgggaggagtaggagcatgagaagaacaagtgatctctcgtctctacttcttccccacgtaaaaaatagttaccactggctccaacattccatttaggcaatctgtcccccgtcgtgagacggttatgaatagcaatccatgtaatgaaagagtacttcgagttgtagaaccaaaccccttgtaccaattactaactggatttacctgacgtgttaagtgccaagtatcttgagatgaaaacttgcacttataaaggctgttttccttttccagagtgggagatctttttcctccacatccacgatcatgaactggtattaccgcggattgaccacagtgatcgatttcaaagcaattttttccaaacccattgaaccctaagtgagtccccaaccgaaaccagacgccatatcaaattcaaaacagtcgtggtgtttgtttctgagagcagtcttcaaaatgttgggttattctcgtaatgtacacatagttgaagccagttacctagtcttacggacgatattaactccaatatcgacgataacccgaacactagcccaccattctaagattatgtaacccaaacagtttctgaattaaaaatataatacaagtaaaatatattaacactagttcccaccaaaaattaacactacaagcttgatcagagcaaccttaatggtagacttaattttgtcttttaactattttgatgaattgttttattgaaaaaaattatagctaagagtttttgtaatggtttgaagctcttatacctacttttatctcttatctaagaaacacttctaaactattcacatattattatgattaattacacctaagatttgtagtaagagacttgcaataaggatggtctcatgtcatagaatgcatgtctccatatgttttatttaatcgagaaaacataaactacaaaatttaatgttggttattaagtttggccccatttgttatccccacatgcactcctctctctttttgtccttataaagttcttctcccaattcatgaaacccaaaaataattatctcttcgtaagaaaatacaaacttcttcctctcttctaagcaactaaactatg

SEQ ID NO: 32832 - DNA, 2548 bp, Unknown
  misc_feature (1)..( 2548): 2750-1469P.txt file - cDNA_ID_3061848; gDNA_ID_1620390; Annot_ID_155563
aagcttattcctcttatctaccggtggaaggtccaccaaaaaatatgtgtgattaggctttaatatttgattcggctctagaggtttggcgcgaactcctaatcgtttcacggtctcggagtctaacagcacgaatccgggatactctttcgtggcgtcactcgccgtcaccggagttttgagccggaaaatatcgccgtcgatcttcataactttcaccttgtttctcctcaccattatagtgttccccatttttctgtcttttttgttgaatatatctcataaagcatgcaacgctatctatttatatgttgaggaggatttggttcaagctttttgattagtgtgtgaagctttgatattctctgagattcctcattttttaataaagtctaacgttgaatttaattaactaattatgttgaaaaaaaataaacgtgaaaaagtcggtcgattgcgatacattttctcatagcttttttcttttaggcattttaaaaagtaatcagtagtcgccatgattatcctaatattaacgactaggtacgtacgttacgttatattcaattctgttaggcggttatccaagttatactcggtcaccgtgttattatagtatagaaattcatcccaaacaaaaaaaagtattgtgatgaagctattggaactcacctaaaaagtaagaaaatcatacatctatttagaaactacgacattttgatcatctatatgtatgaaaaatatgtttcacagatgaaatatgaaaaatatgtttcaaactttatattggtactttatccatatagaaaggatattcgtcatcgcccatcaaagtgcttccagttccgaaaagacttgttttcttacaactaacatcatctttttgttaagttgtaggtcaatccaacctgaattactctatcgttcggcaactttcatgaccgttctcctagaaggctagatagttttgtacgtctcattgtctattctaaatcgattctctaattttcttgctccttttcattccttcctcttatttttttccgtaaatcattctaaattatggctccgtacacaaaaaagcacaagaagagaaagtggaatatataccacatttaataaaagaaaaagttcacattttgagttgttgttacataaggtagtacgtaccaaaaaaacataatctaaagtaaacaataaaaaatgcttactaaatacactataaattaataatgttagaccttgaagtttattaatttatagtaatattaaattataaaaagattacgcaaaatacaatttctttatttaaatttcttttaaaaaaatttctttatgctttcttgtttgtatattcaattatgttaaattttatttttcttttgacttccttaatttctttttatgcaagatagtatatacttatatctatgacatttatgaacttcaaattgtgattaataattttggttatcggaatagaaaagatatcaatagcctattcgactatatagttgaaaataaagcatgctcaaatttttgagtatagaacaaattgtagcttttgtttgcaatgttggtgaagaagttgaaaacgataatattgaacctttggaagtagtaatacataagaaagcaattgtcgagtttagaagacatcagaagtttttgatgcaatatgaaaaattagagatgaattttaacgagatttgaactttaatactagattcgtattatactagattatcttaaaatgtatgcttaagaattaatattattaatttatgatattattgagaccatatttttatataaaaaattttaaaaaatattatcttatcgatttttgttaatttttacattgatccgacttgaaacggataaaatttattaatttatctattaatttatagagtgtttattaacatttagtatatcacaataattagtttttttaatcatataacatctttaatagccaaacaaataaaacaataaaaaataaataaatggaaaaacagttccgtgattttgaaatgaatctggattttggtttaggattcccaaaaaaaagaaaaaaacgtgccagaccaaaaaaaaacctcacctaaccctatctagagacattaacttcgttgacaaattctcccgccgccgggtatagaactttaatatcgggtccggtttactgtaagaaaccaaaccgaatagtcctcaaattagcaatcgaaccggtttgagtccgggtatgaaaacagtgagctttagttaaaaagtctcatgggtcaaacagaagctatcttaaaggtcagctcttgatgccattctccttcccgacaacaacaaccacttctcttccattccacaaggaccacaatcacttcaaccttaatcgaaatctccggttttgctcaaacctgaaataatttgtacaattgtacttaactaatacagttgtgttttgtttttctttaatttgatatatatttgttttttttagtggattttgattgataattttgttgtaagatcgagaaataggagaatg

SEQ ID NO: 32833 - DNA, 3000 bp, Unknown; identical to SEQ ID NO: 1356
  misc_feature (1)..( 3000): 2750-1469P.txt file - cDNA_ID_3061894; gDNA_ID_1620391; Annot_ID_155619

SEQ ID NO: 32834 - DNA, 3000 bp, Unknown
  misc_feature (1)..( 3000): 2750-1469P.txt file - cDNA_ID_3061902; gDNA_ID_1620391; Annot_ID_155617
caatcttcgaacagatctcgtcttttagaaatacattagtttgctagttaattcattctgtgttttcttgtgtatcatcatcatagctttgctgctttatagttttgatgagttgtaaatatatgtttctctttagtaactttgtacatacaacaaataatgggaacaacttcatttaagctccaagtttttgcaaaatctctcaaactccgataaagtgagtatttttagcgaaatagaatgaaaaccatgaaatctctagaagttgccggttcagttgatacttacgacgtacgagggggacagtataaactttatggctcactcgttttctggataggttaagtctggttcgcgaattttcttttgtaaccacgttcttagaccggttacaagcgtggttcttgaaatctatcgaaaacaaaccggaatatacaaaaaattcaaattcggttaatatttaaccaatcataaaatcccatagattttgttctatgaccggtttatttttggtttagataattccagttatctctctccacgagaaacattcgtcggaagacaatctcaattttccgacaatggaaccagaagtaatcagagacaaagactctatgagaaaatggtctcgagccatgagatcacaaggcaagaccattggtttagtaccaacaatgggttacctccacgaaggtcacttatctctcgttcgtcaatcactagccctcactgacgtcaccgtcgtctcaatctacgtcaatccaggccaattctctcccactgaagacctctccacatacccatctgatttctccggcgatctcactaagctcgcggctctttccggtggtaaagtcgtcgtctttaacccaaaaaacctctatgattacggcggtgagacgaagaagataaacgacggtggtggtaatggtgggagggtagtgagttgtgtggaggaaggtgggttagggcatgagacttggattagggttgagagattggagaaaggtttttgtgggaagagtaggcctgtgttctttagaggtgttgctactattgttactaagctttttaatattgttgagcctgatgttgctctgtttggtaagaaagattatcaacaatggaggattatacagagaatggtgagaattggtaacattttgcacaatttcttgctggtatagagattgtagagaatggtaagcctgatgttgctgtgtttgttatgtaggttcgagatcttaattttggtattgagattgtaggatcagatatagctagagaaaaagatggacttgcgatgagttcgagaaatgtgcgtctttcagatgaagaaaggcaaagggtaaagtaacaactcctttatgttctggtatgtgaacaaggatcaaggatggcttactttgtttctgttgttttgttatgatatggtaggctttgtctataagtaggtcactggccatggctaaagcttctgttgcagaagggaaaaccaattgtgcagagcttaaggatatgatcattcaacaagttgttggatctgcaggacgagtagattatgtcgaggtaagcatttcattttattggaagtggagttgaatttcagttgttgtttggatcaatctgtacacacatgtgttttgatgtgagccatgcgattgtgtgcatatgcagatagttgaccaagaaactcttgaaggagtagaagagataaagagtggggtagtgatttgtgttgctgcttggtttggaacggtcaggctcatagacaacattgagatcaatgtctctctctagatctcactgtatgcatcaaacttcatgaaaaaacttggaagcttcgaagctagttatttttgactggaatatgtgacaaaaaaatgcattcgcaaatccaaaagattgatgagtatcatcgtaaactatcagcttcaccatgtttgtgtgtacgtgataggattgaagcaggaatgatatttgcacattctcgttgtctctgttataacctctttcattgcaaacctgagtgttttgagttttgaattttacacacagttttggtattctgtatacgcaagtcggaatgaattaaacatcacaagctggccatgatagagattcatctttatacatataatatgttacttatatggaaagacccgtctgaaggggatcgatcacgagcatcagattactccagagtgatatgatattgaatcactttgacaagctcattgtacaaagctatctgttagttatgcgtgacacaatggacatgcacacacttctggcaatggttaagcaaatgtccgcttttgcactaagagaggctgataatgctcttctcaaatggctttggctgctcctcaccattttaacgattaaataaaaaaatattgtggggtgagagaggctcgaactctcgacctcaggattactcagatagctatgagacctacgcgctagccaactgcgccaccaccccaattgtttactccctttagaaaatactctatcaagcatttcaaatcaacactatcgttctcgtctagtctctgtcgaggaaagagagatttttcacgtacgcacaaccccaatccgcttcttctgctctgctctgctctgtctcaattcgtccttgttgctcttctcttccatgctaatttgaggtttgtttgctacttttcactctagcgtgattctcgtcctttgactatcgattatcaatgtagattggtttccttgttctattttgcttgtaattggtgtttcttcggattgtctctgccattgacactggaatctactagtttggaatctgtatcttggtgctagaactgggattcaaatctcaaattcaatagccaagtctgtatgcaattaggttctggaatttgatttgttttcttcttgttgatgtagagattgggcttgaggatctgtttccgagattacgaaatgctttagtagtgtgagttctaaggttatttaccaatg

SEQ ID NO: 32835 - DNA, 3003 bp, Unknown
  misc_feature (1)..( 3003): 2750-1469P.txt file - cDNA_ID_3061918; gDNA_ID_1620392; Annot_ID_155650
taatggttggaattgtttgtagtgctttgtttcttgtttttccgaccactcgatatggtgttggttgcatgactggttaatttattttcacttttctgttttttggtttgttttagtatctatttcgtattttccttgtaatttagattatctgatttaaactccaatgttctactatttttatctattgtattgttaaataaaatgttgtgttgattctatctagacttgtttgataggaggagtacattatgacgttagtaaaagcttcctcaatgcagtactttttttgttaagatctcaaactatgcaattaattaccaattgagtccgtgatgtagtggaggccaaaaaaaaaaaaaagagtccgcgtgggctttgtcctttttgttgtgtaggcatgtcatgttggcccaaagtcttaatctccacgttgtgttttgtatctattttatttagattagattatgagttctttagatttgagcttatcaacccctgagttgtataagtgttcattgtcttcagtttctgatgaattgataggattaaaaagtgattttttttcataacacgttccttgtttcggcactctttcaaagatatcaacatagtcaagaagacgagaaggtcccttgttcatatcccgcaattctacaaagaaccagcgttatcaaagactaacaagaagaaaagtgacaaaatataagattggaagaaagaagaaaaaagagaagaagaagaaatttcaaatatgtgagggatcgaacaaaccaaaatactagtatttatatggttatgctttgatatcatgtcagaaaattcatcagtatgaaaagaaaattcttaattttattgattagccagtaaaattatctacataaacacataacttgatctacaaattttctataaatacgaagataaaaagtctacccaattagcaataatgaaatggagttttgtttttcctagtaacgatatgaaaatttattcgaatcaatcttgtattgtaatattcgaaatttgatcaccatgttttcattaagcaaaaattctccgttttcaccaagagtcacttaatgaacttagccagcttttacaatatagttcattcaagttcttttttttttttttttacaatatagttcattcaagttctttttttttttttttttacaatatagttcattcaagttcttttttttttttttttttacaatatagttcattcaagttctaattcgagaatgttcaagtcatgtgatatatcaacgagacttgtttttatacgaaaaatgctaattttaataaaacaaaactcaaataacgtttctttagttcggggaaacagtcgaaaaatgataaaatatgtttcctaagaatctttatcagtcgtgcctccaagtggggataatataataaatgtaatgaaaaaactttattatatagtatatatttgtgatttggggtggtctgaaataaaggtactatatacttatccacataattgcactttttcaatgttagacttggcgttcaattacttcttatccacaatattgcactttttccaaatcgacttggcgttcattagtaaccacaacttctaacatcgacttattacagccacgtatctctgatatgttgaagattttatgacaagaatataggcaaaaaagaggaaagaaactgaagatccactatatagtaaatacttgtagcttcatttaaaaaaaagaaagtgatttcaatgttaatttatttttcctacaagtaccaagctaaaactgtaactaaatgactattattatcagcgtaaaaaaacacatactccttttgttttttttttttgattttctagaaaaaaattgtttcaaaaagattgattttttggttttcaatgcaatatttatttagttataattgataaattgtaaacttcaataagaattattgaatatcattggtttagagttattgaaaattataaattacaaagaataatacatttaaaagcaacatttaatatgttttcttaatatttgtgtttttcctaaaaaatcaaagaaaaaagaacacaaggagtatcaatctgtaaaatggatttgtttgaagacaaagattggtttttttggggataaaatactatatttttttagtattttaattttttgttggatcttcttagttctttaaaaatgagaaaattaatgtttatatcatgtaatttgtttctttcataaatatgttttttttttctttctctccaaatctaatcatgatattgttttccatggatatggctattatagaaagctaggaattaaaaagtgtttcaaggttttaaatatgttttttgtttgttactctaaagtttgttttttcttctgaaatttcatttataaacagtaattttttaataaatgtgtgggtaacaaaaaatttattgacatagttagaattagaaaacatgtaaattagaagttaaatggcctttaatcaaccatttttacattaatttaaaaaaattcagacttttaaaataaaaaagttaaaaatgaaaagaaaagtaaaagtaaaaaaaagtgctgaccactgaccagattgaaaaggaaaataaaaagaaagccaaaaagagacgaaaaagagaaaaaaaaaagtccacaaaaacaaaaataaacttgtggctaagaatcctcacgtgtgatgacgtggcactctgggcgaatcaaaaggttgtacaattcgaaagatcacaaacccaaaaagcaaaatctgtaaatcttttttctttctctctcgcaaagacaaaaaagcattcccaattaacaaatctagaaatcaaaactcagacaaccaccgataacaagacagtcgtttctctctctcttttaaacaaataaaaattggaacttttttcctctgtcttctcaaaaagtttccgctttttgctcgctggagaagaaagaaagaaagaagtgaaaaggaatcattaccatg

SEQ ID NO: 32836 - DNA, 3000 bp, Unknown; identical to SEQ ID NO: 1368
  misc_feature (1)..( 3000): 2750-1469P.txt file - cDNA_ID_3061954; gDNA_ID_1620393; Annot_ID_155675

SEQ ID NO: 32837 - DNA, 3003 bp, Unknown
  misc_feature (1)..( 3003): 2750-1469P.txt file - cDNA_ID_3061967; gDNA_ID_1620394; Annot_ID_155710
atataactaatatatacttatatttgaaatatgtttggatacctattcgggttcgggttcgagtttttcgggttttgaagtttagacccgttcaagtatttgaaaattttcggtacacccgcctaaataggcgggccttatctagtatcaacataaactttaactaaataaggaagtttgagctaagtgtaacattagataattcaaattaatgtttgtggtagaagaaaaagacaatgttaaaaaaaaaaaggtatctgctacctagactcgaacccaagcacggattgaaagagtgtggggacacaaccactaacgctagcttcaaatatatcagttgtattccaagataaactttataaaccttgtgtagggcacgtgccctacctacccacaacgtagatccgcccctggttgtcaaaaagacttcataagatcattttgaccacaaaagttcacaactcttggctctgtacatttgtacctcaaccaccatctctcactttagattccagtaactatacagagagtgtctcctactaatataccgtgtttctattcactatcaattgcaaaaagtattgaatatgagagacttacttcaacttctagtcctcttctactacttactaagtattgtgtcaatgttcttggaagttactgtccttcctctcgaatcagattcgtgggctcacttagaacgtacctaggaagctcatatctagcacctgcattgaataagagcaagtcattaaggtaacaaaacaagaaacgagagaaacgaatcagaattgtgtattacaaacctctttcatcccagcacaatgttaggtcacggttctgaacaatcacgcctgcactgtcaacaatagtttgtgctagtttcaagtcagcttcagcagcagctcgaagtgcttcccatatctctggttttcagtaaatttcgctcagtttccaaatgtacatagtgcgatgcagcagattacaagaaagagagatatatatatacctctttgaccaccatagtgtggagaggtgtcccaaaattcctcacgcatgttcgtaagttgtgcccttgtgattggctcagtatgtgcccacggtttaggtttcatgattttcttcctttttgctgtgtcaaacgtacaaaactcataagagaatgatacaatataaactaccaccaattttaaaacagttctttcagtaacaccaatattatagccatctacttcagaagatcatcacagtttcaatttcatcaagacaacaaatacagtataaggcagaacgaatcagattatattgtctattgttcacagaacaatttttcttggtaaaaatggaatgttataacattagtaaacggccatttcatttcaatcataccatcgataacaactttctctgatccaacattctaattctgagcagtagaaacaatgttgaagagcattctaattctctgctgaactaattctgagcttcaaaatttggaatctttaacgaatcacaaacatgtcaacaccacaataaactgatatttccttcgaaatcactccaagaatcataacatttgcaagattagttcatgttaacacctcaaaactagaactatcaccaagaatcaaaacattacaacacaagtataaatcgtagcccaaattctgagaacaaattcagcgagacaaacggagtgcggaattaaaggtttaagagagtatcgattccactaacctccgccttcatttctggcctgagaagatccgatacaacccattctcgaaccgttgagagtcgcgtttgattaggtgaaaattggaagtcgcttcgaacaagtaaagtaaatgccagtacaaactcgaccgtcgggaacgaaacggagaaagatagccgccgataagagtttcacggcgggagaatcgccggagaagtctgcaagagtcgtcttcaaggtcaaattctgttttgactgccaaattaggccatgaatgttttgttgattttggtgggtttttggattttggattgtggcttttggttttttgtttttgattttatgagtttttgattttggtggagattttagattttgcaaaatcttaaatggtaacttttctagtttttgatttttatataattattatttagaaacgttttaaaattatttatttaaaactttatttttatttttaaaaacaaaaaaaaaagagtttacgatagaatttgttgaaaatcccaaaaaagtgaattttggattttaagaacaaatgactagaatcttttaaattttgaattccctataatttaggaaattaactttttacaaaatcatgaatggatgaaaaagtggattttgtaaaatcaaaagccaaaatcaactttaaaaactagtaccattcaaggccttagtttgttagagagaagaaagtgaaaacagatctccccgattttatttatagtcactttacttgccacgtcatattattctggattagtatattatatctgtttgaattaatcgtcagcgtctgtagtccaacggttaggataattgccttccaagcaatagacccgggttcgactcccggcagacgcattcttttttatcattttaatcagtttagaaaaacataaaagataaagacaaatgtgaattgacgaatacgtcctcgtctttatcgaagcgagcaaggtaatagatcagaacgcgttaacagggcagtttagtaaatttggccacacaaatgttagatttctttgtgataaagacagtacacaagtcctttgtctttctcgtttgatattttccaattccgcgtctttctctgttgaaatcgaaaaaattttcaaaacaaaatctaaggaaaaaagagcaacaagtttcaaatctcatttgggtttttcattttgaaaagaaggacccatttttatctctctctttgttttgttttctcgaatctgaaggagtaaagttaaaagctttgaaggagagaatcaatg

SEQ ID NO: 32838 - DNA, 3000 bp, Unknown; identical to SEQ ID NO: 1375
  misc_feature (1)..( 3000): 2750-1469P.txt file - cDNA_ID_3061984; gDNA_ID_1620394; Annot_ID_155716

SEQ ID NO: 32839 - DNA, 3000 bp, Unknown; identical to SEQ ID NO: 1374
  misc_feature (1)..( 3000): 2750-1469P.txt file - cDNA_ID_3061996; gDNA_ID_1620394; Annot_ID_155713

SEQ ID NO: 32840 - DNA, 3003 bp, Unknown
  misc_feature (1)..( 3003): 2750-1469P.txt file - cDNA_ID_3062004; gDNA_ID_1620394; Annot_ID_155701
ctttgctaaatcggtatggattatcataactcttaaaaggattgatttttagattcatttactctatggatcacagaatctgcttggagtagaagtaaagagtgatactttgctcattagtatacgaaatgaaggcatgggttgttgtcaagaattgtagttagaaaattggattttgattactgcaaatattgaatgtgaagtttctagtggtaatttgtaactgaaatgctctatttatgtgttgagtagctgagcttgagagttgtctcttatgttaggtctcaagcagaagtctgcttaagtagagaaaagaatgatactttagttaaagtttgatgaaagcatgggtgtcaagaattatagtgaaaaattgtattttctcgattactgccaattggaaggtgcagtttctagtgatactctgttactttttctgtaactggagttctctatatatgtgttgagtaggtgagcttgagagttgtctcttctgttaggtcccaagctctctttgtttttcgtaatggatagtacactaaacaaaatgcaatatctgcgcttgaagtagagaaaataatgatacgtcatacgttattcattgagttacgaaactaaagcactggtagtcaagaatttacagtaaaaggttagacctgattagtgattactgcatatttgtcatcggaactgttggagtattgttgcttcttagttgtttctaatgattgttctctacttgttctgttattggagttatatatctatgtgttgagtaggtacgcttgagagttgcatttttattattaagttgttccttgctttgctttgatcctaatggacctgtttgctattgaagttactctttgtctcgagcattcaatagagttttactgttattctctaggctgaaaacttacggacattgttgtgtgttttcgtgttataattgttagggtgcattgagggagttttgggagatggtgcaagctgaagtagtcgatggagagttactacaagactgtctcgaagtaggcggaaacgacgttaagagtttgcttcaaatagcaaaggacatggctgtacagtttttttcttctcaaagccgttcctctgatgaactttagctacaaagcagagcgctttcacctacgttccttctttccgttttgttccacatcggatgtgacccttttggcacgttgtactattgtatgcattagccaactcctctaggaaatcctccataaccattttgttcattacaactttcgctagataagttcaagggatgtatagactagaaaacgatttgtttgttcgtttataagtctaagacattcgtagactagaaactcgaggttcttttgtaatttcatcaatctaagcacacattttgtaatcgaaaaaagtcctaatgatcttgtgaatatctttgaaaacacacaagtctaccgacatctagagccattgtaggtatccaacacttgctgtgattggtaaactttccccattcatagttaatattttatcgacaaaacaactcaaaattcttctgtttcatagctctcattgctggaattttgcctctattgtatagtagagttcataaatacaacaaccatgtggttggtgaatggtggaatagatctgaaaattagttttttagtattcagaatatttctttgtttgaacatgtttgcttttttaactaatttttctgtcataatccaaatttattgatgaatgtcatcaattttgtttatattatagtaaccaaatttattgggatttctgttttccacactttccctcgtcttattaatccatgtggtgactgcttgaataagaaagtttgaatcttgatttgagtaaatttttgggtcccaaagtagattttgcttttaaggatcatatgcaaaacagagcaaatgaaacttaatactttcaactactcaacatttggttcataagatcatcatcatcatcatgacatggagctcactctctgtctttcatttaatttcactcccttcctaacacatggcaaatcctcaacatcattattcaccgttgattcgaccaagtgagattgagcttggccgttagatttgagtatatcctagaatgagaggaacatgtaatgcaaatgtggaccctttatgtcatgtttttatgtttcttacactatgccaatttcatttcaaggactagtcattttactttttccacatgcattgtactaaaataaccaaacaacttaaggtgagtaaatttagcttaagcatgttactgtcttgtggtttaaattaccgtgatgattttcatatgatgaatagtatatagatatttgaacctaaaacctatggaaactgttttttaatataattaacaacttcgtagaagttttgaagaaatgaagatagttttaaggttattaaagttatataatcacatagtattaataatcgtcattatgtcatttttcaaatctacaaatgcagtaattagttaatcttcactttccttctcgagacaagttgttttttactaactttctcgagcattggtactttgaggaaccaaagtcaacagctcgatttccaaagcaaaacattaaaatcgaaccgtcacaatgcatacaagttggggggattcagagtaaagaaaataaacaacattgacagaagtaataactctccaccatctttagttatatgtctctgatggatcaattcatagttccaccaaaaatactcaattatttcacatatataaacacacatcacatttacttttacatttaacatccaaacatcattgccgcgtgaacatttaatgcttcttcaaccgttaaaaaactttataaaataacagtttctcattctctccatattcttcaaaactatattatataaacacatttttcgtttcttcacattcacaaaacatctctctctttcttctcccattcactcactatcttgctcctagaaaaagatg

SEQ ID NO: 32841 - DNA, 3003 bp, Unknown
  misc_feature (1)..( 3003): 2750-1469P.txt file - cDNA_ID_3062012; gDNA_ID_1620394; Annot_ID_155694
acagttggtgatttgcaacagataaggaaagtgcacgtaagctaatgaacggtaaattcaaattctccaaacaggagataaaaagtgtgggtaaccgcttgcaccacagttactcaacattacaaagagtttcaccttccagcattgcgattcactaattaaatttggtaaaattgataagaatgcaaaatcctgcaaatggttgaaccctatcatgatatattctacaaaactagatacatacttaaaggctgctaactaagaattagatccaagtacatcaaaaacaatctaaagatccaatttagatgcgtcatttcgcctaacaagaagagaacaacattcactcacaagtctatcctcttagaagcatgaaccgtagaacattgccctctattatcatcagcacacaagtttctagactctgtttctttgcttttccccttcttaagctgagaacattcttgctcctggaacaatcaaagataatttcaacactatatatacatgaaaatggaaactccaatgaactaaaaaactcaaagatatgaatataccacatccagcaattgcttcgagacacgttccagctccttctgtttaatcaaataccacaaagaacaatatgagaaactacatctttgtgatcacagagaacgcaataataaaacgaaaccctaacctttaagcgatcaatttcgagatctttctcactatcacagcgacgattcgaagtagtcggagagataggtttagcagcagtaacaacagtagagttagagtaatccattaacgcgtcattgaaaccgcttactactctttgagagagttctctcggcggagaatagcttaagaaaggatcaggaacttgaatttgtttccgttgttgtcccgctgaggattgtaactgcatagggtgagataaagacgatgaaatcttcgtcgatggcggaggagccggtagaaacgttggaagatacggaggaggtagggggcgatacatatcggcttttttcagggtggtttcgattgaatcgatggcgaggagaaattcgtcgttaaattcttcatcatttccactcattctctttctctctatcgctcgaatgactgatagcgagtgagtgggaaaagaggcgaaatcgaaatacccatttagtgagcagtacgcctgacacgaattcggatatccggaacaattgtgatatttgttattcgattggttttaacggaatatctgattttgtgatttactttaattcaaaaaaatttggatatctgaatttttatgtgatattttcgaatatccattttgatactgacatattgtacatgtaaatattaaacaagactgtaaactatataacaatatcagatattcaaatttttcatttaacatgctttcaaaataaattttaaatagcaaacataaccgttgttgttatcaccggtcatcaagttgttgttatcaccggttatcaaaatgttatctaattaattccaaaacataacctaatagattaaattgtcattgatcaaaacataacataaaagaaaaatgagcaaataaacatcttaacatgaaaacataaggtaacaacaatatacaaactatttatgatatctatatttacggatccatcgtaaataatcatctttcgctttaaagtttttgatggagcagtcggtaaaacttaggatccaaaaaactttttgtactattactattatttatggttaaaattctctttttcttattaacttgatttctttatgtgttttatattatttttataaataattgaaaatcatttttaaaatttgcaatattttattaatattgtaaaataccgtcataataaaaattattatggtaaaccataaataagattatttagtaatcaaatgacattgatctaatatttatatttttcttttctgaaaaaaactttctggttcgtttctgttccggttttcaaaactctgtccggtcatgtggaatgctaaattacaaatccaccttattataatttaaattacataaataccccttaaaactcacatatttatactttggtcccggtagttctcttttctttttaaattaaaggattatctgcttagcaaaaaagaagaagagaaaaggcaatgttttgaaacccgacccggacgatgaaccggactaccttctgggtcaccgggtcaccgggtcaaccgggttggaccacgggttaattagttaaaatttatttaataaatttaatattaatagaaaatttagagtattttataataaaaaaatttgtagtatttataaatataaaacaaaaataatcatatcatatttaatcaaatataaaattatattatatttaacaaaatataaaatcatttacacccaaatatatatatatatatatagaaaaaatcaaacaataataataaagtggttaaaaatttgaaatccaataaatgtctaacaccgtaacaaatatattaggagatcatcaatgacataaataaattaataaaacatcgtgaattaaaacaactaatctcggttgtctctctcaccattcgattcaattttaaggcggtattgtaaagtcttcaacaaaatctaaaacatcaaatgaatttaagaactgaaaaaacttctaaaaataattgaataaagtctaaaatcccatattttattgtaaaatcaagagaactttttaaaacccacacccggccggttcaaccggttcaccgggtcacgggttaattgcgagtttttgtgggttttttcggttttgaacttgttgggttttagcactaaacccaaaccggaaaagtgttcgggttacgggttaaccggtcggaccggacggttcgggtcgggcgtgaaaacactgagaaaagggttttttaggattctttaaacgcagagctgagctgagttacataagatcgagagaattcgcaaactcgtttcttcattcgtcttcgtctttcgccatg

SEQ ID NO: 32842 - DNA, 3003 bp, Unknown
  misc_feature (1)..( 3003): 2750-1469P.txt file - cDNA_ID_3062030; gDNA_ID_1620395; Annot_ID_155745
tctctcaagagtaaaaagtctttgcaactttgctttatatagaaagttgaatggcaaaaaggcaaattagaggatgataactaaggtatggaatatgaataactggtccaatcgttgctttgttatttgtgttcttatcgtttaaactgtaccttgtgtgcttacattattttttctagttttgattcctctggactacaacttttcagtgcaattaaagccttgcattagatacgagaattgatccacaattaatgcatcatatgcgcattccttcaccattctggtatatgaaagtatcttattctccaaatctttttgacaacttttctacttgggcaggggaattcattctttttccttattcctcaattttttcaaagtccacagctccaacctctctatctcttgaggtatattctcaatgctttccacttgtctgtattgtttttgttccgacttgaaagtcattttttcagtctctacatacatcttaaatctattaaaactttaagttaggttttgaccaaaatcaataatggtttatttggccatgtttcaagaaaatatagtgattatgtttgtattattatatagcgtagaatacccaggtttgtgatatgcataatgcaaggggggtgaaagtttatgtttcaacattgatttttcttgaaagataattgagaaagcgaatgtagaatatttcttgctgtctccttcaacaagtttagtacctattctctctaaatagtataaaaattagtggggggtccatatcttacactctttgattggcacaacatatttggctcatccatgcatgtgttaatctatgtatgtgtgtaacctttcctgtctgttctgaatgcaacataacatgtcttcagtgcatatttgtatgtattgtttgtgtgtttatgtgtgcatacatgtacatatttacatgtatatatgtataagttcgtgaagcatatatgcatctaatgtttggctggtttcttacagtgtacttccttgaatctactttagtggtgagtacggctctaaattttatcatcattcatattatggtgttggatgcgagtttgatttggacttcactattatatttctactgactgattaagtgtagagatactctcctatatgatatacagctatatagaataagttgagagataaagatatataaatatacaagtcgtgattgccaaatgctgaaattatggcttctctatgtgcaattgagaatatatccactatctagtatagagtctcacatatcttaatgagtttgataggtgccttaaaaaaaaaaactaggtagaaatatggtctattgtttgaaaggaaaatgtcaaaaaaacaaatcttatgttccttgaatgatatctttgcatttttcaatctttttttggtgaaatctcatggttctgatttctcattaacactttattctgtttggtgaagaacctttttcataaccttcagttaaaagtatttgagcatattgcctaaatagttgattggcatgtgagtgggaatatgcttccacaaagagaggcttcatattgtgtgctgcaagtttgaaaactctatttgtataccatcaaaagtaaattagacgaagcaaacaatttatgttgaactcttttgattggcttctcttttgtcagatagataatcctctgttctatatcaaatgtagtttcagaaaagatcaaattttgtgtatgctttttgtagcaggttctgttccagattttggactactgtgtttttcttcagaactagagcttaaacgatatgttatcttggtcacaattgttatactagtttgtgcttaattatgtagtctttccccttcttcagtgaaagaaaagagtgatacagacaaaatgttcttccttgtacgttcatttccctttgacagattcttgttcttgtttactaactttaatcagtgtttgatcttccatagggagcataattcaacacgtgggattgtgattcgcttgattgaatgagagaggattggatacataaaacaggaggaagcgggaaatgaccgcggaattatattcgtttggagagaaaatggagggtaataagtgggttcgttcatgagattctagagaatgagaatatgagaatccaaaactaaagaaagcttggtgagtcgcattctcaactcaagaatcttttttgttcatcacaacccgaacccaaaaaaaaaaagagactattcgggtctatttctttccccttttacttagtctcgatttttgtggatattttaatgaattgtgattcttataagcacaacaaaagattaggagaatcattgtaggagttttgtgttcaccacaaggcagtgttgtctgcatccaaccgaatcatgtagcagttttgttatattggtttgaatattatgaaactataaaaaatcgagggcactgcgactggacgcaaacgcaaatgctggctaaattattcgacaagtcggatcattataaagagttgattgtctagttgcaagtagttggtagtagtatccattcttgtttttctttttttcagttttatacattctcttggttcgtttactttctttaagattcgttttaaacatttatttcaaaagttgtttgaaaccctttggaaaacatggagaagtaagattcttccgtagataaaactttggataagcaaaaacatccaccttttaagctaaaaatagatggaggtcaggaaccggttctgtgaccggtccaaattttctgattattttcttcacgggttggaccgactcggtttacggagctaaaatggtctaaaccgtaagtgatcgatcggtggactctctttgttgtcgaacagaggaagaaggaaacagtaacagagtataaaccctacgacccaaaaacaaaagagacgaaacaaaacaaaacaaaaagtctggtttgggtttctcgagctcttcttcttcttacaaagaaaatg

SEQ ID NO: 32843 - DNA, 3003 bp, Unknown
  misc_feature (1)..( 3003): 2750-1469P.txt file - cDNA_ID_3062036; gDNA_ID_1620395; Annot_ID_155739
agaataaagttcttcataagaatacactcacccagaccaagatcgataaggtagagttttttctcatctgctgttcctggttgaccgagtaaaaagttttccggcttcacatctccgtggacaaacctagtttgatatggggatggaacatagcatgacaatcagtacagtgaaagataatacattgtaattagttaaagcgaaatgaatgaaactatttgcaaagaagttacgaaaaaatatagtaactaaccctttcatatgaagtttctcaagaatagatatggactcaactgcaatgcaggctaccatgtttggagacatcctgccacatgacacgaacatgaatcaaatcaagaatcttgcaatcagaaggaagtgtggtgagaggagaagagtgcttacgattgccccgaagaattccaaacatcccagagactcggaccaagcatgtccatgacctgaagtatatattatagcattacttgtacatgataacacaatcaatatcgaaagtatatttaacaaagctcattgtaaattacatacaagaatgtaaaaatctccttgacgacccttatgatgtaccgcaggaactccatagcaaccattgagggtactttacaacaagaagaaaaagaaacagatgagatgacaaataagttgatcagagaaatttggcaggaaaatttacatagaatgcatgcaagacttacttgtacacttgccactcgtaaggtggaccaaaattgcatcctttgctatttcgatgctcaaatttcagggccacctggtaagaaaaataattaatttgttaacgattagacttctttcgtctgtatccctcaaaaatctcaagtatgcttctttacaatatacctcaattgcatcggccccaatcctatcgctgccaccactcacccttctaccaacaaaaacttgaccaaagcctcctttaccgagtttcctctcagtcttatatacaggagaatttccaacttgtacctatacaagtaaaatgaaatcaatatcagcatctctctcaaatgaaaaaaaaaacttgtgattgaatgtcattagcataaattttaccctttcagggactggagctgtgctagaatcttcttccacaccaactaccttctctgcgctaccaccttccatagcaatatccttttcagctaccgcttcaacttgattaaaagcaggttcacctactgctggacgaacttcacaaggttctgcctctaaatctattaatctgatgcctcgacccctaccgacaccaccagctggtcttggaggtgcagcacctttggcgtttccccttcctctaccaccaccgcctcttctccttgttacaggctgaggaggaagttcaatattatccgcctgaccagtcacctgagggctaggttgtctcaatctacgtgctccacttcttaactctggcattcttactccatacaaagagtaagaaagtattttgctttcagtaaacctctttaactaacctgcagtataaagagaggtagcagagagtacgtatttagttgataaaaaggtgaacccaaccaatttcatttgcatttccttcacaatccaaaagaaaagacaccaatccgttgtgttagcaagtaaaaatacaatcaaaaagaatacaagaaacattggcttgcacttaaagcattgtctttccatcaaaatcactttccaatcaaacagataaaaacaatcaaaatcacagtcatctgcaaccaaattcagaccatacactcatcaactttggttcaagagtaacaaaatcatcgttactctcgagaaaacgccatcaaaggctcttcgatgatgatgatgatgatgaccaacacatcaaaagaatctgtgaagaaagtcgattcactactcaagataccaatcagaaaccatcaatacagattctcatcttcacagaaacatatagattcaaaagaatagtgtaaccaagcgacagtttgatacaaaaacacgctccatcatcacccaaaaacaagatctttccagataatcaaaagagaaatatatgaaacaaagcatcaaaacacaacaaccaccacagaataaaaaacgagatgtcaaaaacattatacccgatgaacgatttacgattaacccttgaacagaaatgatgatcggagtatgataacgatgaaatcgatccaaaaaattaaaactttcagatctccttggaaatttcaaaatgagaaaccgacggctttctccaactagggcgatttaaatgtaagaactttctagctgtgataagcacacctagaaaatggagataaagagagagaaagattcagtcgttttaggttataaataatgaagattgaaggagatgaagaagatgagaggaggtgcagatttggggatgaattctttttttttttttcggtccaaaattttctttttttctttggatggattgatcaactttagcaaaatttctggcaaatatttggtagatttttattttattttcattgctttaatttatgaataaatctatattttgaaaaaataaaaagcttgtagacttctcgaatgtttatggtcttaatattgctgcttgcttcgttttgctcgcatgaatttaaatttgttaatatactaatttaatacgttcgtacgtatacaatgggacttgtatgttgttccagtaaggcgcacgtgtataagggcttaatgtaaaatccacatcctttgtcttgtacaaatcttattataaagaggattatagtgtaaaatctcgattgtttaggcatgtgaatacaatatgaaccctcttcggtttggattacaccgataaattcgaatcttagatcgaaacaaatcggttcgagttttccggttcaatttaaaccggaattgcccattgctaaatttctgtccaacgccaacggtaacgaaattgcacaagtgtcgcagctacagagcacacaaaagaaggagagaaagatg

SEQ ID NO: 32844 - DNA, 3003 bp, Unknown
  misc_feature (1)..( 3003): 2750-1469P.txt file - cDNA_ID_3062038; gDNA_ID_1620395; Annot_ID_155733
tggcaacatcttttttttgtcatttcatgtgtgtagataagctctaatttcttacctcaccaatggttatatgaatataaaaatgatttctgtaaacaattctgttgaaattatgtaattatcattatatattaaatcactaatcaacactttatactttttaacagtgacaacactaaatgcgtccatttaagagtttcgcttttccgtctcttcttcttctttgatcatctatttaaggatctagagaaaccacttcgcaacgatgagggagataggtcactcctcaaaattaccaaacacaaattagctccaataattgcaacaaatcactctcacccaaacaaaacttttcaaaagccctaatccgagaaatcattcgacaacaacacgaaggagatggatctagaagattgggaaatactccccaaaatcaactacaagggtctcgaacttgatctcggtcatgaagaggatcatgaagttacgaagatgatgagaaacaccgcaaaaagcttcgacagtgattacttcatctgcccaattcaagattctgtcggaaagacagagtttcttcatcagagatctagcgtggtccccacacaactcctccagattccaataacttgggaacctttgtcccccgtggacgacaaagatcacaataagtacctggatccggatttctcggaaccagacccggaacttttgacggagtcttttccgtcgccgagaataaccttcaagaaatcgaaggaaaccgaatttgccgacatgaaaatagattcaccagcagcgaggttcactagtcctctgccgcagaacgatgagagacactctgactcagaaggagggttaggaggagagtcttatgatgagatcatgggatcagaggttgaagaaagcagtgacttgagtagcaagaaagaggttgattgggatgaaggtgaaagaacgaatctgtggaagaagggtcttaatggaattggagctatatgttcatttggtgttgcagctgctgcagccaccatatgtgtcttcttccttggacacaacagtagcatccaaggtggtcggaacaagaaccagatcctcaggttccagatttactctgatgataataaggtaaaaaatttaaaatatgattcttgttagaagtcacttagttaaggaaaattaatttttatgatacgaaatacactaattttgataactgatatatctgattagttctactagtttagttagatgggtgtgtaatctcacatttgacttatgccgtcttaatcagatagcattaattttaaaattggttcccttttttttttttatcaagcaaattggctcctaatgcacgaaaacatgtcactcatttgagattttgatctaacagggtaaatcaagacaaattagctattaagtttggtttgcttccctaattgttgttaaagttagatctcaacttatacatattcctgtttgattgattgaatagtaaagttgtttgtgtctttgatacaacgaaagtgataaggatgcgtttggcggtgtggcctattacgtgtcttagtgaacaatcaataattgtagagaagattcttattttgtctttgtacgttttgtgtttatcttttcttgcgtcaccctcacactttgaaccaaaacacgtttatataataacgtcattgttccttgcatatcaataatagctagagccgcctagagatgtttgggaccgagttagccattattgatatatagatttatgattcaaagtcgttgatgtgtgattggttttaaactcgttattgcagcggatgaacgaggtagtgaaacatgcaacaaagctaaatgaagcaatctctgtgatgaaaggtcttccggtggcaagagctcaaatatcttttggaggatactacgatgcactttgaatcatagccatatagccatagatccaatgtcttctgcttaatcgcctctatagcttatgtatttacgaatttaggaaattcaatataaataatggttgtgaaattttacattctttgtccgaatgcatactacatactggctaagccgacgcctacataggaccagggcggactcaaaatatcatgtactctgagctgggaaacatatataggccttattttctatgtttttcggacaaacaaattttggaccctaattttaacaaatgtagttatatataaataaataaaatgtggaccatgtgcatgagcacctctagcacatgtttggaaccggcactacgtacgacaatacgacatcaagttctagcgaacgatgatatatacttattaagtcgttagaaaatgcaataggtaaatgatatatatacaagaacaagaaaaacaaagataatacacaagagagtataaacttagtattttgctattatgaataagtaaaaaattatgtatttaaattcttgtgtcagttgttcggtcactatacaaattcaaacctaatacaacataaccatcataatacaacataattgatgtatagaaaagtgctatcatcaaaacgattttaatggtgcgaaagatccacaattaaatagtttacctaattgtttcgatgtagagagtccaaaattttcgagaagtatcacagttcaaacaaaaattcaaagatgactaacaaatctcactttaaatttcaaatgtaaatgcctacaatgatgtagtttggtgtaaaacttactaaatcttttgataaacaaaaacatggatttgaacatgacacaatgacaacactaattcaaatcactagcctacatatctaagggtttagttccttgcgcttgcaaggtacatcaactgaagaacaagcccaataatatctaaaggcccataatctaacccaccagttaattttaacggtcctccgtcaaagtcgcctctcttctcctccaccacttaacgtcagtggtccgtttgacaaacagacctgtgactgtgagtgaagaagataatg

SEQ ID NO: 32845 - DNA, 3003 bp, Unknown
  misc_feature (1)..( 3003): 2750-1469P.txt file - cDNA_ID_3062041; gDNA_ID_1620395; Annot_ID_155732
cccccttgcagaaataaaatgacttgaattacttgtcagattgtttagatttgccagtaatcaatccgtcttttacactgatcagtaaagtttttggcttaatgagttagttttacaaagacaggacaaataattcaatatgacagaaatgatgctatgtgtgttcattgtctcttattcttgcacgctttgctagaggctactttttagtttatttggtgagcatcaaatgtagattagttaggttattatgctgtataacccttttagccttatgaaattgtttcatgagtagcttatcctctaaaatactaaatgttttcatcatttctttcccatttttggtccatgttaattgatatcatgaatttttttgttcatattgcagtgtgttttctaggtatggtatccatagcttgccttcaatcctgatggtgaatcaaacaatgaagatgcgataccatggtccaaaggatcttgcatccctgattcagttttacaaggaaacaacaggtgagagtatgcttcatgaaaagccagactgtgtctctgtttgtactttctggttttgttttctactgtatctgaatatattagctcacaacttattaaaatcctttgaagaaaatcagttaaacttttttatatctgtgtctttccaggtcttaaacctgtccagtatatggatgaaggtgaaccaacaagcttggacactgatggaaacctgatcacatggctacacaacgggtcatctatcagagaaatagcagaaagagagccatatatggtacttgcactaatgtttctgtctttgaaactggcaattttgatcttccccatcatgggatcacggttgaaaacgttatgggcattgtatgttccgcatctgagcttgggaatacttggtgagactagccaactgtttggccgtgccctacacatgatcgatgtgaggagactatggataaaactgagactcaccaaaacaaggaacttccaagaaagagcaaagaacgcacttgcatcagtctcactaggaaaatcttcatcacaatcagcctaaaagggtgatttagaaatccttcactgtcaatgagcttagtttagattactttactttactgtctgtgagagatcctttgactgacatgtttctatacctttggagttccactgtctctgtatgtaaatcctgttttgcttcttttgtgaatattttttcttcttcttttgaatattcatgttcttggtccacttcgttgtgcttacgttttgtctatattgattatggatggtttggttttaattggtgttagagatggacacttgggtcgtgtatgtgaaagaaacttgtccaacttgtggatcactctggttcacatgttttgaagtttcgttttcctgtcgcttttgcgtatgtgtctgacagttgaatctctctatttagatattttcaacttaggaatctgcttttatttgattctatcgtttattacagttataagatttagcttcaagcgtaaactgactaataaaccataaaatcaaaatcaaagaagcaaccttcaatgtttaaagtgtagggaacaaagtagcacaagaggtgaaagaaaaaaaaaagtagagcaaagcaaaaacaaacggaatcgttaacaattactatatgttatgaatgattttttttctttgtagacttaagagtttcttaaatttgcaattgaattctgtatgctaagtgcctaagttcaatgattattgctttttgttcatccgcatttgaattttttttaatggatttgcaactgataatctaaaagctaccaaataacctaatattagtgtttttgaataattgcctttgtattttacaagtattgatttagttgattttcgacgaaaagctttcctcaaattttttaatattatcacctatattctcattacgtaaaggatcatatcaaggatgataagaaattataataagaaaaataaatgattctaggtgtttattaaatgactccctctttctacacttgttaaatgaaaacgtagttgctttttcctggaataacactaataattccgagcaagcaacctccactactactatcttttatcatttttatccctagaaagggactttaaacttgtaacttgtataacacatcacatcatcttctttttttcttcctttcgttttgtggttaatttggtaatttactttcgatgcaataaacaagccgaaaatatgaaaaacgttcatctgttaattagtaccaagtttatacttgaagcttgaatatagttatctacaccaataatttttgtattattttacaagaaatttaaatacccgcttaggtagacgtcttaatccataacttatagaaacttaaaaaacttggtacgaaagattcttcttaatcatcagctaactaaatcttgtttttatcactaaatattttattagcaatcaaatattgtggaaaatgaattagcgtgttaaccaatgggtttggttataggaaatataaaatatcaaaggagagaagggaccttgtcaaagaagacaatcgatacttcttaacgtgggtcctaaaatggcaacatcttttttttgtcatttcatgtgtgtagataagctctaatttcttacctcaccaatggttatatgaatataaaaatgatttctgtaaacaattctgttgaaattatgtaattatcattatatattaaatcactaatcaacactttatactttttaacagtgacaacactaaatgcgtccatttaagagtttcgcttttccgtctcttcttcttctttgatcatctatttaaggatctagagaaaccacttcgcaacgatgagggagataggtcactcctcaaaattaccaaacacaaattagctccaataattgcaacaaatcactctcacccaaacaaaacttttcaaaagccctaatccgagaaatcattcgacaacaacacgaaggagatg

SEQ ID NO: 32846 - DNA, 2193 bp, Unknown
  misc_feature (1)..( 2193): 2750-1469P.txt file - cDNA_ID_3062072; gDNA_ID_1620396; Annot_ID_155792
ctaactctgattttcttgggttaagttgttacgacgaggctaagtagttatgatgatcacaaattaaaaatgaaatgacataatgagtagtgtggattaacaagtttgtcaaaaaggagattgcagagtatccaaacacccacgtgcaaggcaaatgaccatgtcactctcatcattatggctttttattcactttttgtttttaaattattctaatgttctaagaaattattttaagagatttttttaatagcaggataatctaatgttgaattcttgatgtattgattaattacgattttttttaaaaactaaattaggtatttggtattgaaactgttcatgtggatgcatgaaagaccacaaataaatttttggataatgaaatttcatttttggttcctactagcgagtcttctgccatcatcagacaccgcacttaattttgtacgaactttttcattcaaatctggttgcaccatttttaattttgtactgaacataagtactttacttataatctggtttaggcagaaactttcaaatacttgtatcatttaacttggaaacgtaattacttagcgtataatgatatatagcctgtaggatatagaatcacaaattagtgataagtattttgatacagtagtttatatcctcagaatctaacagtatgatattgtttagcaatatataatgttttgtgaataatgaatgttagttttctttgcattcattatttggattaagtcacataagaaaatataattgttaatttggaatggatagtttaaccgattagatacgagtaactttataagatggggttcgtcttaaagtcgacattagcagggaaaactactaatttaatctcttggtcgaagttactatacatcgtaaagtccgaaacttcttagatacatagaaaattatacagttaaacatatactattattcatatttttgttaaaacataaactattattcatgaggtcaattgttacatgggtttggtaaactttcgtatgctattattttattatattctttgggccgactctttgagatgttgacttattagtgtgataaggagaaagcgaattaaaaaaaactttatatatgattgcacttactttaatgaatccattttttaactttaaactgaaaaaaaagaattgaataacaaaaagtttcaatttgtcaagaaaagaggaagagagagagccaaaacaaaagctgttaacctcatgggatgttttccattctcaattattagtaaacttttgttatgatttttgatccgttcctttcgataattggatgtgatttgtggaaagccatttacatgtttagttacagtataatgatatagttgaagctctcataaactttttaagagtttaagtctgattagaagacatctttagaagataatacaatattgaaattcttgtgattgattcttctacattgcaaattcacttccaacaactatttcatcaaaaaatctatagaatagttatggtttcgaagtatataacattaacatatttaactaatttgaaatgtacataaataataataaattggatttatttcaaaaataagtcaataacaccagaccattttatgtttgacgtaagtaacatggatgatggaacattggaagtttgatgtacaatgtactgtttttttcttttctcttctttttgaaatatctatgtaagttaatcttctccattttagatattttcttcacaaaaaaacgaatatttctggcatttatgtttcaacttgtatttagctaagattaggaaaatgacgttttatctaactttttttctttcatactactaacaaatcatttctaagttctaactaagaatgaaaattgtcgtgtgccatataggataaaacctcactctataaaaatcattatgataaattaattaataaaattaaaaaattaaaaaacaatttgccttgagggaaaaagaaaatgtagtatttaaataacagccatttattattgctcactcgtcgcagaaaacagagattcctcgctgtctgaactgaaaaataagatcgcattaactcaaaactctcacaaagacaaagatcttctcctccttctcttctctttttcacttttctctcttcccctctctcgaagcttgaaaggtaacaacaatg

SEQ ID NO: 32847 - DNA, 3003 bp, Unknown
  misc_feature (1)..( 3003): 2750-1469P.txt file - cDNA_ID_3062079; gDNA_ID_1620396; Annot_ID_155790
aaatgtcttactagtatttaatcagtcatcgctctattaatttggttattcattatcataaagctggaggagtaaatttagttatgtcgttatcaccagtcctatattgatttgtgtttaatgcggtttcaaatggttagttcgtgtttaaaattgttgatctgtctcagctccatgcctaatcaagaaactatggttcagctctctgtttcttgtatgaaccttacctgtcataaatagcaacaaaaaagtgcagtaattggatttatttgaggatggagggattatcaaaatgagatggaattattacctgttatgattccagtctcgatttgatgaacttttggagacagtctctgaaagtttcaagcactgccctttcctgctccatgtatatatctgtttcattgacacttgtcttggtcttacattgggaatcctcttctccattgtattgaacatctatcagttcgatcaatcttccacgtgattgtatttcttcttccacattacgactctcagactcacttgacagctcaatggcttccttatcatcaggctttgtaaatatcctgttctggtcctctaagtgagattttaaaggaagtatgttgatgaagccaaaggaatagtagatccagtaaagtgtagattttgtaagagactacagatatacctgcagttgttgtagcagattctgacgctgcaacgagaagtgagcataaatctcccaagtccggaagaagtgtagaggtgtatcccatgagggaccttttctttctagtagcacaatgaaaattcagttaaaatatttatgattatgaggtgaaggaagatgaactatcattttaggaaatgcaaaatcgaacctgtaaggaagtttaggagagcaagacataggggaacccagagcattttgaatggaattgtcaggtatcgaaaataacggagctggacaagaattccactgctattccggacagaaaaatgagttttatggagataaacccaaaagtgcatatatgttatgaagcaagtagtatatttcacttgcctcagttagctctcggtctcttctcctccggtatacttgtggggaattgtgagcagaaaatgcaggaggctggaacgcttcactaacattcttgcagttgatgcatttacagttgtctgagcacagaagattagcctgaaagcactcacagtacttcttcaaacacctggttcttttacatttgcagcctctcgaaagcagtccaggtttagtatcaggtgcagccttacactacaatacaaaacacagaacatcccagatacttacaaatgaaaaaggatgtgaaatatacctctttgaagcttaacctacaaaagtgataggtgtcaagaacatacctgattatcagttaggctacctaaagccttttcactgaaggcatttgggttgcgacctagtacattcaccatagctgcttctctagcatcacatttctcagagttgttatgacaatcaacacaatcacagtctgtacataccactcctgatgcaaaacagtcacagtacctaataaccaagcgtcaaacaaatatccaataatgcatcaatctacagcagataatagaaatctcactattcaacattatactcaaatctctatcagcttaacactaagtaattcttggatcctgaaatgaacttacaactttaaacatttggactgcttgcatcgacatcctttgtgtttcctcgaagtaatgccttcttcatctgtcttatcctttgcttctgaatgctctctgcttcaaaatcaagaccagtggagatcagagagtagattttggattgaaattactcaaacgagaagcatctctagtgaaaattggcagagaaactggaacaataccgagaaatcggaggaaaaagaggaagttctttaacaggagattctcggaagacgggagatacctccaatttggtgaaaacgagcttcctagggtctttctctgtcgcgattttgccggaatctgcgtttcctgtcatatcggtccttgacacattatagtcgccacacaagttagttcctcaatttggcgaaccgattagagcatgaacggtgaggaatcctcagagaagcgtcgattcatagatcagatcagatcagtgtatcggagagtcgccatggctgacagatatcagaacaaaaatggaatgctggatcctaattcggaacgatgaatgattgtctctctctcgattttttttttggccagctccaaggggttttctaagaaacaaaaaggttctgtgaacaacgcgaaggtattcaaaagcgagagagagtgatcttggagggaatgatgatgtgttgatgacgaagatggagttggattaaagaaatctaatttcatgattaataatttaatataacaaaattagtcttctccaatgctcaaaccggagacctaagatgtacactccctttaaaaggtactgataaaaaaaaagttattaattgcatgttggcattaaatagaatcttcctctagagttcaaaacttcacaataataaaatcaatgcatatcaaagcatatgtataagatgttagctaaccacaattgttattcatcaacggtcaggatcacatcactcaaaatgcaatattcagatggtctttaattttgtgtaaatatacttagaaagaaattcacaacacaaataaatgagaaaaagcaaatcagtaattaaccttaaaaaaatgcctaataaagcgtcattaaagaataacccattatcgcctgtcactcacttttaatcatcaaaacacgccacgtgccaaactctccactgaatcaaagtcgccaaacgcttcagtcgctatttcatgatcgacacgaaggctctcttttggcgattgcaaccaccacctaagaagaacggctacgtaatttgactgtacgacttgcgaaaaaagtcgaaaccttttaacgaaccagacctaaaaatg

SEQ ID NO: 32848 - DNA, 3003 bp, Unknown
  misc_feature (1)..( 3003): 2750-1469P.txt file - cDNA_ID_3062089; gDNA_ID_1620396; Annot_ID_155782
taatcctctctcttaatctctttgaacatttttccccaaattcgccgcagtgaatactttctcttcccgtaaatctccaaaaatcgagttttttttattacttctcaattgaatttgcttcttccgattgatctcttaattgattcgcttgtgggttggatttgaatcctctcttactttccaaaggtcataccttttcacagatctatctttgaaattgtgaagaagaagaagaagaagacgatgattcgactaagaacatacgcaggccttagttttatggcaactttggctgtaatttatcatgcattcagcagcagaggccaattttaccctgcgactgtttatctatcaacctcaaagatcagtttggtgttgcttctcaatatgtgtttggttcttatgcttagtctctggcatttggtcaaatttgtcttcttggggtctcttagggaagcagaagtcgagaggctaaatgaacaagcttggagagaacttatggagattctctttgccattactatctttagacaagacttttctagtgggtttcttcctttggttgttactcttctgttgatcaaggctttacattggcttgctcagaaaagagttgaatacattgagactactccttctgtctctaagctttctcattttcgtattgtctcttttatgggtttccttcttcttgtggatagtttatttatgtacagttctatacgccacttgattcagtcgcgtcaggcttcggtttctctcttcttctcattcgagtaagttgattttcatctctcattcttagcaggactgaagacagtcatactggtgatattatgtagctgatgataggtttctgttgtaggtatatgatactggcgacaacgactgttgctatttttgtgaagtatgttttctatgtcactgatatgttaatggatggtcaatgggagaagaagccagtttatactttctatcttgagcttatccgtgacctgcttcacttgtccatgtatatctgcttcttctttgtcatattcatgtaagttttttcatccatttttttttgttctcaaattagattatttcaggaatatataatgcagaatgaaacatctgggaaagcaaagatgcttagactttgtagaacaagttcttgtttctttgttagactcattaatattcttatttgctgtttaggaactatggcgtgcctttgcatttgttacgggagctctacgaaaccttcagaaacttccagattcgtgtttccgattaccttcgttatcgtaagatcacgtccaatatgaacgacaggtttcctgatgcaactcctgaagaacttactgcgtaagtttcagatatcccatttatttttttatgactccactgaaaagtagacatattatgagtttggtcttatggatcttggatagttcttggggaatcttgtgttattgaatgcgttttctttcttttatgcagaagtgatgccacatgtatcatatgccgtgaagagatgacaaatgcgaagaaactaatatgcgggcatctctttcatgtgcattgtctacgatcatggttggagagacagcagacatgtcctacttgcagagcacttgttgtacctcctgagaatgccacctctgcagctccaggccaacgtgaattacaccaaggttcccaacagggtaaatcatgttgcctcacatgcaaatttgcaataaaattgaaatctgttatttatgcattatgtgttgaaataattttttcctttttagactcttaatattggaacaggaaagactaattattagttttgtgcaaattgaatcaggtacatcaagctcaggtaaccagggctctgaaataagttcttcagctggcgtttccaataatagtttgagcaggcaccacgccaggcttcaagcagctgcttctgcagcctccgtgtatgggaaatcaatggtttacccatctgcaaacacagtagcatggtatgtatttatctgttgactccatgcttggtctcgagttgtagaacagagcaagcgtcaactgacaaatatgtttgtcccttatgttaaggtcgtcgggagttcctggaacagagcaagtgtcaactgaaccagatcaaactcttcctcaacacaaccttcctgttgaaaactctcatgcctatgcaaatatgtcggagactaagctagaagaaatgagaaaatctctggaaacccacctcgaggtatggtacctgactaatgtaatatcttatatgaaactccagaacaggttgttatatcttgtcactgtaaacgttgtggtgtagattttgcgaaaccgacttcactttctggagacgaggaaaccagaatccgcaggggaaccagagaacaaaggaaagtcggttgctgatgcagcagagtgaatacagtggagaaaaagaaaaacagaacaaaaggtaagtaagtgaagcagagcagatagagaaaggagaaagaagatttgtggttcttctcagaaagacaaaaaaaacatgaatatcccaaaagtgtacatgttttattattattgtttattcagtgtcatagaaattagaagcttgagactgaaacacaaacagttttttttcttactttaaagtaattgttggtttgcattttaacgtgagattctctatattaatataactcttgaatgttccaattttttaatataataaatcttaattacataagccagagaatattcttgttgtattaatgaagatgatgcttgcaactgtataagattactgataacaataatataataataaaaataaaattaagttggtggggaggggtagtttaggaaaactgtaattgcagtattgttaattggttgtctccgtaactttttaaccaatcgtttagtatttttgtaaatcgcctctccaccttgcccctggagaaccatcaccaaaaaacagagccaaacaaaaaaaaaaatctaaaagcatcaatg

SEQ ID NO: 32849 - DNA, 3000 bp, Unknown; identical to SEQ ID NO: 1396
  misc_feature (1)..( 3000): 2750-1469P.txt file - cDNA_ID_3062099; gDNA_ID_1620396; Annot_ID_155771

SEQ ID NO: 32850 - DNA, 3003 bp, Unknown
  misc_feature (1)..( 3003): 2750-1469P.txt file - cDNA_ID_3062101; gDNA_ID_1620396; Annot_ID_155770
cagtgtttcactctacaaagtgcaatatataagatttgagatccacattttctgaaatgctcactacataaattgactacagcctatctcgaaaaatatataaacctttacgtgaattttgttttgcagacttatattagaaatttaattattgttgtaattattctagctagtctaaaatttctaaaaatataacgttttatcaaatcgattttcaaatttaatatggtctggtctatagattctatgatcttcaaatcaacgtgatgaaaaagtcaagtgtaatttacgatttttgttgcataccgttggaatcatgaccccaaatattaagaagataaaacatgatgggaaggtaccaaacaaattttaaggcctaatatatccttacaagtatttaaaatacgaacaaattgcgatcaatgtttaagtaaaaaaatcaatactgataaaaaggaggcgactagaaacaagagtttccttgataactaatcagatggctttgttcaatggctgcttaatattggggtaaaagaagcttagtgacttattcaaatattgctaaacaccaatacaattaatattctagtcaataacaagatcccatagatatttgtaatatttttttccagcaatttgtatatttgtaatatttacttgtaacgataggattcattttttcttatggacggaagacaatattttggtgatggactgatggtgcatgtatttttttagctagtttaacaaaatacccacacaaaaaaagatgatcggtagcattgaattataaaatcggatataaagatccataagtcagctgaaattaaaattttaatttcagaattaatgcaacaacttttggctaaactaaacaatatatacgtgatgctacacaaattttataaactaaaacgacaatatttaacccaaacatagacaaaatatatgaattgtacgtaagaacttgttttgaatcaaaatatattcaaaaatttgttcactaaatagaagagaaggggaatgggtttgcaactaggagtattatttgaacttaatcgtgttttctaccatctatctgagcaacacattccattattgttcatcatttcatcaacacgtcatattggtaacttgaggaagctgtttgaccaatgaaaaccttgttatttgggggatacttgttttctccatcgctaatgatttgttgattgttcaatggctgcttaatgtcggtaaaataagagaggcttaggtatgctaaacattttcaggtcaataaaataagattccatatatctttgcagggatctgtacgtatatatatatttataagatacgtgaacccttaaatctttagataatgctttttatttatgatggaagataagaattaggtgcgttaaattaataattggagtagtatacatactttagcaggtataaattattgattttgaatcaacttggaatctttgtaacgttttcccctttttcgttgtttagtactcatatctaacgtttgatatcgtgaaaataaaaaaaacgtttgatatcattaactatcaaattttattgtattttgttctggaaacttaaattgaagccattaaaagtggaggccccatcagtctcccaaattcaactgtcctcatgaccccaaaaatcaacgttcaaaattgatccacgcacttcgcaaacattgttgtgtgtaactcttgtttttctttaactcgagattagatagtaataaccctgtaagaaatctacttttttttatatatcttatctaaaaggctgaaaaccacaaatttacattcaaagatattgaccaaaataatacacatccattaactaccccaaattagcgtataaatctgacatgtaaagaacatacattaatgacgacctaaaatctgctttagttaatttgacctgcaaaaccgtgttagtgctgaaaattaaagacaaatagtatcttagtttagcaaatatttatgctatgtaaggaatattttttattacaatctttatagtaacacaaatcccctaaaaacaaatagtatacctcaactataaataaatttccagtaaacaagttttataaatgttgaatttgacccatatagataataatcaaaagaatcttttttttttgttttattttgttgatttgaccaacacaattatgttaatgatgatatatagaaacaaatatgttagtttaggaaaaatatatttaaatgtgctatacaaggaatgattttattagaataacataaaatccaatgtttttaatttaattattaataatataaatcatgtatagtcaatactatagtatcccctaaccataaagaaattgccagtgaacaacaatttttgacttcttttttgtaatcacaagtgtggtggatactcagaacttttgtcgtcgttttctcttgactaatccaagtcacactaaacgattcatctgagttaagtttttatttattatgattttcatcacaatcttatgagttctgttttctttttgaattatagtagttttttgttatatatctcaatgattcatccctcttcaatcttcatcatattcttcttcttcttcttcatatgccatgctctacagaaaatatgatttctttagatttcatctttttttacttgtttttattttagtcacttgaatgtgagggagaaaaaaaaaaaaaaaaagacaagatgtgaaacgacgcatttacccttaggaagccaaacatcgaaaatagaaaccgcttttttctttattttttttcttaaagtcaatcagtaaaacaaaaactgccattacccataataccaactacactttcacagccaagtgtctataaatacagagcataattacaccatctttccttacaacacaatctcacaacaattacacactaaacaaaattcaattttgcatctccatttctcgagaaactttcgttttcgtagacttataaaaccatg

SEQ ID NO: 32851 - DNA, 3000 bp, Unknown; identical to SEQ ID NO: 1405
  misc_feature (1)..( 3000): 2750-1469P.txt file - cDNA_ID_3062148; gDNA_ID_1620397; Annot_ID_155829

SEQ ID NO: 32852 - DNA, 3003 bp, Unknown
  misc_feature (1)..( 3003): 2750-1469P.txt file - cDNA_ID_3062152; gDNA_ID_1620397; Annot_ID_155823
aaaatttatcttaccatccaagttcattgaagctcaaattgtaatgatgatatctttattcaaatatatgaattacttgtattttattcctttttttgttatccaaaataaatctataaatctgaaaaacttgaatttcactaactatggtttcatatcgcttatctcattgtgatgatgagatgatctatatacaattccgttggaatctgttggattcctgctctaccaattcttacagttgatcaccaattctttataagctaccattttgttttcaatgttatgcgattctaatgttttcaatcttccactattttactacgattttgtttttcctttattcacctgacatttccagtcgcaaacaataagccttagtgaaacacactgcacaaaactgcagcaaatgttgctctcaagacaaaagacattccgggggaaacaaataaaaaaactcaggagagttatttaagataagcaaaaaaagatacatcttaaactgatgccatttcgtttttcagtttcatgtagacacaaccttcttcaccacttttgtaacctcttccggggccttctctgccggtatgttcaccagattctccttcttcgcataatagtcaattacctgcaacaacaacaacaagaacaaatgtcaaattctctgatagtcctcaagttcatgtactataaggaaacataccggttgcgtctgcttgtggaatgcatctagccttgatctaagaacatccgcattgtcatctttacgttgaatcaatggctctccagtcagctaacaaacaacgaagttgatacagagatcaaatcacaagagagaactcgatttactaagtcaaaatgatgaatcagaatttgatggtttttcttacatcatcgactcctggaactttaggaggtgcgaatttagtatgatagcttcttccacttgaagggtgaatccaccttccagtaattctttcttcgagaaccgaatcatcgatcgcaaaattaagcaccttatctatctgagctccccttctattaagcatctcatcaagctacaagatttataaacaaaaaaagtcagaacatttacaagagcgagcagatacacaaacaactaaccacagaaaagaaccagaaaccttctctgcttgagtcacagtccgcgggaacccatcaagaatgaaacctttctgacatttgggtctgttcattgcttcatccatgataccaacaaccaagtcatcagaaacaagctctcccttatccattgcttcctttgccttcacaccaagaggagtcttagcagcaacagcagctctaagcatgtcaccagtagacaaatgacacaaacaaaactcatcctttatgaccggagactgtgtacctttccctgaaccaggtggacctgcaaattccaaatcatacatgaaccaaaactcaattcttcctttctattgaaccaaaaaacacaaattcacaatcccttcgctatgatcatcagataaagcattaacgataacagcaaaatgcaatttttacacactaaaacagataaaaatcggaactttcgctacacaattttcacagagatcaaacctaaagtaccgattgagtgaaagattcagaggtaacgaaagagatgattgtaccgatgaaaacgagacgtttgtcaggtttagaggcacatttcatacggcgaagaagctcagacatgagatcaacagtctgaatatcttccatatcaacagaagccgcactgctcgttgccatgttcgtcgtcgtcgtctcttacaagagaattagatttggtccggtggagttgtgttctctttttgaagtgcgtgtattggattcgatgcttccaatgttttctttcaccgttttacgattttacccttaactgtgccaacaactacaaaggcctgcccttcgaacaacaacaacctgcctggggttggtgacacacccaactctgaaaacgagtctttcttcttacacatctaatatcgcacatttttcataattacataaaatcaaatatcatataatacttccaacaaaccattatgttttaggtcaagtgaaccaaaaaaagcggactagaaaacatagaataagtagagtctaacacattttttcggttttaaggcacgatggaccggtcatttgtccaattaacactagtgttaagaaacttaatttgatattaagtactgaggttgaagattttgctagtttatggtagacttatgaatatcagtataccactagaccacattcacttttcgtcaataagacaattaaactcttgaaaacccacatttttcttttttttttttgaaagccaaactccatcaatgtttggttattaaagatatgaatgaatactacatcattagtttctttcttgataatttttgtatatttatttattaataagtttttgtatttttctaaattcttaacattaataaaagagttttccaaaaaatgcaaaataatactataaaattcaaaatagtacataatataagcttttttttttccaactttacatatattgtaaacgtttttacgatcacatacatctgctttttgaaaattctaaaaatataaataaactctttacctcaaaagtttcaatttgctatatacatttttttaaaatcaaatttaacaataaaaaataaaattagattacatattattttagaattaaattaacataggcccacttcttatgttgggaaaagggaacaacaaatataacaatttagcaacaaagaagtagaaaaaagaggtgatgtcataataaacggtaaaataataggaacgatgagcgagcggatctagctttcgtcaaaatcatcatcactgagtacatctgccacgtcagcttgattgggatctatttggtcgcccgtacacaaaatctcggctcactcactcacactactcaagtcaacgtttctaagattctccggcggagcgattatg

SEQ ID NO: 32853 - DNA, 3000 bp, Unknown
  misc_feature (1)..( 3000): 2750-1469P.txt file - cDNA_ID_3062156; gDNA_ID_1620397; Annot_ID_155821
gaaagacctggttctccatttaagtctttaattcctatattttaagactctcaagaaaattcaatcaattaatccggtgtatctaacaactatcacttgtctcagttttgatatgcaacagtcatgaaggtgaaaagattcactgcttctatgagatgatagaaaactatgctttctttacctgaagaacattgggaagctcacaatgaagtaaatggcatagaaaagacatccaactctgtacatggcacttcggtccacaaactcatagtaaggaaactgcacaagtttgaaaacaaaaacagaacatatgagcggttattgtcaagtgactagtttctaaacaagattctagaatgattaagtagataaacgtagtctttaagcagactataagaggaatttgtgatatatgataaaacaccaagtagagagctctttttataggaaattatcaaagaaatgtagacatcacaacgtacatttgcgatagcaatagtctccaagtatgcaatgaaataagaaagcgcaagtatccatgcagcctcaaaacaccatttcagagaatctggtaaatcagcagtggaatggcgtagcctccgaagagtaatgttcgatgcaacgtggtaaaagaggaagcaaacatgtgttaggaagaatgttgtgtgaggcacctgttcaacacaaaacccctgccataagctcatggaaacaagaaaactactcaatagaacaaatctgccgagataatgctgtgcttacattattcattttccatgatggaaaagtataggacgctccaagaactttaaagaaatagtgagtccaaaagtagtttccgacatagctgaaaacaattatccagagatttgcctgtggtaaaaacatgttccaatcagtacaactatggatgagatcttgagaactctcaccagtactcaaggaagttaaaacaagttctaaaaatagtttgaaactagaactggcaagccaaaatgtcatgcacatagaaaaaaagcttgccttaacccaatagcggtccttccaacataaacttctgtcggcctgaaagaataatgcatatattctgagtccatatggtaaggaaaacaatagagatttgcattcaattggaagcaagtagctagtagacaaacaagtatagcaccacgaacacgttagctcacagtgaaagcaaaagttgtcaaaaagtaacctttccaacgagtaacatgggtataacgaaagcaggaacagctgaaaccaaagctagaagcagatactccaactccgtgaatgtctgctagtttgcaaagtaactaacacttattagtacttcttcaataccacttaaaagacaacttcatacaacagtaaaattttcagatctctaaaacactgacatggtaaacaatgagacatcatttcataaactttgttgatctaatttagcagataaaaaaaagtgaatagctacttcaactctgtctcatcgtctcctaaatacatcagacacttaaaaacaatgctcatttgatgatcgcatagacctcgtaaagcttgtaaggaacaacgatgcctaaacagagagtgagccaaaaaggagtgtagaagaggaagaagagctctccccatctcttgctcggattcggtgccagccacaagctcggtgaagaagatcctatcaaatgtaaatcaaaaaaatcagggaatggggacgagagattcgaatcagaagaagaagaagagatcggcgatagttttacctgacataatcgctccgccggagaatcttagaaacgttgacttgagtagtgtgagtgagtgagccgagattttgtgtacgggcgaccaaatagatcccaatcaagctgacgtggcagatgtactcagtgatgatgattttgacgaaagctagatccgctcgctcatcgttcctattattttaccgtttattatgacatcacctcttttttctacttctttgttgctaaattgttatatttgttgttcccttttcccaacataagaagtgggcctatgttaatttaattctaaaataatatgtaatctaattttattttttattgttaaatttgattttaaaaaaatgtatatagcaaattgaaacttttgaggtaaagagtttatttatatttttagaattttcaaaaagcagatgtatgtgatcgtaaaaacgtttacaatatatgtaaagttggaaaaaaaaaagcttatattatgtactattttgaattttatagtattattttgcattttttggaaaactcttttattaatgttaagaatttagaaaaatacaaaaacttattaataaataaatatacaaaaattatcaagaaagaaactaatgatgtagtattcattcatatctttaataaccaaacattgatggagtttggctttcaaaaaaaaaaaagaaaaatgtgggttttcaagagtttaattgtcttattgacgaaaagtgaatgtggtctagtggtatactgatattcataagtctaccataaactagcaaaatcttcaacctcagtacttaatatcaaattaagtttcttaacactagtgttaattggacaaatgaccggtccatcgtgccttaaaaccgaaaaaatgtgttagactctacttattctatgttttctagtccgctttttttggttcacttgacctaaaacataatggtttgttggaagtattatatgatatttgattttatgtaattatgaaaaatgtgcgatattagatgtgtaagaagaaagactcgttttcagagttgggtgtgtcaccaaccccaggcaggttgttgttgttcgaagggcaggcctttgtagttgttggcacagttaagggtaaaatcgtaaaacggtgaaagaaaacattggaagcatcgaatccaatacacgcacttcaaaaagagaacacaactccaccggaccaaatctaattctcttgtaagagacgacgacgacgaacatg

SEQ ID NO: 32854 - DNA, 3003 bp, Unknown
  misc_feature (1)..( 3003): 2750-1469P.txt file - cDNA_ID_3062164; gDNA_ID_1620397; Annot_ID_155810
aaacaaaaataaaataaataaaatggatcataatatattgtggtatatagttatatggtgtaatggatttttgagtcgacattaataaattttataatatcattaatctaccgcttcaatacggattgaatttttattttattattttctaacattaccaaattctaattacggtcttttcttcttcgatgtttatatttcatttgattgtcatccccgaacaaaatttattttatatcattcaccaatttttcaattcgtccccaaatacttgtcttctccctacatattgtattttagctaaaccaaacatgctacaacagctgaaagcaaaaccatctttttatatcacaataccaattaccacattcacaaatgaaaaagaattatgagttatggtaaaaatgacttttttgtgtagaaaatggtaaaattgaccaaatttccttatataaaaatgtccaataatattatattaggaacaactaagggaggttgtaaattccaaggagacataaaagaaatgcactgcttttaaacaaaactcagtatttactctaatcgaaagatcgttcttgtatatgtgacaaagatatgcttccctgcgtaacatgtcgtttcaaagaatcaaatttcagctttcaatggatgaactttcattcaccttcaatgttcaaatcgatctcctttagttcaccaagatctagtcaaaataatgttttcctagttgacaatatcgctatatattaatttctccacaaatcatacccgaataggaagatcaacaagttataatttttaccaaaaaatgaaaaaaaaaaagatcaacaacgttttgtaatataaaaactaattccaaatttagtttatacaaacaattatttgttatttacaagtttttaatacaatgaatcataaaaaatagctcattaagtgtatatatgtatagaaatatatacattcataaatgtacaaatgtatatttatacacacatttttattcgtccatcttattaagtgaaccaatgcatattaaaatatacacattttttattttgtataaatttttattaagagttggcaataacacatctattcaccaattagcacaaattgaaggatttagttcttattgatttgtttcattttatatattactttgctataatttacaagcttttttgatgatatgaaagtatatgtaaaggaacaaaaattagaagagccatacatcatttttctgtgaaatatacaaggcgtatggtatggtacaaaatggagtatttgactactgtagcattttgagtttttttgttttaagttctaatctatgcgaatatatttggttctttcaattaattttggtgttaaagatatttgtttatttagatagtctaaatcatatataaacgatgaatttttagaagtttttttttaaacaaacaacaaatccaatttaaataacaacgtaagatagtgcactagaagtgcagtcttcttgatattacatgactattataattcaactaagcttttatttttgtccattacttagttacatcattgagaataatgaagatgaagtctaattaaggacaacctagaggatgcgcttatctcaaatcatttatttcaaaagaaatgaatatttacttcgtataattagagagccaataaaaaaaacataaagagtttgttgctcataatctcaacaacatcgaagacgaaactgaaccacctcttcacatcaaaaacacattttcttaaaaatctctcgactgtttcgtcaaattcttctgaagtctctgacaatggttttcgtccggttaagctttaactagataagctttatatgacccttgaaaagtcacctaagtcatcttccccttcttttccttgagaatctgaaaaaactttttgaagaattattcgattccttccttcttatctgatcctatccatatccaaactattacttttcaaaaacactctagatttatcgtttttcaaccccttatattcgttgaaatctgagaagttgatctcccaagttttcgcaattcccctctagataatgactttatagccattaatctcggagttttgatagatcatttatcacagatccgagcgtgggctcaatctgatattgtttgtggtgtgtgtgatcttgaaaattgaacttatggatgtagaagaaaaaaaaatatgtaattgtaaaattcccaatttggcgattgtgaaaatgtgcaatttggccataatttaggaaaacgatcaaaatcagtccaaataatttgttaaatacttttttaacccaaattgtggtattttcaaataaccaacttgaaccatataagcgttagccgaattctacatcgacctttgttagtaactatcaaacgatgttgagtcaaatgacaccataacgaacaaagtatagtttgactcatcacaatttaattggtttactaacaccatgaaggtcgatgtagaaatcgactaccgatgatatgattcaggttgctactttaaaacttttacttgttcacgttcataaatacatgctatcatagtttgagttaggaaaagtattatgcaaattgttgggttgattttgaccgttttatacataattctagcattgagaataaatgcctataagtttgtacgaatctctttttctttctctataatgaattttgatttgaagttgaaatcctaacataactacaaaatatcgcaaaactatcatgagttaaaagcaccgttgtaaactttttcctaacacttcacttttaaatctccattgtgagattaagaataagaaaaagaagagacaaatgggccttcaattttccctccataatataagaaatgggcctggcctggtatattcatcttcttcctctaccttcggtagagaactgtagacagaacaagggctagtttcattgtaaacgctaatcttcgctctcagcctccaaacacacatcaaacatg

SEQ ID NO: 32855 - DNA, 165 bp, Unknown; identical to SEQ ID NO: 1411
  misc_feature (1)..( 165): 2750-1469P.txt file - cDNA_ID_3062176; gDNA_ID_1620398; Annot_ID_155861

SEQ ID NO: 32856 - DNA, 3000 bp, Unknown
  misc_feature (1)..( 3000): 2750-1469P.txt file - cDNA_ID_3062180; gDNA_ID_1620398; Annot_ID_155858
aagaaatgcagggaatgcaagaagttcttcgacttcacgacccatgtactcgatcaaatactccagtttttcctctaaagaagtataattatactgcaggacttgaggatgttttgtgctcattgctagaatgtcttcgaatgaaagaccataactcaagtacagtccaataaccctctgcatattgtcagagcttgttctggtcacagctcccatcgcaaaggccagttcctttgttctatgcttatatccaatcttcaccagaaaaccgagtttgtgcgagagattattttcggatagagctaaaatcaatggtgctttactcaagaatttgaacatgccgggggaatcaaagccgcattccttcagaaactctatcctcgggcgcagtttcctctctttactagtgctgataacattagggaacacatgaacaatcttaaacacttgctcactcgtcaagccagcaaaagacttgagaaactctacttggccgttcatatgctcaacactataactcaatatggcaggaagtctacgtagcaccgttccagtagcgaaatcgtcttccccgcttagattcctaatgaaatcaaccctaggaatcaactgactatccaagtcactattgagaatcactggccgcctagcaattataccaattccaccaaaaggttccaagaaactaatcaatctctcaatatcttcaactgatttctgatacagcaatttatttaggtacactttgttcaatacatgagagatcttttctttaggtatcccatggaggagaagcaatctcaccttctgattaaaactaagcaagatagatgtgtctaccacagagagtaagcgctcaactaattcaggatcaagccttccttcaagttcatcaactaagaaactaataacgagatcaaattcttctgaagtcaataaattagggcacttagctatcaaaccctgaagcgggaagccattgattttcagagactgaagagaagcaacacgagcaccgattttatccaaagatgtcgactttatatctgggttcttcgctaaaatcatctcagtttcttcttctataaacccaatatctcggaataacgaaaacagagattctgcaaagcaaaagagagatacttagtgtttgcattaacgcacacaagtgtttgcattaacgcacaccaagtgtttgcaaatatgcttcagagaacaaatgaatgcagagaaatgtcagatagtcagattcacctaccaatttgacttccggattcaatcggagagctaaggcagctacatcggaaagttaaagcaggttctcgatgatttaagcagctgataagcaatggttgtagctgagaccgaaatgtagaagaagcagggaaggttccatgggagcagagagaagttaccggcgggagatgaagccggagactaatcggcggtgagaaaacggagaaggaacaagagacgagagataagatcaccatggctggctatatccaaaaccaaggtttctgattttaacggtcgtgtttgattccaagatgggttaactttaataatcaaagatttaacaaaaaatgttattgggcctgagaagagaacatgtttcgtttctaatatgggaaaattgcaaaagaatcctcaaacttttaatcttatataatttacccttcatctaccaaaaatgcaatagtacctatcatcttaacattacgatagaaaaattatttaagccacccctagtatcggaacattactatctgtctatctctttcacctttgccactatattgcatttgccatgattgtggaaacgatgtggtaatggcaacaatggagtcatggagacgatcatgcgtggcaatggtaatggtggtgacaatagccgtgacaatggattaactctttaagtgttcttttaatcagtacaaaggttttcttttcctcatgtaacatgctatggtctcaatgccccttcaaggtagtgataaatttattaagataagtttgtttgtaatttattataaatcgtcatttgctccttgcacaagtggtaatgtgtctatggccttggcaaggtcaaaggattccaaattcgtctttgcaatattgttctttttttgtttaatgtccaaaacaaacatagttgcattactctaacatatttagcagcacaaatatacaattttgtactgattaaaacacaaaatatttttctgattttcataaactaactcaaacttggaaaatgatcttttaattcttaactcaaacaattttgacatgactgatcgtttttttggatacgtaaatattatgatagaagtaataagaaatgtgagaaatttttagttttaagaagatgaaagacctagtaaatagatgttcaaactttgaatacatcaaacagatgagttaatgctagtgagcaaaattccatagtcaagtcttccaaaaaaaagtcaaaacaatcatgttataaaagtttgtaaccaatatttacatttaacacatttataaaatgtgacatcaaaaacgcggctataaaataacgttacgatattaaaaatcaaaggactaataaaactcagaatttaatttggggaaagaaaaataaaccctgcaagatttgaagtgttcctcctaatcaaccgtaatttagaaatggtccttaatggacggtggtcgtcgtttcacactctccgtccaccattttttttttttgtttctcctcctctaaaaagcaatggtctttcaagctccatcaatggctactactacttagcgtctacgaataataacccctttaccataagtccatagatttatctctcttcttctcaccactcatgtccctttctttgtcttcttcctctcaccgccttcaaagttttcatctttatccaaataaaaaaatcgtttcttttttagtttcttcttaacatatttaaaggcgtaccctttctcttacttatcctctgcaaagttatg

SEQ ID NO: 32857 - DNA, 3003 bp, Unknown
  misc_feature (1)..( 3003): 2750-1469P.txt file - cDNA_ID_3062184; gDNA_ID_1620398; Annot_ID_155857
tttttcagattaaagctatacttttgaaaatagaggccatactccaaaaccttaattatattatttttactatgattaagaaaattaatcatcgaagtcaactaacttggatgatctaagtacattggatgataacttgactacataatttaaatttaactctaaatgagcttgtcgggtaactttgtcaaaaatagtattttgtttttccactataatttttatatattacttttgatcttcataaaccttggatgtgttattttggttgattttaaaatttccaatgcaaaagtcatttccaatcataaactggaaactggtgtatatgacacatgactcttaattaagctatctcgtatacaacattcgaggattgtcatagcacgatcctctttattgaatcaaatgttggactttacatctttacttctgtagttcaacgtaccaatttcgacggacagtaaaacagtatatgtaaattataaatattatataaatgttgtactttatatgtaaaatttgtatataaaacaccaatttcttcagtgaataaacttatcaatttcaacggacataaataagcaaatgtacttcttcttttttgtgtgcaaaaaaatccgtatgtacttgttagtcgaaactaataaatagttgtacctgacttgtggtcctataacagtttgtgtttgttatctgaaggcaatgcgaagtgttggagatatgttcacaatgaacatctttcagagtagtaggtgagagatgagagatgcttctctttttgtaatacgaaattctaccaaatcacaagttcacacgtgtctcgtttgaaaagaatcaatttttgtatcaatagttataagaaaataaattatttgtcttgtggttgtggttgtggttgtggtaggtgagaaatatcaaatatttttctttgttaaacaattcaaacaaagataaccaactctgatgacttacaatggtagtattttcttctttttttttggacaaaaaatggtagtattttctaatcatggattcttatcatagattactacgaatttatttggattggatttagtttacaaacaaaatttcaccttacttaattcaactgcaaagttatttgaagagtatatacatattttgatgaggatatacatgtgttctttatattgaagggtctttacctactaatttttgtgtatgcatgtattcttaacttaatcttgttgttaaagcatttaagaaaattaaaagtgatctagaaagtgaagtacatcgaatctggtttagtgaattatctttcacaattcaacacaagttgtatagaaaattaagatggtgtaaaagtattcgtcatgctatgacgacgataaatgattttaaaattttcacttaagtattagtgtattacgtatatgtatcttaataaagaaaacaagaataatcttgtgccgaactcaatttcatagttaaaaacttttttttttggacaaccaaatgaatttaattaaagcatttctaggtaaaacttttcaatcctttcttattttctattgaagtagctgacattctatgaaagcaaatgtcaaggaaatgatttagcgttgaaaaaaatgaatgataacgattttaagcagaaactgacaatcaattaggaacaagtgtgtcgtctgggtcctactcaccatactatctgtccgactttgattacacagtcctctcaagtctaatctttttccttttattaatctatttgtttatcgattaagagtttgatcactctatagtttgtataaaaacgtttggtttcatgagaattaaagttaaaatgacgacccaaaaaaatgtttaagattgtcaagtgtaatgaccatccatacattcttagttaacctactttcatttacatatctgctaattccaaattttagtaccgtactttttcatcttagagatacttttctttttccaactttttctagaattattctctctatttaacaaaacgtgtcattctaccactgtttacataagttaagaaaaaatgtgaaaaaaatattttatgtcctttgataataatctataacagtttatctctctagtcaatagactgaaataatagggattaaaaaaaaactgcaaaacgacattctttgttacacaaaattattatattaaaacaacattctttgtgaaaagggagtattattaattagagtaaacggttaaaacattatcctaacactaataatcagttttgaaattattgttgggctttgtatgatttttttgattgttttgttaaagaaatatgatgataaatttagatatcacgtaattaaagaaaatctgttatactagaaaatcttaatagtacaacttttagcgtagtttctgttctttcaaaaatatgacaaacttgcttactgttaccgaatttaatagctttttatttttggtgtgtgcgaaaccgaatttaatacctttatacatagcaagtttaacataaaatttagtagtacataacattgtgatactagctaggtttcctaaaaaaaggcatacttgttgttactgttagcgaatgtaatagctttatagcaagtttaacatatgtaataaattataaaagctactttagttataaatttgtatttttttagaacggatcgtaatatatttggatgtattatctccgaaatatttattttttcatggcctattatttatttttattaaattttctgacattatggcctattattaattgataaaatacaaaagaatggatgtgtctcgattttcaattggaccaaatcattaagccagatcagaaaattgcgttaaaatatgccaatcgtctctaccttctttaatatattttcatataaataaacctctcaacctccacactttctcacccatcacacaatcctcaaaacagagtaacccaaaaaacagagcaatctctaaaaaatctcaagaaacctcactaaaatg

SEQ ID NO: 32858 - DNA, 3003 bp, Unknown
  misc_feature (1)..( 3003): 2750-1469P.txt file - cDNA_ID_3062222; gDNA_ID_1620399; Annot_ID_155886
tatggcttctgaaacgtatggaagtaaattagatatatatctgattccattttatttacattgaaaactaatgacttaaatttaagtacataagcagtagaagctaagtcatatacctgaggaccacgcagaacagcaaaactttccttcatctacatgcttaacatcaagacccacaaaccatgaacccgtgctgacgtcatcatgagcatacgaatgaagaatgtctctgtcacccccccacccccaccccatcatcatacataacagacaacacaaaaactcagtttcaatcttatttctctgtttgaaagatatgtgtcatcatgcgtaactgagaggtgaaactgacctattgatcgatacaaatctagccaatgcgtgcgttataacatacatctccccataagcatgccggaagtatctataagataaatgaaacaaagaacaggtggttcttagtcacatggaagaaatgaatctagtcaatgcgtggttctgattatttataaaacttacgctttcttgtcaccgaatttccaccactctggttcataccatttgtggttcctgccagaaaatcaaaacttggttaagattatatcagactgacaatatcctgacaaccccaatggtcctagtggttttgggtttttaagcttaaaactcacggttctgagaagacttcgcctgatttcatgcaaccgatgtaagcccgtgggttttccagatgtgctgcaagcgtagttcccagagcatctgcataggatcaattacattaataccacataatcatgtcagcaaaatgcatacatggaaactcgttgacctcagaccttttttttttttagtactaacttacctatatttacgtagatattgtcgatggcttttgcataaaactgtgcatcccacctatctgcagcgtaggcaaagaacagttttaccttcttagaagcttcctcgggtgcctcaactacatcatcctgaaaaccagtaaatggccaagctctcaaactaacataggtgagcttataactgaatgattcaaggtaataacttaagaggggagaagcagaaaacacatacgagaataatgaagtcatcggtttgactattttcagtatcaatgctcttgtccatgctgtcccctttatttgcactacatatcacaaaaacaacgtttcaaaacaagattccagtaccgtataatcatctttaaacacatagagaaatcaaagagtgataaacagaatccaaaccttcttccaataacaaatcttgcaatcacacccttttcactttcaagttttttaagtgatgcacctgcaataaaaggaagtgctaagctcataacacattgcaaataacagactggtgtcttactaaaacacgtataaagagaaaccctaccagtccccatccatgcttgacgaactgcatccctcttcttcttgttacccaaacttgtcattatcccgataaccactaacggtcttttcttggtttcagttccatcagcaagtttgggactttttgaaacaaagccttcttgcctagctgaacttaattccatctcaagagctgctagtgtcttcttctgttccctagaaagaaaagtctgttttcaacagtccatgaagaccaaacaaattaaacgaaaaccaaaatcaaacaaagtaccaatcttttacctgcaagctatgatcttcaaagtatcatccactgatatagcagatttcccctaaaccccaataaaagaacatcataaacattcaagtacactaaaccaaagtaagacagtaattgcaaatgtaataactttctgacatgacattactctctgctgtaatgaaagtgacagtactcaaatactaacctgtccggttactctatcgagctcattgattagatgaaccctagtttgagattcttgccataaactatctcaaaaaaatgtagagacgagaccaattaacaaacaaaacaaataagtaattgttagatatggataaatgtagatttaagaactaaccggcctgctacatagaaggaagcaaaagttgcaaacataaagagcaaaagggttgatattctcgagctcgataatcttatactcgaccctttcctcgccattgaaatagatccaaaatcagatctcttagtcaaagcaatcagacgcaaatgcctcttcactgtcgaaattcgatcaaatttcactaattcaaatctccagaaatcggattttctggatccaatgattcgtcgtcactcaaaataaaaccgattaggaatgtatcattggatctgcaattctccggtgatgattcaccagcggaacacaaacggcgagatcactcacttcgctgagaaaaattggaatctggattgagaaataaggagagacaagagaagagagtgccgttgagatttatgatttttatcggattagtttttgggatgtcaattttgtgtgatcttcttaattactttctgatcaattaccaaacctagtctctctgattcttttgattataggttaactctacaatttaattctcatttatttctactgatttgtaaactttttcgaaactgtcaaatattacccaccgtgaaaaaaagggatcaggtgttctttactaaacaacatttgttttttttgttacccggcggttgaaaaggaggaggaggtcaagacgacgacgtttaaaaaaccatgggccgtcaaatactctcgtcaaactcttaccagatgattattgattagatattctctcttccatttttcccctttcgaatttttgcatttcatcatccttttcgtgtgcttcacaacttcatctctctctcgagagaatttgcgtcatcaattcaaatcctttacgcaaagtttcagtttttattcactttcttacataacccatcaaaccaaatcctcgatcggattatgttaatcaattgctaagagctttttcttctacttcttcgcaatccgccatg

SEQ ID NO: 32859 - DNA, 3000 bp, Unknown
  misc_feature (1)..( 3000): 2750-1469P.txt file - cDNA_ID_3062226; gDNA_ID_1620399; Annot_ID_155885
taaacaagaaaacaagaaaccatgtcgattacaaattttaaaccctaacactccaatcaccatgcaaagaacattaaattggaaatctcttttgtctacataatcaataatattagagtatgataaaaatattgacatttcacgatagaacaaatacatatgcatagcctttgttgtttgtgcaaggtgcaagccagaacatacagagtagagtgaagcacgacaaacctggatattgtcacctctagggtgtttcctagcgcctttctcaggtacatttacaatctatatccagaaagagagagttggaaattgggcatcaaacacaaaagaagtcttgatatcttaaatagcagagatcttaaagcaaatactacatggcttcctttggtaagtttacaatttagtgaagacttttgcggctatttaaactgtaaacttactgttccttccagcatttttagcaatgcttgttgaacaccttctcctgatacatctctgctgatgttaaggctttctgcctggtaaccaaaaggtccaaagaacaaaattcatctaagaagtacgggatatgatgttcaagttttccaaacaagcacgaggaaaaactttttaataaagttctaaccttctttgttatcttgtcgacttcatcaatgtaaacaatcccttgctgtgcagctgcaacattataatctgcaacctgtccagagatatcaaatccccacattactaacaatatatagaaataattatagttgtatacaaatataaatgtttgtgttttagaagcttactgtgagaagtttgtataatatagactcgacgtcctctcccacataaccagcctgacaaatcatttcatttccgaacaaaaaatgaatgtcacagattggtcatcatgaaaaggacatgcgccaaaaaagactagaagaaagacgagaattgcctgagtcagggtggttgcatccgcaatgacaaaaggaacatttacaaatcgtgccaaggttttcgcaagtagtgtcttccctgtgtttgaataaaaccaccaaaacagatgaggtgagacagctgaaactacactagattgaactaataactgtattatagcagcatatcaggcttgcgcatttatgcagattggcgtcagaatattacctgacccagttggtcccatcaggagaatgttactcttctctagttctaccatatcatcatctgctggtttcgctgcagtgctatctgtttctcccgcagacctagcttcccaaaaagtaccagcatcataactaacaatctcttaccggatacatgaaattacaaagaaacaaacagatgcaaatgcatgtgcaagcaaaataaataagaagtgaactaaccgtttctgtgatgattcgtgatatatcctcttgtagtgattgtaaactgccactgaaagtacctgcaaccacaaaatgacacaagaatgtgttaaaagctaaatatatttcccatgtctaaaccaaattagaagcatgtataattcacgaatattcagagatgaaatttagcattcaactaagtagtaacaacatcaaagtataatcatttcacctttttggctctttcctgaccaatcacgaacttgttcaaacccttacatatctcctttggtgtcggaaaatcagacccaagattggatccaccccaacaatcttctttcgaattcgaccctgttccgttaccaggaccaccaggactacttccaccaccaccaccaccacgaccgagattaacactggacccattaaccctaacggaaactccatcaccaggaggctgccatagatccggtgggtctccttgtgagctcagaataacaacagaagaaccaacaccgctgagcttcttctgagcagcataacacttagtcgaattacgtctctctcctcctcctcgattatccaagaaactcgttccaagagaggaaattttataggggaatttctcatcggatttagaacggtgattacagtgaggaggacttgtggcggttcgagcggtgtggatacggttgaagataaagtatctaaaatgagaaagtgtaagagaagcggtttctcttgacgtattcgaccttaaagctgcggccatggcggattgcgaagaagtagaagaaaaagctcttagcaattgattaacataatccgatcgaggatttggtttgatgggttatgtaagaaagtgaataaaaactgaaactttgcgtaaaggatttgaattgatgacgcaaattctctcgagagagagatgaagttgtgaagcacacgaaaaggatgatgaaatgcaaaaattcgaaaggggaaaaatggaagagagaatatctaatcaataatcatctggtaagagtttgacgagagtatttgacggcccatggttttttaaacgtcgtcgtcttgacctcctcctccttttcaaccgccgggtaacaaaaaaaacaaatgttgtttagtaaagaacacctgatccctttttttcacggtgggtaatatttgacagtttcgaaaaagtttacaaatcagtagaaataaatgagaattaaattgtagagttaacctataatcaaaagaatcagagagactaggtttggtaattgatcagaaagtaattaagaagatcacacaaaattgacatcccaaaaactaatccgataaaaatcataaatctcaacggcactctcttctcttgtctctccttatttctcaatccagattccaatttttctcagcgaagtgagtgatctcgccgtttgtgttccgctggtgaatcatcaccggagaattgcagatccaatgatacattcctaatcggttttattttgagtgacgacgaatcattggatccagaaaatccgatttctggagatttgaattagtgaaatttgatcgaatttcgacagtgaagaggcatttgcgtctgattgctttgactaagagatctgattttggatctatttcaatg

SEQ ID NO: 32860 - DNA, 3003 bp, Unknown
  misc_feature (1)..( 3003): 2750-1469P.txt file - cDNA_ID_3062282; gDNA_ID_1620400; Annot_ID_155933
tctaagattgttgaggagagtttgaaggagaaaggcaaaagtaagcaatttgaagatgatcaagtggaaaatgatgaacagcaagctctgatggttcaggagagtctatacatggtggagctttctgctcaacttgaagaagataaaaacatttcaacaatacctccgctgaatgaagatgcgcagcttcagaaggttatttgggaaagcgcgaagggtaaaggccaaatagagcatttcaaagatccagtggaagaagatggaaatcttccaagggtagatctcaacgttaaccatcctcataggtaagtgtttgtctattactttggcggtttccttgcatgctttattacaagatagaaatgtcctgacctggttaagattatttcacttgtagcatatgtgatggttgcaaatctgcgattgaatatggaagatctgttcatgccttgggtgttaattggcatcctgaatgtttctgttgtcgttattgcgacaaaccaatcgctatgcacgaggtttagaaccgtatatgaaagcttccttttttatagtgattggtactttaatatactaattgagttgctcattatgttttctgatgcaacatctaactcctgagggctacttagttttcaaacacaaaagggaggtgtcatataacctgctacgagcgtagtcacccaaactgccatgtctgcaaaaagaaggtaacttcccattggggtctatgagttgaaagttaaataattggtatcttataacagtttacgacttatgtataatctgttgtacttttcctggcgatgatggatcttaatgtaattgtattcagtttcctggtagaaagtataaagaacatcccttctggaaggaaaagtactgcccttttcatgaagttgatggaactcccaagtgttgcagttgtgaaagattagaggtgggtttactttcacttcaatatgaatattggcaaatgagcatgagataaagaatcaaccgccatttcaaaagaagaagtaaagctttctcatgatttttttttgtttgcagccctggggaacgaagtatgtaatgcttgctgacaatcggtggctatgcgtaaaatgtatggaatgcgcggttatggatacttatgagtgccaaccattgcactttgaaatccgtgaattcttcggaagcttaaacatgaaggttgagaaagaattccctcttcttttggtggagaaagaagcgctgaaaaaagctgaggcgcaagaaaagatcgtgagtacattttttgaactgaaaattccttatctctctatttctctttcactcatatgttttgtgagtttcaaaacaagcaggacaatcagcatggggttgtaaccagaggtatttgcctgtctgaagggcagattgtcaatagtgtaagagcttatagggggtaacacttacttgagactaaaactagattggattcatgactttaactctgctctggtccacatatacaggtctttaaaaagccaaccatggggccaaacggcgagctagtaagcttgggtacagaacctcaaaaggttgttggtggatgtgaggtcactgcaattctcatcctatatggacttcctaggtacaataatcttttttaagctcatctcatccttctaagtaatctcacgcaaatagactaaatcaaatctcttttcggacacaggttactaactggatatatcttggctcatgagatgatgcatgcttggcttagactcaatggtactactagtacccaatttgtatttgccaatcaatatggagagagctctcaactaaaagtgctatttggtttgatcacaggttataggaatcttaagttagagctggaagaaggaatatgccaagtgctaggccacatgtggttggagtcacagacatactccagttctgcagctgcatcatcagcttcttcttcttcgaggactccagctgctaatgcatcaaagaaaggtgctcaatctgattacgagaagaaactggtggaattttgcaaggatcagatagaaacagacgattcaccggtctacggtgttggattcaggaaagttaaccagatggtctcagactccagcctccataaaatcctgaaaagtattcaacactggacgaaaccagattcaaatctttgaagcacctaatataggacaaatcgaaacatacctctctagaacatatatatacaaacgcacacttatgtctggtttttctttctggatccaaaatacaactataacagaaaaatagacatgagcacgtccaattatataactttctattttcagcacaatatcatttcatagtacaattatgacaaattaagacattgcatgtgtgctgctacataagtttcaatatcgaaaaactatgtttcacactttcttaatttaatttccagtagttgcattgtcattttcacaaaattaacccttttacttatatcatattttgaaactttcttatatttttttaatgaatgatagttagtaagtggctaaatgctataaatattttcttttatttatttatcatgattcttattggatgttgttgacaagaaaactagtactatttgattggatacagtatttcgcattaaggagctgaaacggcaacgtttcaagagggagggaaataactaattaaaatcgtctcgaaagggtaaacaattacgaaactgccaccaagaaatgtgcttgcggcacgtgtgcaaaaaaacagctggtctttcgctttggaccacaaaaagtaagtgtgtgtgtgtgtttctctttcttctccacacgccttgcattctactactttctttttcttttcttctctcaaaaagaccaattcaacacagtagctgctcaatggtctttcgaaacttctcgaaattctcgtggaagacctcgcgaactttccacttgaggaaaagaatcggaaaccggtttgggctacaacgagacccaaaaagacatg

SEQ ID NO: 32861 - DNA, 3003 bp, Unknown
  misc_feature (1)..( 3003): 2750-1469P.txt file - cDNA_ID_3062286; gDNA_ID_1620400; Annot_ID_155932
taaaacatattgtaaacatcctccatgatgatttgacaaaaaaaaaaaaaagtcctccatgaggatcactattctcattaatcaataaagaaacctttttaagaaagtgttaaacatattgaacataaaacacctcttaaggacctcatgctatgaacgggatgggatgttgtatccaattagtttacacatatttaaaatttaacacttaaaaaccaaaatattatgtatatattagaaaataaaacattttctgttatgtaaaataatactttaaaaatcttaaaccttataatagtagtataaaaatattaatttaaaaatatttttaaataaaaacacaagtaaaagtttatatgtgtaaaacatattgtgaaaacaatttactttttaaacaaattgtgaaaatcttgtgataatcaaaagtattatgtatatttaaaaataaaatattttatataaattattacttaaaaatcaaaaacaaagtttaaatagtggtataaaatacaaataaaaaattaagtgttaaaaatttatatgtgtaaaatatattaaacctaaaacacctctgaaggacctcatattatggacgggatgatgtatctaatagtttacacatattgaaaatttaacactaaaaaatctattaaaaacaaaaatcaaaacaatttacttaaaaatatatttgtgaaaaccttgtgataatcaaaagtattatgtatattttttaaaaataaaatattttatctaaattgttacttaaaaatcaaaaataaagtttaaatattgatataaaatacaaataaaaaaattaagtgttaaaaatttatatgtgtaaaacatattaaacctaaaacacctctgaaagacctcatattatggacgggatgatgtatccaatagtttacacatattgaaaatttaacactaaaaactctattaaaaacaaaaatcaaaacaatttacttaaaaatatatttgtgaaatctttgtgattagttttaaatcagaaaaataagaagtggaaaacataaaatctttttgttccttttttaaaaatcaaaatcattatctttattaaaaagaaaaagggtagtaaagtaatatacctagaagtctgtgatatcctcaggcggcgactcgtgcttgttctgaaacttgaaaccacaaacgagagcgtcttggtgttttccttcgccatcctcttatttcctcgttgtctccggtgaaagcatctcggtggctagatcattatccggtgaactgaaatcgatcttgttttttactgtagacgacggtggattgatggagattatcattcaatcaatgaaacgatgatatgcttttcggctccgatcagtcttaaatcttacggatgttacagagatcatcatcatcggcttctacttggatcatcgtcgtcggcttctacttggatcatcatcatcgatcggaatccacagagtttatgtataaagagagagttttgatttgtctctaaaagaagaagatgaaaaagggtgaaatagagagagttttgatttgtctctcaaggaagaattagaagaagcgttgttgagactgcgtaattaagagacctagtttttatttataaggaaagaggttcaaaagaaaaaaggaaattggtaatcacaattaacggtcacataagatttgaccccaaaaaaaaataacggtcacatgagatttccttttttccttggatggcttttcatgggtttgttttctttgtttgttacgtgagagaatctgatgactttaagtaaagtgaagaattcactcattgcatgatccgatcataaaaaaacagagatggagttgatgattcgatcctcaaaagtatactaaccacaacactgtcttctttcatcaaaactagagagtagccgaaaaatgaaaactttattgattacaatctgactttctgcctccaattggttaatcctctctactagcaattcatctttctcattctttagcttctctaactcctcaactgcagctaaccgttgcttgtttaagataaggatatctaaaatacacaacaatacattcgggtgagttaactttcacatatgaaaccgaaaccaacctcaaccaaatttctttacttttttgagcttctataaagaggttccatatgtccttatgttttgcttcttttataatagaagattgtgcaagactttcctgtgaactaaaccagttacattctgctagaaaaatcaggaagtagtagtatacttcaaaaccaaagaagagtaacctgagaatcatcaaactcttcatgcccttctgatcttgaatcaaaaataatacagttcaattatagagaagcaaaatcaatctttgcagcacaaatcagcaagattgaaaaaggttcacttgtaacttctgtaaaccaaaattattgttaattgactttaattaagatatacgtcacgtggcaaaaccagctggaccacaagtgtttttttaattgactttcttgtccatgtgcctgcgtttactcctctttctcaaatctttcctcatttgctcactcccattctccagttgtggaaaccccccaaagacatggcatttgaaccttttgagtcatcatcagcgtattcattcacacgacgatttaggtcagcatttatcttctttaattcttactttcacttgatcctttttatctctccgcgtcgttaattgtgaaagtggagagctttacataattccccaaagtaaaaagcttcgaattttaattctcataacaaatttcacaacaggtcagcctctaatttggggaattctagaaaaccctagtggaaaattttaccaatttgattcttttaagtatacaagatgacaagttttgcttcttctgcttggtgctgtaaaaatttctaagtttagatttaactttgtgtaaatgcttggcttgttaagttaatttttgtttttcttctaatcctttggtttcagagaatg

SEQ ID NO: 32862 - DNA, 3000 bp, Unknown
  misc_feature (1)..( 3000): 2750-1469P.txt file - cDNA_ID_3062296; gDNA_ID_1620400; Annot_ID_155922
gatccatctttttattttctttaattttaataaaagttaatgtttagttggagaacagcaagaatctcaactactctcaacacgagacacattttcagataaattacgctttgggagaagcaaaaatcccactcatttgttaatcatttaaactaattctttagtaatatatacacacccctctcgttttctgctttccactgtttctttttatgtgttactatttcttttttaatgtgtaatgcattgtttcaattgatattacaaagtatattaattgattttattcgtattttttttattgatattcatttgataaatcatcaaaactaaacaaaagaggaagctgctttttgtttaagtggcagacatattatctagactgttttttagatataataacgtttcacctaattctgaaaattgggaaaatttgacgtttaggaagcccatgtggactgcaaggagacattaattggtgtttttctaaatttatatatatatatatatatgaaatttattgcaatatttacagatgtaaagtgagtagcaagagaaaagaaaaaagtatgtgcaattatcaatgcattgatttgttcatccacagtctaaaaccaaacaaacaaaaacaatacactaataattcgacctttttgaaattttgaatgtggaagcaaacattacggttgctcgtgtttattatatatgtttgtagtagacccctctttggaattgattgttacaaacatttcctttcatgtttttaatgcttatctaaatatgttcatctatcatctcatactagtacacattttcttcacttaggtttagggttttttgggagtttatgaagatgtaagatacgtctattaatatgtaacttcttagtatgatagtttcatttttttggctttccatttatgaaacaaaaatcgtatcaaaatatatatatacttattccaaaacattcttttgggctttaatatacttttcccccaaaaacatgtggtgtattcttgatctttttaagcatggatgcaatatcttggactccatctactaatagcacaagacaacaaaagaaacacaatcaaagtaagcgtagacttttgcgaagagaactttggaagtcattcatttttccttcatctcttttgctttatcttattccttatgatctcgtgttaggagaaatatcatttgatggaatgttggctttataaagttacgaaagactaaacaattgtggtttcatattctcctcacatcgtctcgtccatttcaaactttcacaccattaaacattagttaacatatacgttgaaatttgttcacaactaaaacgcttctgtcaatttttagaaaaaaacagaatatcaatcacataaatgtaacatttgtgtttatccttaattgacatacactatatcacaaactactagtctagtagctcgcttaaattaaacaaaccatttgatatacaataaacggtcaacgaaagtttagaccacaaactccaaaagaagcaaacattcatttaagaatctaaaattctatgggtaggaagttacccttgttcagaggctgcttcgtttgatttttttcttttggactttacgtagactctgaatagtcttaaatgcttataatttccatgaatagacttgaatagacatgacaaacatttttgcaactgcacacacgaaacaatcaaaccattttgatttggctgtttcgtggcgaaacggtaaaccacaacgctgattctggaaccttcttgaggaacatcagagtcaagtataacgtcaatatcgaagagctttcgagctttcttgaagaagacatattctttcttctaggccatcttcttagaggagccatcaggaatgttaacttcttcccctctggctgcatccttgtcatcatcaaaacacatcgttttgaggagatgtttgttcgtagagatggtcgtgatacacaacgtgggcgccgatcaccaccgcgtcccatttcttccactggtcatacacgtttcaactccttcactcagagtctatgtcacttgttctatctctgttactttctccccggtagtgtttagtatttataaaatagtcctagtagttgtacgattttcacaataacttccatatgtgcgagaagctcaaaaacaggcccaagggtatttataattgcaacccctttgaaaaacgtaaattgctttatcaccaataatgtttgataatttataaaataattcaaatagctgtaaggccttacaaataggcccaattgtttttatggcttgtaaactattccccatttttttttggtcgataactatgccccatttgaatacctatttttcttttccacaatttgaatacctattttacatttacatgtgacatcttcttattggatcatacagattacaggctgtgataaagaatggaggatcaactttacatatttttcttttcacaaacaccattttcgggaagacaaaaattccaatataaagaattccaatttcttactatcattgcaagaatgaagattttttagctagataacctaattttccatgactaattagctagatagcctaattccatgtgaaaggtttggttgtgattggtgagatgacaaaaaatatatataactataatgtaacggtaatgttaaactattgttaaaaatagtaaaaaactgtacatggaaaagatggattttatttaaaattttcataataaagctatagttaaaacttatgataaatgaaaatggagtattacaataatattcttcatagattgaaaaaatataaaaaaagataaagataaagttgaagggaattgttaagagttattcttgaaagtagaagaagcgtgtggattggacatgggcttaaagacacacaaattctttctacgaattttgttaatttttgttatatttccttcttcactattccgcttagagcacaacaccacgatg

SEQ ID NO: 32863 - DNA, 3000 bp, Unknown; identical to SEQ ID NO: 1420
  misc_feature (1)..( 3000): 2750-1469P.txt file - cDNA_ID_3062300; gDNA_ID_1620400; Annot_ID_155914

SEQ ID NO: 32864 - DNA, 3 bp, Unknown
  misc_feature (1)..( 3): 2750-1469P.txt file - cDNA_ID_3062300; gDNA_ID_1591080; Annot_ID_150487
gca

SEQ ID NO: 32865 - DNA, 3003 bp, Unknown
  misc_feature (1)..( 3003): 2750-1469P.txt file - cDNA_ID_3062357; gDNA_ID_1620401; Annot_ID_155967
gatctttttgaggagcatcaagactggcttactcaagataatcttcataagctctcggatcatctcattgagtgtgattatgtaagtgaaccaacggtctcaaacctctcaaagtcattgaaatctcgatgtgggtcttcttcttcttcagcacaaccattgttagccgtagatgtaacaactcaaagtcagggcgaaaaaccggaggaagatttgcttctgcaagatacaacaatggaagatgataatagtgctaatggtgaagcttgggaatttacagagactgaactcgaaacgttgggtctagaagaactcgagattgatgatgatgaagaatctagcgactctgattcactttcagtttatgacattctgaaagaatgggaagagagtagtaagaaagaatgaaaatgcttgtaaatttcctcaaaatctttagtagaacaaaatctcaatttttttgcttactcatctcacttcaaaatagtttcaaggttactaaacagatcatccacatacaataaaagatcagttatacagaatctcagattcggagaaagaacatacatatgatcaaactgcggatttacactgttactaaccaaaaaaagagagcagataggtttggaaacttaaaaaactctgcaggtgatgagatatcgcctgattcaagatcggcactcttaagaaaccagtaaacccactaagtatatatattttatggcttgctttgttacagaacttccccatgatggctatttctttctgtttcaccaaggatgattacggatcctgaacttcaaagctttcatggctgcctttgcaaatatctgagcagcttcagcttctgcttctgctctttctgcctcttttgctgcttgttcagcctctgtgatagcaaattctgcctctgcaactgctcttgctgcagcctctgcagcttcttgagctgtcatgccttttatcatatataattcaccgtctactcggaatttagtgagactgttggcaccgttctcctcgggttttgttgggtctttcttgttgtttccttccagaaagagttgaggagccttctgtcttgcacctgcgggaataaaattagaagaaaacctgtacttgtgctttatctgaaagtgagaaatcaccaagtaagtatttttgaaaattctgagagtaatgaagtgttagtgatcatgaatcttgaatcaaaagttgtgtgtttaccttaactaatgttccattcgatgataaatgctttaatcgtactgcgacatgccttttcatattcggtggagtcttgaaattctcctgaaatttaacagctactaagtaagtatgcaacaaaccccaaccaaacatgtaatcccaatggtagaaatacctctatatacagaaagattgatgttctgtcagaaccgcgtagttccctcaagttggtaattgcctcaaagatgatcttatccaaactacaaaaacagacaatagcgcaagatcaaatctttatgaactcaagaaaatcgttatgtggtgcataagtcagggaaccaaaccttgtaattgatctcttagaagcacaagtgcgtggtgatccaccaccagaacctccgggggaagttggttttgcacgttcatcatcattagtcaaagccacaatggtaagagctgtgttgttatcatcctgtttagtacctggtggagtcctcttaagcgcaagtttagccttcttccttgaaccccataaagctgtcacgcttatatttctccatttgtcctgttatgccttgaactatcaagattagtccgaaacacgcgatcacaacctccaaaaagcatattatattgtattaccttaagatcaacattagagcgagacttaaggattaaactaaactcagtatccgagagtatggtacgccacttcccagtcccatgcttaagaactccagctttaagagctgcttcttcttccggtgtccacttctgctttggtgcacccatccacagttatcaatatttgaatttcttcttttctctgccaatagatgtgaacgctaacattagaatctgttaaatcgtacgaaacttaaccacatcaaagccattgttgaacatttcttatccaatacaaaattttggtcatctaaatccagcagatacacaaagccacaacataaaaatgtaactacacaaatccaaagaaattagatacgccccaaagctcaattcaacaaaaaaatgagtgattcgagcaatctcgaaccaaaaaaagaggatcaaagcccattaacaacgtcgcaaatcaacaggaatttggaaatacagccatcaatctaaagcgatagctaaattatcaaccaaattcaaatggggcgatcgtagaaaattaaaaacaaaaatggaaaattcagagaaggaagcagaaaggaggaaggaggagaagaagcatgccagatcaaacgaaaccaaaggagagttttcgagagagagacttgatgatgaaagctaattccttgtatagatgtgtcatagatcaaatgtgattcgctgaaacgaacgaagaagaagaagaccagagaggctagcataaggaagaagaatatccatagaaacgagaaacaaacttgagcttttcttttgtattcaagctaaggaagatgtaaccctatatttctccacattcacaaatttgcctcaagtttatcaaattacacaataaaacctaccaactaaatgaataggatcaagctgaataaaatatactagtactattttttaaaaataatgtatctataaaatttatcgttgttaaatctcacagatagtttaggggctattaaagatttttcatataatagtaagaccgaaagcgtaatttataaaattttgatggctagattgaaatatgtgttttttttttctttctaaaatctacagaagtagaagaaaccaaagcgaaatcaaaaagctcagcaattttccagatttctctaattgacgatg

SEQ ID NO: 32866 - DNA, 3000 bp, Unknown
  misc_feature (1)..( 3000): 2750-1469P.txt file - cDNA_ID_3062369; gDNA_ID_1620401; Annot_ID_155954
gaaggaaaaatcaaaacagaaacagcttaaactcgataggatcacccaaaatataatcaaaatctaaaaatcatttcaatctacaggataaacaaattcgaaacaccagaacttcgaatcaatgaacaggcataaacgcacgcactaattgcgcgatttcaaccggaatcttaacgatgagagaaggaatatagaagaagagcgatacgatgataattatacctttggctttcttgccgatatcggtgaagagtcctggacctttgctcatggttgatcggagattgagagagatcggcaggcggtgaagatatcaagatagaagaattacgacttgtttttctcgtggtagacgaaaataaatagcgaagccaatactatataacagcctgtgacttttctttagtgactaaccactcacagccgttgatgtggcacaaaaaaacacatgacgctttatgagataatcgaatcgctttttggtaatgaggtctaatatataaaaaggttacgggttcgaaatcagcccacgtcaactttaccctctaattctctcctatttgttttataaacatgttaggcctagctcctgatgggcttgttaaacataattatactgggccaaatttactctctaattctcttaatttatttataaacatgtaaatgattgggcctagatactactgggcttattatccaattatggcccaacctaaatgactatcgaaccctatactatcacaaaccgtgaaggtcggatctctttcttgatttggccgacacatctgatctaacaatggcgacgaacaacatcgtacgtttgatcgctccaagccgatccgtctcctctagattcctcgagccagtgtcacggtttctaagctccggtacacctcctccgccgcaagctccatctccgaatcaggatctgaaccgggacgtgaagccagatcagaatcttcaacagaatctgcagatgcagaaggaagaagaagaggaaggagaaggtggtggaggtggagagtttgtgaacgaagatactggtgagattggagggcctagaggtcctgaaccgactcggtacggcgattgggaacaacgtggtcgatgctctgatttctgagaggattcatgtatccctgtgttttagcttgttcttatatatttctgggaaaaatggaaataaattcgttttatgtgtttatgtatttgcaaaataatggagaaaatggaagaaaatgtagtagaacttcaaattcgttgcctttatttggatcatcattctctggtgatcttgttattccagtaatagttaataagttcttcctcaggtgggttaaatgtgcatctatacatctctatctaaaaaatttgggacactttaatacaggtttagtgatgatttagaattaaggaaacaacaagagatgagtttaactaacctgagagttcagagttcaggtttgacattacccggtggttacatgagttctggtccaagtttaggcatggctgcatgggtcagtgagatgatgtcaaggtatttctgttgttcaacaacattgcaatgtgcacttctgtgataactacaattgcacaactgggtgatgctcaaattacaattaaatccgtatatgatataaaattacaattaaaaatatcagtttacatgatatatgtattatgttccaatactctttaaaagttagaaaaagattggcatcatcatgcattttttttttttttttttttttgaagttcttataactttactccgatcaaaaactaaaaaaaaatacaagaaaatgatcatataaaaagcattttgacttcttcttcttctgttttagattattcgatagaagaaacgtggcattatagtaaacacagaaaaaaagggaaaaaagggtaacaatcaattcaagcgaagctaagaaatatgaagagagaccagtaaaatatttatgacgcaattttgcggacctcaacataattcacgattagttaacatttttgaagagagtatctgatcatgtggttaaaattaagactaatctaaatttatctttgaagaagaaaggataataatacggataaaagtttgaaaaaacgaacagctaattatgagctgtgtaacgccgaacaagaacaaaaaaaacaaaggacacactgatctgtttttgtacggctcttaaattaaatcatttataaaaaaaaaacatgcagagtcgtgtttcaattgataaagccgataataaaaccaacttgacgaaagctttttcaagaacgaggaaaaaaggccgttaaggcgcgtggattctcagccgtccgtttcgtaaccgtagactccacgcgcctctcgggtaattttcgcaggtgggtgtctctgttgatgatatgaaccaagaaaatatcttcaaattattgaacacaaaagtaagaaaaaagtgagataataaggaaattaaaacaataaattatcctttcggtgggattttttttgtcgtcttctattgtttttgtgagtgtgtgtgtttatataatggtaagagatctctgatctctcaagcttctctatagagagagtttcttctcatgctctttctaccaaggagaagattttctcgttaattttgtttgacttgcctcttcgaagcaacctgattctgtggtctgaatcttttcaaggtatatatgtcggaacaaattagagcattgattgattcttgttcttacattttctatcgatctgtttcaagaattcttgttatttctgattgatattttcgtgtgaatatatatgtagagatttgttcttatcctattcgatttgtaatcgtaaatgagatctggttacataatgctgtgaaaattgttgtctgagtcacatatttcgtgtagaaatgacaatgaagtttatctgtggctaaagaatcgacaatatatattttcatttgattgatgcagggaagagaagataagctaaacaagagaatg

SEQ ID NO: 32867 - DNA, 3003 bp, Unknown
  misc_feature (1)..( 3003): 2750-1469P.txt file - cDNA_ID_3062384; gDNA_ID_1620402; Annot_ID_155995
agttatattgtggtctcggtttcctagctgtgcaaactataggctttatgcgtcttaccttttgggaactaagctgggacgtaatggaacccatctgcttctttgtcacaaccattcatttcatcctcggttacatcttttttcttcggacatcgacggaaccatcattcgaaggactttttcgacagcggtttaagaccaaacagaagaagcttatggagaggcatggatttgattttctgaggtacaatgagctcaactctttgttcacaacatttccgtgtaaatttcattatccggtttagttagccgcatcctctccttggctactctatgatttgtaattttgtatagcttgtgtagacttaatattgggccttaacttgttgtatctatatatgataaagttggattcctactttttgtgcaccctcatatcatatatatctttgcttagttttatgagcttaggcctgtgttacggaaaaagaaccataactattgttttatctaacccaaatcgtttcaagagtttctttcgtgaagtaatttaggtaattttcaagaaatgaagatgtaatcaagaaaataataattatatgttattatggtttattgccatcaagactggattttttttccatgaacatgtttcatttcattatgtagacgtttaacgtaacatccaatgatgtcatacgaaaccaaactctagtaaaaaatctaacctttaacccccatttagtaaattagccagctgtgtaaaaaatgttaggacagaaagtcattcttttttcttaaaaaaatatttaaatcactttattgttattttttaaatgattttgtgcaaaaaatatttttaagttgtacatttttgcaattttaccttacactttcaaaaaatacaaattaattatacgaaatcaaaaataatacgcaatgtaattttttcgcttttttcaaatgaaaaatattgataaatgatatgtcaaatcaaagtcataacgacgaagaattcaaatctactttcaaaaatgtaaagatttaatgtatgtgaccatgaaaatgtttacaatatacataaaaatgtcatattgcgtattattttagactttataaaattaattatatttttgaaataaaaggtaaaattgtaaaaattgacaagtttgaaagcttttttgcttaaaccccttatttttattcattgttattttcaaatattacatttcccttgattaagtaacataaaaaatagccgacaaaaaagtaatagaaaaataagaaaatcatccacaaataacatgtataataaacaccttgttgaatgttattaacattatatttcacttcatataaaatatagctttcactttatcaacaaaaaaagaaaaaaaagaatatagctatcattcaattgtttcctcaaataattattaatatgtcaagaaaagttgatccatagtcctcttgtaattggtaaggatttgtaaaccattaacaaaaagaaaagagagacgtcgatatctattaatagtcgaaaaagttaagttggtggaactttaatctaccaactataatcatagtgcgaattcgtttgtgatttggaacacgtaaatagctggaggcattactacattcttgaccaaaaacgcaacaaaagcaaccaccaattgcattactataatcttgacgcaacaatgcactcattttagtaactatttacactattttttccttacattttctgctaaacaattacaaaataatcaatattacatacacaaattgttgaattattttctacgctccgatttaatacaaaatcatgatatctaaagggtcggatgaggatatcaagattttaaggtttatatatatggatttagatccgtatccgttaaaaaaaaattaaaaatctttgataaaaaaattttgaaaaaaatttattaaattatatttctacataaattctatgatctttttatataataaaaagtaaattgaatttatttattttttatataatttaccaaatttatttaatatcttattatatcaagtttcattttaaaaattaataacttatatgatcataatacgtatcaagtcgattagactgatactatcaaatcttgcaaattacactctaaggcacatcttcatgtgcattagaatctgatgtcaatttaactgtcatagtccaaaaatattcattatgatttgtccggattcaaccatcgcattaccaaactcatatacgattcaaatcaatcaaaaatttcaaaaatttcggatatctaaacgtataagatttagtctgtttttaatccacaaaaccaaataccacaaaaaggttatatttatgttactacttaaatagtttaatatagaaacttgaaacagatttaaaatcttaagataaggatgatgatgtggatcaaagacagcgaatgtcccaacagttttcttctattcaaaaatcatttagactgcaacaaatgtaaaatgtgtatttaataccaaatctgtaaccacaaaaatttcaaattagattatacaaacaaaattgacaccaaatattgattctcactttaaatgtattacagtaacaattatacattataccctaccaccaactcctacccaatccatttgtctctctctctctcatcctttagtgtcacttgtttttgtacaaagagagaaagagattggaaaaaaaaaaaaaaaaaaaaagatttttgtttgttgaggttgctgaaatctagatcacctgttttgaatcagtcatacctcaaaaaccctaactcttattatcctctcccaattgaatttttcaaagcttgaagaaactagtagtagtaatcttcgctctgtcgtctgatccatttttttatcaaaatctcgagctaaaaactcttgtgtttaagcaaatgaaatgcactgtgtttgattttgagatttgatggaagtgaagctgtttcttcgaagaatttcatg

SEQ ID NO: 32868 - DNA, 3000 bp, Unknown; identical to SEQ ID NO: 1447
  misc_feature (1)..( 3000): 2750-1469P.txt file - cDNA_ID_3062410; gDNA_ID_1620403; Annot_ID_156026

SEQ ID NO: 32869 - DNA, 3000 bp, Unknown; identical to SEQ ID NO: 1448
  misc_feature (1)..( 3000): 2750-1469P.txt file - cDNA_ID_3062414; gDNA_ID_1620403; Annot_ID_156024

SEQ ID NO: 32870 - DNA, 3000 bp, Unknown; identical to SEQ ID NO: 1452
  misc_feature (1)..( 3000): 2750-1469P.txt file - cDNA_ID_3062423; gDNA_ID_1620403; Annot_ID_156017

SEQ ID NO: 32871 - DNA, 3000 bp, Unknown
  misc_feature (1)..( 3000): 2750-1469P.txt file - cDNA_ID_3062439; gDNA_ID_1620403; Annot_ID_156030
atttgcgcaatgttaacaaccttaacgactgtgaaactattgaatctccagttaaggctgttactggaggtttatttgaagacatattttcgaaaggaggctcgattttatacagatgggctccggttagtaaatacatttcttcttttcttctatattggtttgctaagtatacaactttgatctaactcatgtgattgtatcagatgggatctaagagagaagctgaggcaacagaagggatgctcttgagcacatttgactatgcttggaacaaaggaagtaacggggagcgaaggcagcttgatttgcttaagaagctcggtgatcgcgagtttatgagcaagagaaagtccggtatatctcgaatgctgtttccttttcttcggaaccaagttggtatcagaataaaaggagagaagcatgtgcttaaagaagagaggaagctaacctgtgatgttgatgaagagaagagtaataatttcctcacttcaatactcaaactcacccggtctagacctcaaccggtttcagacagatttgatgaggttgatggttcttgttctgatattgtttgtggagtcttacttgaagatggtggctgttgcattagaagtccagtcaaagggagaaagagatgcatagagcataaaggacagagagtttgccgtgtttcacccgaaaaacagacaccgccaaagtccgagattttcactggacaagatcatcacaatcataaagactctgatgttgtgtgtggagtgatcttacctgacatggaaccttgcaataagagacctgttcctggaagaaaacgatgtgaggatcataaaggcatgaggatcaatgcttttctttttcttcttaaccaaactgaccgtgagaaaaccgtcaaagacgagaaacctgatcccgaatcgcataccgagtcaatcgaagaagaagctttgactcgcttctgtgaagctacaacaaagaatgggttaccttgcacaagaagttctcctaaaggaagcaaaaggtgttggcaacataaggagaaaacttccagcgatacttcgccggtatattttcagccagaggcagcaaaaaacgtagcttgtggagttaaattaggcaatggattgatctgtgagagatctccggtaaaaggacgtaagagatgtgaagagcataagggaatgagaatcacctaacctctgcatcacttgtttatgttatttgttacctaaccagaattgtttgtaccaaaaccgttttggtttcggtattggtttgctgaacaatcatctgtactggatgactcacaatctcattttttataaatttaaaatcagttttgattaacatcgttgacttgcatctttgcattacattagatgtttttagatttaaaaatacatagacccgtttcccgccatgcctccactttgttacttgtccatgatgcgaaaaactgtaaacgacccatttctttttcaacttcccttcgcttcttccatatatctacgatcgtaatatatcagagctgccttctttcattatttttctgtagcagaaccgttttgttctgttttattttgtttgacaatgtcgtttgttctattatcgaagatggcgaagttgaagtttaaccatatacgacacacaatcattagcacgcaaaaaagcacaaccattatgccggggataagtcagctcttgaacaataggtctcttatcatctcatctattcacaatgttgttgcatttttatcctctgttttttttcttactattattggtccttcaggctttaaattaatggtcataatgtatcaccagattgatcggaaaggaattcagttccgccgtccccactatgttcaagagagaagactacaagctgactatacacgacatcgcattctccaaatggcggaatcttataagacacaatgattggaaagatttcaataatagaaaagaaagggtccgtagatacagacatgaggacttaccccctcaacgttgtacgggtctgtatgagctcggtgtaggcgtcatcggtcaagaccaaggccaaaactttgatcctgataataatgttcttggtgtatatgtcggacaatgtgtagacgtaaaatcaagactccaggattatggaagacgcggtggtcatttgccctcgggtttatatgaggacatattctcggaaggatactcagttttttatagatgggcaccagtaaatacatgtcttcttatcttctctagttggtctgctacgtatacacctttgatcctaactcatgtgattgtttctctgctttaccgtgatttatcagatgggatctaattaagtaggaagctgctgcaacagaagggatgcttttgagcacttttgattatgcatggaacacatgcagtaatggggaacgacgccatcttgagttacagaagctcggtgaccccgagtttatgagcaagagaaagtcacaagtgctagttccttctattcgagaccaagttgttaccatcaaagtagagaagagtaattatactttcctcacttcaacactcaaagtgatgagaccatttggttaaccggagtaaacctacatcgactaggtcaaagatatggcttttgtttctcctaaattaattggattgtaacccacttattcacgtttcaaatttgtagtgttagtagttaatttgtatagtttctttttttttttgatcaaaaatttgttacggaaaaagtttggtaagaatgtcggcagaatcaccaccgtcgattaacggaaagataaatctaatctaacggttattgataaagcataaaactgacggctccgattttattttctaaaaatcacgttaatcacgcaccaggtggactatcattgtctttaatctatggatttaaaaatttccgcacgattaaagagcgtctcgaaaattaacttttataggtaggaggagatagaaatcgaatcttatcgccgcgttaatatg

SEQ ID NO: 32872 - DNA, 2240 bp, Unknown
  misc_feature (1)..( 2240): 2750-1469P.txt file - cDNA_ID_3062467; gDNA_ID_1620404; Annot_ID_156062
agcttttgaagtttaaacccgagtaaaagaagctaagataaggcactaattatctgaagtaactcgagagaagccatttgtcagcgttcaaaactatcctctaaagaacctcgtacgtggcagtctgaaaacgtacgtgttagcttcgtagaagtgaagagagctccaagacaaaatcttcacgtgccaactaaatatgaggtgttgatagtgaattagtgatgtccatcctcaacagctccaccgcttgacatgtatcgatcgtgacatgtatctacaataaataacttgttgcttacgcagaccggtgcaactataaataacaatacgtgaagtagcataccttgtcatacgagcaaacttgtaaactcaattgcatggtagtaaaaatgaatacgaaaacgtttattgtatggtttcttttggtagcggcggttgttgtagctgttgcggcagagacttccgtggatgacaagaaacaaggtttttactatacttttttttctgtatatgttttataagcttgatagaattcttatgtgagtgggggtttgaaacaggtgaaaagcaagtagagataccaaccgtagaaggaaaaaacgacgctaaggatagtctcaataaaggagacgttggtgttgaggctaccgttgagaaagaggaagaaaacaattatgaaattgatcaacatggtgggggatggaagggaggcggcggccatggtgggggatggaaaggaggcggcggccatggtgggggatggaaaggaggcggtggccatggtgggggatggaagggaggcggtggccatggtgggggatggaaaggaggaggtggtggtcgaggaggtggtggtggaggcggtgctgagttagagaccgtagaaatagatagtgcgtcagatgaggatgtacaaaattatagaggtggccatggcggaggatggaaggaaggcggtggccaaggtggaggatggaaaggaggcggtggccaaggtggaggatggaaaggaggcggtggccaaggtggaggatggaagggaggcggtggccaaggcggaggatggaagggaggcggtggccaaggcggaggatggaaaggaggaggtggccaaggcggaggatggaaaggaggcggtggccgaggaggtggcggtggaggtggtgctgagttagaaaacgaagaaataaatggtgcctcagaagagattcaatggcaaggaggcggaggtggacatggcggaggatggcaaggaggcggaggtggacatggcggaggatggcagggaggtggaggaggacatggcggaggatggcagggaggtggtggacgaggaggaggatggaaaggaggtggtggacatggcggaggatggcagggaggcggtggaagaggtggaggatggaaaggaggcggtggcggcggaggatggagaggaggcggtggcggaggaggatggagaggaggcggtggcggcggaggatagagtaatcgaccgtctctactcatctgaaaaccaaatattatgagtagaaatattagtgtaagcaaatggtaaactataataaacaaataacgtctcatgcacggtttaccgatgcattaagccaccttacgtagcctagctcaaagccttaactgtcatgtaagttatatctgttgctcttcgtataatcaaagataagtgaatattaaaacttcgaacaaatcgatttttttgtgttcaattatcatatctaagatatacacatattaccaaattacttattaattaggtttagacagatgtggaaatacacaataatatgttctatcacacacatttcttcacatctctttatacgaaataacattttaagattattaagccggcatcaatatgctttcttgtcatgaattacatagttttaagaaataaaatcaaagaattttgaatatatgtcacacagaacacttccacagtttcttgtataaaatacaaatcatgctaacaaatcttataaaaccaaacagttttatttgtattgctcttccaagtgccacattctctgcttcaagtagttataaattaaaaaagtttggaagtcttgtgttttagtttatagctatttcaatggatagtgaatttaaaacgtattacaaaacctttgatcacaattttactctatttgtataaacagagtttataaggattaaaaatgatgttgataaaagtattagttaactgaaaagtaaaaatg

SEQ ID NO: 32873 - DNA, 3003 bp, Unknown
  misc_feature (1)..( 3003): 2750-1469P.txt file - cDNA_ID_3062471; gDNA_ID_1620404; Annot_ID_156060
gaaaatcactggttctgatttctgcaaaaccctgtttttcagataaactttcagattcaagttggagtttctggaggagattttcggtaagacctgagctgtttagaaaccatagacggtggtttttgatacaaaaagtgttagggaagctatctgagccgtcaaaaccgtcagaaaaggtaaatcataatcaccataacgattgcttcttacgcaagaaatttctgtttctgccaattcctgaaaccctagatacacagattcaatgtgtcatctttagaacagcgtatagaggtctcaacgtatttcgatcggaatgaatttttgtggacagttacgtcgcactatagggttgagaatcaacggtgggattaagaagttaacggtccattgttaagttactagcacgttttggtgacacttaaagattgatttggttctccaaattctaaatttcagtttgatttttcttttcaggttttaaagtcttgaatgatgatgaagaccaaggaggccgatgcctcgaccgtgaacggggcctcgaccggcttcagttgggacatcaacaggtgttcggctggggctgcagcgacaagcgtctggtgggacatcaacaggtgtccgcttcccaatgacgttgatgttcgtcgggtgagtccgtttataaaacgggcgttggagaaattaggctacactggtgctctcacaaccactgccattggcatactaacagacgttcctcatgacttcctcacacaagtctattcttctggaatcgctattcaccacatccctcttggttagtgtctttttacattattagattggattttttgtagatgaataggttgaacaattttcttttataatttgtcaaatggttgcatgtagatgaatggttgggaaatttcggtattgatcacaataaaaagttgaacatcatttaaataatttaaacaattttcttttataattaattcattttttaactttttgacaaatttttggtttcgggttttcgggtagaggaatttaagacccaatacggtaaatttttgggttcaatttcgggtctaatttttcgggttggttccgattctggtaatcggtttcggttttttttcccaggcctaaatggttcattcaactctctggactacatttttttgagagtttatcttttaattcttgaagtttctgaaacagatatctttgaacttagttcggctgtcatttattggacttgggacaatctacctccgtctaatataatgctcatatcaaatgagttaatcttctcgagtcttcttgacaagctatgtggattcggatacaacgtcgttcggtcaatatttccagatgatcctcagcaagccgcgtccgcttccacttcccagggccgtacttattctgggaaagcttactggcaagcttacgggcagatgctatgggttcggaggcactagaagaggacaagtgtagtgaaacgtgtgaaactgcctttccttgtgcgcaattcatagttgttgtccaaggctttgaaaatttctccacgcatctcaagagtgaagaacatagaaagaatgtaagcatcctatccaaaaaaagacagacttgttgtgtccatacatttttcattgtctaactacatatgtagggttcttctagttatctgttgccttaatttgactagattttttttccgtccgagcagggacgatacttcgataacgatacaaagcagctgaaagcaagaagaagaagaagaagaagaggatataagagttgatgggtccatatggcgaatgtcaagactcgcttttacttttcagttaactaatacttttataagaaattttcacggaagtggacgaaaaaagatttgctctcaccgtttgtcaaagtgagaactggttttcacggtttgtcttttcattcaatttcggaccaaattaccctgagaaaacttaataattgcacaaaccaaaccgtgcagcagttcgtatcggttaagttgatggcataaaccaaaccctacagcagttgttttcggtttagtttatgcggttcagttttgaaaaagacaaaaaaaaaaaaactgaaacgaagaaaccgaagaaaaagaaaaagagaagagagtaacggagagatttgagagagaattagaaagcgaaacgaaattcagtatccattgcttcaaaattcgacataacttcgaattgttgggtagttgaattgagccactgaactcccacaaccggggaagagaaagttactgtttttccccgcgaagccaagagaaagttactgtttattccggcgaaatttgaacctccggcgaaatagcaactttagctatggctgggaataaagcaaacgacaaagtcccgaggaagtagcatggtccagggaaggagaagcgggtattaagagtttccctgcggagaaaacgctctgcgacaaaggcaacggaggaactgggttagaatctctaatttaccgtttgttgtctttgggtgtatcagaattgtaaagcttgtttgattaaaaggttagaactagtcggaatttagcatatctttaggatgaaaaattgagaagtagaattggaaatctctgtttccgccaaaaatatgattttgagttataatctggaaaatgtttgtgtacgtacactacttcggtttgcttagcagtatatcacttttaattgcaggtagtccaagtgttgctccgactgaagatcttacagttgaagagttaccaccaagactctttgctctagaccggtacccttctgagacgaagatgaacgcgtactctaaaccggagtacatttcttacatagcaaatgtactaaaggggaaaccagagatgcagtttcttctcgattctccatttggggaactttttaaaatacccaaaaacaaggcatctttcaatgctaagcttgtccttggactaatatgccgtcagttagtgacaaagaaggtgaatgagatg

SEQ ID NO: 32874 - DNA, 3003 bp, Unknown
  misc_feature (1)..( 3003): 2750-1469P.txt file - cDNA_ID_3062488; gDNA_ID_1620405; Annot_ID_156092
tgccaccacatttctacttctacaccttttgtctatatatacacaccaagaaaaaagaagagaatatatatacatatctatagtgtgtgtatggtccattctcatcttattatcttatttgtgtaacagtctaatattctaacatctaccattccttcttactataattttcaaaataaataagtatagttttcgctgcaaaataaatgtcatttttaccacatgatacacttttatgtttgttaaagatctatgatatacacgtatgtatatgtttatatatatccttcgttttgaagaagacggaaacgacttttttggttgagaatgtgaaaaattggatagtgtgaagcattattattgttactcatgaggaaacgtgaaggtggcctaaagggataatttttaaaaccctaattaatgaaaatcaatgatgtccaattgtgtattttgcatctaatcaaatctacccctttgaatattgactcttccacttttttatttatttcttaatttttatttaatattatatagtttccatctttctatttttaagtaagtcaccattttttcatcatggccaacacacaaatccaactaaggctaaaaatgcacctatatatacatgtacaagataaacattaaacataaagtcttttaagtaactaataacatatcttaacatcatgtataacttgttgttttacattcaccaagttattactcccaccctagacatacacccattgtttaaagatgccttgtcacatgcaccacccataaagacacaaaaatttcttttaaaaagaaaattgacaccatgtaagtttcgctgaaacgttcgactacgaacatgtctcatggtaaagattaaagaatgtccggaaagttcaccgtctttgtatattttgttatatatttgttatatatgtatagtaaaaaaagaatatgaaggaagtatgaaaaatgagattgttgggtgaggactaagagagaaagtgaggctaacatgttttaggaagagaagaattgaatgttcaagaagttttgcccaagaattcacaatttggtgtggtgggctcctttaaagggcaaagaacaaaagtgtgttatgtctccattactattttcaataatatttagtcttttaacaatcactactatttctctgttttggtccaatactccaatcatatataaaaatagtccgaacagtcgatcatcgttatacattaattcataatagaaattgattttgcattaaccattttgttatatcagcatcacaagttttatatggatatatataaaaaaatgtctatggcagaattaagtttgaaaacaaaatttctcctatcatcatatatatatgtttcttcctcgcctaatgttcaaaactaattaaactttggaacttattaggttaagccaagagcaacgacccacctaatatctatataatatattacatgctcataacttagctggttaatttgataaaacttgttgattatctttgtttagttgttagatttctgttccatcatgatactttactaaaccgaataaatatttctccatctattattatatacacagttcgcgcgcaaatgtatatcatgtctttatcatggaaaaagtcagttacctgcaataacataatttctaaaattcaatcagatgtaacagtcaatttaatttgaatctacctaatttattatcgtgaataaatatgaagtgtattgggtataaaatttttaaaatattgacaagaaaatttcaagaatagtaggaggagcagtgaataataaatttacacgaacgttctactcttttcggagaattacatcattttttttcttatagtggattaaacaaatcttaacatagtaatttttgaaatagatcacctaaaccaaagaaaagaagaatagtaaaaaggagacggtgccgttcgatagcatcaatcaaagcagcaatgaggaaacacgacagagagtcttctcgtgagaaaaagtaagaaaacaccaaaaaagattgagaagataagtttttagtgttttggaaaaaaattactaatttaaaaaaaattgatttggtatatgcatgcataagtgattaaggactatatgattatattaatttaagaggaaccaaaaaaaaaacatgccgaaattaaataccttttaaatttcaatgatgtgtactctacaagatatctcatatgaatcaccgaatatgtagattttatacgaaaataacaaaatattagttacgcatataacatatttatattcaatagaactataagtattttcgttaaagcttcaaaaatttatagagaaattacctagcaaattttatattacttatatttatataatatatatatatatatacggatatttttctattgatattgaattaggttttcactgaaaaataaaattttctattttccaactcaaacacatatatagcatatatataaattgaatagatacattgcaactagttaccttcctcattttcataaattagtaaaacaaaatacaagaaactgctaagattgacgaatcaatacgcgtatcaaaaaaaacgaaatatacgtttccattaaaaaagaagaaaggtaaaaataaataaatgtagatgcgattcaaatattcaaacatagagttatgtaataaatgagaatcatgcttactatgtgcatataatagagagacttattaaaagcccttcccttaaaaacttcccaattccattcctcttcctcttccttctccttcttcttcttcttcaccatttatttctcatcatcatacttataaaaagtaaatcagaatcccgaagcaaactttcaatcttccatcatcatcatcatgtccgatacacatacatacatacatatctttcgtgtgatttatacttattaaagagagattctctcattaagaagaagcttccttctttcttttctttttcttctctctgttcatg

SEQ ID NO: 32875 - DNA, 3000 bp, Unknown; identical to SEQ ID NO: 1460
  misc_feature (1)..( 3000): 2750-1469P.txt file - cDNA_ID_3062492; gDNA_ID_1620405; Annot_ID_156087

SEQ ID NO: 32876 - DNA, 3003 bp, Unknown
  misc_feature (1)..( 3003): 2750-1469P.txt file - cDNA_ID_3062496; gDNA_ID_1620405; Annot_ID_156085
cagcaaacaggtaaatggttatgcaaagaaacgggtacctaagtagcctggggaaaaaagtcttcggtccgtaaatccttttggcttatatgttttgtttttgccttgtattattaatatacgctcatatgctctatattattatagtcagatatctgaagcctacccatatttaaaattggtggtggtgtttaatggtgatattgatatgatttacaagttcttttgctttatttggtttttatttttttcacggtctgaattcatgatttgtgtgcaagttttggtatcattggcttatgggcttgtccaatctgaaatttgttttggatttctaagtttcgttaaaactgattcgacttgaattttatgttctcaaaatatctctgagttgaagaatttcataaagattatatttcctaggtttagccgacatgattttgttgtccctatgatttgtttttgagtagatagaaatggttgggcagcattggctaatgaacacgaacatgttaaaaaaaaaattggacattagaatatcatattacattttggtgtcttagatgggttcttcgtgacctttgaacacatgtcatgaccatatgcgactgtgatgaatgagactcttagctatgtggacccacaagcccaaaaatctttttcgaagcgacacgaaacgctctatgtgtttctggtttgacctcaaacagacaaagaaactctcctagtttggctacgtcctctcgaggttttcgttttggctttaatttcaaatacaaaaactgaaagagataggaagtagaattatattatatattaagtggaagataaagtatcacgaaatgtgagatgccgtgaactttatacctgcttactagatttttatgatctagttggcccttctaaatcaatctcttaaattttccctaaatattggcttttgtcacgcctcaaatttcttcttttcaaaactactgaaacatgccataaaaggaaacaaaaaataaaaatatctacctaacatttttcaactctgttaagcacatatctcatctaatccttaactatgaaagatttcaatttcatttcttagtcttctcatctaatatttattcggaatatggactgacatgaatcaatagagtaaccgtctcgtatattttaaactacattagatatttttcccttaattttctgtcaacaacaaaatttagatattttgttttgaggcaatcttataattttggttttccaactattatctttgacccgcctcacatattttagtgtagatatagtacggacaaaataaaaatggtaacggttgcatcatacctgcaaaactcagaatggcagtctcgtaatttatggaaaaaaacaaagggtactgtagtaagacaagtcattaaaaataataatcttatcctatggaaacaaaacaatatttttcctactgaaatttgtgattatctttatatagttgtttagacataaatcaaacttaattaatgtgaaatcaaattacataactgctttctccctaatcttattatataaattatggttttcaaagttgctaattcgtaggattgtgccacgtgtcaagtcaaacgatcagatgtttacatgtgtcattccaaatttaacttttttattctctaaaaaaatagaaaatcttaaaaagtaaacaaatttacatatactaatttatatatctatatatttataaacaattaacatttattcaacaaaaggaaaattaacaaatttgtctttaactcatgtaatcataggtgaaaaataaaacattttgagaaaaatagcttagcttataggatttaacttttcaattattttcatttattaattttaactcatttaatattaatttgcatgatgtaaaattaacttacgagattacgacatatatacaaaatatattttcaacaatgtttggtttttaaatatttttatggattttttattattattaattattagccctaagcgtttgggtattcggatcgggtatttcgggttcggatttttgggtttagaagtttatgacccgttaaggtaatttaagattttaggtcgagttcgggttcgagtttatttatatattgaaatatcaaattttgtgtacaaatctattaaattacttgaaaatttcaaaaatttccaaaacaacacgagtagttttgcttgaatatatcttaaaatacacaaaataactaaaatatccaaaacatcctaatagtttctatatataagtataaatataactaatatatacttatatttgagatatgtttgaatacctattcgggttcgggttcaagtttttcgggttttgaagtttagacccgttcgaatatttgaaaatttcgggtacacccgcctaaataggcgggccttatctagtataaaataaaatgattataaagcaaagatttcaaaaacaaaaaataaatagtatttaattttgatgcagaggacagctgtacatttgatttaagcgtagcttcaactccataacagtcctctctctctctctctctcattctgaaaggaaaaaaaaaagaaaaaaggaaagctaagtgaaacagaaaaagaccatctctgactacactactcctgaagatcccaaacaaaaaagcttcatagtgaaaaattattccttcgttttctcgatttctgaatcaggtttaccatttttctcactctcttctctgcgctttcttcgtttgtgatgaaactctcctcgcgctgtgacattgttttttccgctttcttaggttttttcaaaatttccttatgcgatttttttctctctttgttgttgcagattttgtgaattcagattagtttcgattgtttgtggagtcgtatcggaattgaagttgatcgactgagaattgcgagttttttcttagatgtcgtcagtgttgttttggttctctgggatagtgtgtgactgatttttgcttttcattggtgatg

SEQ ID NO: 32877 - DNA, 3003 bp, Unknown
  misc_feature (1)..( 3003): 2750-1469P.txt file - cDNA_ID_3062500; gDNA_ID_1620405; Annot_ID_156084
atggaaaaattaaacatcccaacttgaattgttacaagatcttgcttataataggtagttattaaacatatataccaaccaaacctttcttctcctcaactcctccgcaaataaaacagaaataatattatatttatatggttttgtgttttctttttcttcttaaacgttgagattgttgaagtggtcgcacctacgtctcacttctccatctttatcgcccttgacgccgaccgtgccaagtttctccatcgcacgagcgaaatcctcaaagaatgctgtctcgttagttgcgtatagatccacaaacggcttggtgctgttgtctttaataaggatgtggtcagacgctaaaagccctagccctcgctttaggttcttgaagtacatgttgtcgaactttcctggagtcatcacgtcgttaaacgcggcgattgtatcatccacggtgtggtttttgcaaagatctttgagagcggctgcgaatcgcgggttgatttctttatcagcacgggatccgtagagtctgtcggaaaactctttgcagtgagagaatccaatggtgtgagccccgcttaatgctaccatctcgcgaagactaaaaccgtttttcttgaatatcccgtggatgtcaggaacagtctggtttgccattgggacatttcctctgactttatgagctttggattcgaatccgtctttacgaccaagctttacgtcaaagtaaggtcctcctaccattgtgacaaggtcacgtgtagcctgcgctagaatatccgcgcatgatactacaccaggacaagacaactcgagagctgtcttgatgcgggtgacgatgtcaaaagcatctcccgggagggaatcattgagatcatcatcgcgttccgctttgttgaacgagttggtcgcgatcaagacagatgcatcacaaccttcaaggaaacaatcatggaaaaagagacggagggtcccggccgcagttgttggttgttggacttgtttggttgtaacggcttcacgcacaattttgtggaaatcaggacatgttttttggtaatagtccgttctcaagatagcgacatcagccgatataattggtgcaaccacggcgagacagaagaggataacaaagggattaaaaccacgagagaattgcatattcgacatcagataataacaaacaatggtaattgaattggatttgtgagagagatgtctacgaggtagacttctctacgatcgattgtcgtcgaaagcaattagaaacgaagacgaagaaagggcctttgcgactatttcatggcttaggaggttactaagaagaggctacgtaaaggatggttttcatttccttatatgtacgtgtggttgtttttcgtttattcttttctatttttgtaatttatctattttttgtatggttttggttgctttgaatttgttttggttctagaaattttcttatgttcgacaaatgtggtaatatgatagttgctttaataggatgcatacacacgtgaaattgataaatacgagagaatagaaactcatgtgaaggaaaaaactaatattaattaaaattattcatttcgcacaaacaaacaaacaaattaaaatcattcatagtttatcaactaaactttaaacttgacgttattttataattttgttgaatcaacaacctgtgaaggtgaaggtgccaatgattgtgacaacatgatgtttggtatgcttacgttaatttgatccaagaacagttttctagcaaatgtttgatgaactagactcaaataaaaatacctactcatgtagaaatcacgcaagctcaacattattagagatctgattgaatttgatattttcgtcagattcgtatcaatctcaattttgtattacatataacgagcctaactctcatatggggcagatctttttgtaagttcgaatgagagttatgcctttggtaacataaattgctagaccacaaaattacatattttcttatttaacctacgcaaaatcgcaaatatctaagagtgcaaatgatttcataaaggaatttaatggaataaatatatgaataaaaaaaaagaagatgaataatgttattcaatcaattccacctgcgacatagtaaaaaaaaagagttgaataattattattttttaattttcacccttttcaatgtaatcatttaaaaaaaaaaacttttttgtcatcccaaaagtatagaattggaagaatggtttattataccacttttattcttctagctgtaccatttgcataataagtttctctataccggaaccaaattcttgtattttctatattaaatattctaatatgagaagttgaatgttaagaatttttttttacttatcatgctatcttattatagaaaatttggtttctcaaaagtagttattaacataatctaatatgagaagttgaatgttaaaattaaatatttacttaacatgtgaacttatcatagaaaactttggtttccaaacttgttcataatttttttctaaaataaaatagtaaaaaagtaaatctaattcaaataaaaataagataatcaattatttaaagtgttagaaaaatagagtgataaaataagaaataaacatcattcaacaaacctaaatatttagaaatatgtagaaatttaattgaaaaccccaaaaaaatatgaagggaggctttggtgtctaaaaattagtaattgggcccaatatctcgtgcgcaaagcccatattacatagagcatggcgcgtataaataacatacatcttatgtatttatctctctcacgcgcccctcttttcttcttcattgacacggacattcgtttccaattctctctaatgtttcactaaagcgcatacataaccctaaccctaactctctcgtactgcacaaaaaaaaaaaaaaaattgaagaagagcgatacgatcgtaaccagggagcttgatttctcccctgatttttctaatg

SEQ ID NO: 32878 - DNA, 32 bp, Unknown
  misc_feature (1)..( 32): 2750-1469P.txt file - cDNA_ID_3062525; gDNA_ID_1620406; Annot_ID_156128
agtaagacagagacacaaaggcgagagctatg

SEQ ID NO: 32879 - DNA, 3003 bp, Unknown
  misc_feature (1)..( 3003): 2750-1469P.txt file - cDNA_ID_3062536; gDNA_ID_1620406; Annot_ID_156119
tttattgttgatatctcttactatcttgatttcacctttcgttaccatttgcgtacaaaaatttaacaaagcaatgaatgggaatttcttattttttgtatagtcgttttaactgctaaactatgttaagttggtccacacaattaggtgctgaaaataaagtgacatcctaataagtggaaacttgacttatggagcttttcgtctgcttaacattaatttttatcatcttatctatttgacaccttccaaacactattggggaaatggcttcttctcttttttccggtgtaggtttaaggttttagatttgaaggcggatggtgaggagtttgtgttgatgaaatgggtgatttgaagttaaatcctttaagttcttttagccttaagttcttttagcctgtcattacaatatatgtttcagttgtgatcttttggtgctctccaaggtcttagggaatctccgtgtcccctctggtttctttctttgtataaagtctctggaatttaaagatgattttgtcctgttttcttcgaagaatttggcgaagaaacatcaaaagttcactatttgctttacgtgttatgcttgtttgactttgtgtgatctaacttttggttgaaaactaatgctcatcttttgttctttggaatgtcttgatctgcttgattttgaatgctttgtcacattgtttaaacaatttgttctttgttttcagttgaggaaaacatgaattcgacatcgacacattttgtgccaccgagaagagttggtatatacgaacctgtccatcaattcggtatgtggggggagagtttcaaaagcaatattagcaatgggactatgaacacaccaaaccacataataataccgaataatcagaaactagacaacaacgtggtacttttttacttcattgctcttcaacctcctgatgataaatttgtttggtctgttttcagaaatttaaactagctttcatttcttgacaatcttttttttttttttatagtcagaggatacttcccatggaacagcaggaactcctcacatgttcgatcaagaagcttcaacgtctagacatcccgataaggttagctattcaaatacttctctatcagtttcttaatcataaatttctacgcatcatatagactaaatcgttatatcgttacagatacaaagacggcttgctcaaaaccgcgaggctgctaggaaaagtcgcttgcgcaagaaggtatgacttcattttcttccccttggtaaactgtttctgtttgcctaatgagttgagagatttgattgttttttttttttgcaggcttatgttcagcaactggaaacaagcaggttgaagctaattcaattagagcaagaactcgatcgtgctagacaacaggttaatgaaatgaaatctaaatatatattcgctttctttcgagttccaaaatataatgcaatttctgattgaatatgaatgttttcagggattctatgtaggaaacggaatagatactaattctctcggtttttcggaaaccatgaatccaggttttgaatcaagaacaatgagtcttttggaaaaaatatagaattcaagattttgattggtggaagcttatttgatttgcagggattgctgcatttgaaatggaatatggacattgggttgaagaacagaacagacagatatgtgaactaagaacagttttacacggacacattaacgatatcgagcttcgttcgctagtcgaaaacgccatgaaacattactttgagcttttccggatgaaatcgtctgctgccaaagccgatgtcttcttcgtcatgtcagggatgtggagaacttcagcagaacgattcttcttatggattggcggatttcgaccctccgatcttctcaaggtataaaacaaataacaatctagcgtaatgtttaatgaatagaaggaaacaagcaagattacaatgtttcaaatgtttttttttgtaggttcttttgccacattttgatgtcttgacggatcaacaacttctagatgtatgcaatctaaaacaatcgtgtcagcaagcagaagacgcgttgactcaaggtatggagaagctgcaacacacccttgcggactgcgttgcagcgggacaactcggtgaaggaagttacattcctcaggtgaattctgctatggatagattagaagctttggtcagtttcgtaaatcaggtaaaatatatatattcaaactcatttgaaaatactatagtatcagtttcttgattttgtttgttcattcttaggctgatcacttgagacatgaaacattgcaacaaatgtatcggatattgacaacgcgacaagcggctcgaggattattagctcttggtgagtattttcaacggcttagagccttgagctcaagttgggcaactcgacatcgtgaaccaacgtaggtttgagttattttgtaacaaccaaatgaagaaaatggaaagacctcaaaaaatgaagaatgagtgcatctgaaaacagaggactactctgaataaatagaggggttgctgctgatatttatttttactctgcggcggaattagaaaatttgaaaaacatcatgtattgataagttgtaaatatcagaaaaaggtgggggtgcaaaaatttgtactttttagcttttgaaagaggcaagtttttcgaatgtttgtttgatttgtaaacaatttcagaattatataaacttggttccaaatcccctgtaataatgtcgagctatctgcaatttgaaaactataggggctttacttaattttacgttttgtgtgacacctatttgattttttttgatacgtttggaccagtttcgtaattagaggtaaataaaggggcaaatagtaagatataagaaaagccttatctcatagagtttcttctcttcattatcctcaaaatcgctcgagagtgagaactctgctcttcttcttcttcctccgccatagctacaatg

SEQ ID NO: 32880 - DNA, 3003 bp, Unknown
  misc_feature (1)..( 3003): 2750-1469P.txt file - cDNA_ID_3062540; gDNA_ID_1620406; Annot_ID_156118
actgtttattttcaaaaaactaaaatgctaaatgtttatgcgtgacgtctctttttctgcctgctcgtttttacaaatctatatgatgatccaattcgaattaatattgcaatattttaatatgtggatagagtgtgaaatggaatttcaccaatgtctatcattcgtaatggatcatacggaaaagccatcaccatatggaaaactttatacacacatcattaacacgatccaagtttcaaaagaaaagaaggattaataatattattcacttattaaacttatcctgttgtagttagtttcctcctagtagacaatccaatattagatcatgcatctctataaaaatatttttgtttaaatacttttcatctttattgtacctaatttgtggaacttatctcctctcactctgtatatgcatgtccacgaaacatctcacgtcatctgctgatgaccgtaactcttgagctatatacattcttgtgataatttaatgctgtatgaaagaaatatacatgtttatacaatttaataagtgaaacaaaacttataaacaaataaaaattaaatattatagcttcgttcaagcaaacacacacgcacacacattttatatacacgtctgaattgattagttctaagctaggtagatccaatttatgtgtaatgatgggtttagggtttaaatcgatatgtaggaatcaacgaagacatgtactacttttcattatgtcgaatgtcaataaccagacaattcttatttaatggtaaatcataatcaaatatgtatatgtctcctatggagcctgaagagccaagctgttttgatacattaactggctgcacacatattaaataggtgattccttcacctaataaactctactaacattagcctgtttagactaattccaaagactaatcagtttgtttaaaattatgctcgtattatatagctacgatttatattataaacaagaagaatatatgcaactttcttgcaatataaattaatgttatcatctttacactaaaatactaactatattccactaattaatacaaatccggttagctatgaacaaaatgatcaatatcttattgaattttagaataaataaacgttgcttgtttgaactgttcattcaggtcggtcgctactcgctaatttgcttaaccaatattattatatcagcatgtaataatatattatagctagttgttaaaaaaaagaattatatatagttttgttttcttatactaaattctacacttttttttgtcaactagtctgattttttttaatgagacagctatgatatttggataaacatcagtatttttttttaggttctctgcatttatatgttttaaaaacaggttgatgagatagaaaaaaatgaaatattgattacagattagattagtaagattacttaattatttatttagaaatagccgttactacgtcaccagaatcgaagcagactccggagttctctaatactccatttggctacgccgcgagtagtaaacacgcgcaatatttatcctctttagacgctaaattccttcgcttggaagtatgccggcgtttagtgtttacattaggcgcgtgtatttacgcttgccgtcgaaacgaattttatgttatcgccgacgaatgcgcaggttagaagcagacatgcgcaagatagaaaatataaaattataaggaaaagaaattataaattggagagaatttagaagagaataaaaaaatggatctacctggttcgcacatcagcgtgctaggtagtggagacatgacaattgaattttttaaaaacgaataactaaatattcataatcaaattattatcttaaaaaaaatattaagattcgattggtatcagtggatcatacatattaagtcgctgctaatcaaatttccttttcactaatttatttcctgcttttttccttagcaccatcaaacaaaaagtttatgtgaaaaaacgtattttttcccacaaacagataattagtccggtgtgttttgtatatagaaagtggaagaaaaaaatagtatagaaaaatgtaataattggttttgactcactgtagctgagttatgcgtgaagacaaaaatcaccgagaaaccacagaaacaaatagaaaaaatagttaaatatataaaacaaatataaaataactgcgtcaaaggtctcatttaagttgtcgtgattcttcttccttcgtctacttgaagatgatgaaacctgagtttctgagacagaaggaagagcttttaacatcccttctgtttatggtcggattccaactccggacttcttggctttaaccctttacgtccgatcttgtcgctgaaatctttctttctccttttacatggttttcacgacgacaaaagtttgcctttttctagttgctgccttgacttcagatagcatcacaaggttcggcttcagataacatcacaaggtttgattgactttgctctgttctaatctaatcttgttaatatcttaaaagcctaaaacttttctcttattgattgttttggttaattttgtttccccttttttttgttgtatttactcgattgattacttcaatatgattttctggtttgcttggaatttaagctggaaggaactgattcgaatatttcttgcataagaagatgtttcaatctacctatctattgacttcatgattggcttttgcttttattgttgatatctcttactatcttgatttcacctttcgttaccatttgcgtacaaaaatttaacaaagcaatgaatgggaatttcttattttttgtatagtcgttttaactgctaaactatgttaagttggtccacacaattaggtgctgaaaataaagtgacatcctaataagtggaaacttgacttatggagcttttcgtctgcttaacattaatttttatcatcttatctatttgacaccttccaaacactattggggaaatg

SEQ ID NO: 32881 - DNA, 3000 bp, Unknown; identical to SEQ ID NO: 1474
  misc_feature (1)..( 3000): 2750-1469P.txt file - cDNA_ID_3062574; gDNA_ID_1620407; Annot_ID_156156

SEQ ID NO: 32882 - DNA, 3003 bp, Unknown
  misc_feature (1)..( 3003): 2750-1469P.txt file - cDNA_ID_3062601; gDNA_ID_1620407; Annot_ID_156166
acaaaaaggcagtggctttggcacttttcaccttagtttggaacctctcctcagtcactgcccgtgtttgggcagcattcatgttactcgtcgccttcagatattatcaacataagatgatttggacaactgatcaagctgatgatgatgaggatgacaatgaagaagaagaagcagaagaagaaaaagaacaagtccctcctaaacacaaaagggctcctcctcatatgatgatgcctaataaactcaagaaaatttcttaaatatactaattgtttttcctccatatataaacaacatttactatgtaatctctttagtttttagttacttctctatacaaagcttacagtttataatgtgaatctgatcttctaagttcaattaacttatgccaacaatctaaaactcacacacttgaaatatttatccattcttcttaaacttagttagacttgaacccaaaaacaaacaatcttaattaggcttctaacgggctttaagcgggccttattacataaactattcagctttcgtgaaataacaaatcggacagaagttgaaagctttacttcttcacttttacggttgctcaccgtcgtgacatctccactcttttcctttcaaaatccaaaatcacgatttgattttctctcgcctccgacgaacaagtttaaggtaccactccatgtttctctgcgatttcaattcgaactccatgtgaccttttctctgtctgtgtttaatttagggtttactcaattcgtgactttcatttgcgttgaaaaatttatctgattttgctttgttgtgacttgtgagtggttttcagatgagcgtagcaagtgattctccagttcattcatcaagtagtagtgacgatcttgctgcattccttgatgctgaattagactctgcatcagatgcttcgtctggacccagcgaagaagaagaagctgaggatgatgtagaatctgggtaaactcaactctcatatgtcatgcattctctctaattgaatcttcgaactctctactggtatttacagtgtgtatattttctcaaaccatgtttctcaatcttttaggttaaagagacaaaagttggagcatttagagggtgaagctctctttattgattcagtcttatttttctgtctttcgtttgttcgattgtattgaattttgaaccttatgcttgcagaagcatcctcaagcaaaggcgaatgcgagcatccaggatcatttgggaatatgtgctttgtatgtggacaaaaactggaagaaactggtgtttcatttagatacatacacaaggtatcgatttcagaatagcttctcttaaatcaaatcttagtttttatttaatgagctttgggaaatctgttttcttaggaaatgaggctcaatgaagatgaaatctcccggttgcgtgattcagattcgagattcttgcaacgccagcggaagttgtatttagttctcgatctagaccacacactgctaaatacaaccatactgagggacctaaaaccagaggaggaatacttgaaaagtcatactcattctcttcaaggtgatacattcagctacattgttttgcttctttttcaaatgtgatctttgtgcatggaacttcagtctagtatttgtctttttttttgttccatctagatggttgcaatgtttccggaggcagtcttttcctactggaatttatgcaaatgatgaccaaactgaggccgtttgttcactcatttctaaaagaagctagtgagatgtttgtgatgtacatatacacaatgggagataggaattatgcacgacagatggccaagctgctggaccccaaaggagagtactttggtgatcgggtcatttctcgggatgacggcacagtgagacatgaaaagagtctagatgtggtgcttggacaagaaagtgctgttctgattcttgacgatacagagaatgtaagtatgatttgtaatttgtcaatgtttcatgtaacttttaatcatgatattgagttgtgctgatgatacttggtttgatgctcaggcgtggccaaagcacaaggacaatttgattgtgatagagagatatcactttttttcttcgagctgcaggcagtttgatcacagatacaagtctctatcggagttgaagagtgatgagagtgaaccagatggggcacttgcaactgtcctgaaagtcctaaaacaagcgcatgctctattctttgaggtatgcactcactggatctaaataaaacttatctcttgtcttgttggagtttgttgattatattattcgtttgtttcagaatgtggatgaaggcatatcaaacagagatgttaggttaatgctgaaacaagtgcgtaaagagatacttaaaggatgtaaaatagtgttcagtcgggtgttcccaaccaaggcaaagccagaagatcaccccctgtggaaaatggctgaggaactgggagccacctgcgcaacggaagtggatgcatcagtgacacacgttgtggcaatggatgtgggaacagagaaggctcgttgggccgttagagagaagaagtatgtggttcatagaggatggatagatgcagctaattacctttggatgaaacagccagaagagaacttcggtttagagcagctcaagaagcaattgaccgaagaagagtgatttatgtaacaacaatgagaaagaagagatagcttttttttgttggatattaattatgaatctatgtctaaagtaaagttttgtaatgtacattacattgtatctctgatatttaaacaaggtactaatttttggttgatctccttaattattttgtttcgtctatgcttatttgcgaaggtctgtaatctaccgacaacttttttgggccgggcctaaatgggccgtatatttatgtccctcatctactttcatttgttttgtttggtgtttgtttctggtttctgattccgtcttcttcgcttagacatg

SEQ ID NO: 32883 - DNA, 3003 bp, Unknown
  misc_feature (1)..( 3003): 2750-1469P.txt file - cDNA_ID_3062603; gDNA_ID_1620407; Annot_ID_156165
aaaggagagaaagagagcggaagctgcaacgcactattaaaccctagctaaagacccagccacttattttattttattttataaattttgcatttgatagagacaggagtttctgtttctgttttctgttacggtggtctataccgcgcctgattattaacccggggaatgaaacagtacttattatttatagccttaaaccctaatttaaaggaggttgaacttggaataatataaaaaccaattctaggcctaatcaatgtataagctataaatttagaactattctaaagcttttaaaatataaaaattaatgaattaaatccaaataaaagcttcaaaatgttgatattggttcttcacattttttttttatattttgtttaacttattttaaataatattaccataaaactaactcagtattgaattataaatggaattaaaaatcaatagatattcaatttttatttttctggtaggaatagatattcaaatttaacctaatgggaaagaaattcaaaaataatattgttaatttttaaattcagtcaaatttaattgaatcccttccttccataatcccctaaacccctgaattctgttcactaataggcctaattaaaaagcccatttatatgagtttgacgatttgttaggaagtttggaactaaaaggagaaactggattgggcttatttcgatgagtaaacccggagcttttgaggccatatataataaacccacactagttgcaaactggtgctgactattattaatctatgtaaaagtttcaatttaaataattttttatattggaaaaaaaaagcaattagtaaagaaatagatttactgcagaaatcttaaatctttttaaaaaaatatgaaattatgaatcaactttttaatttagagcaagagaaaggaaaacaaaagtttagtggaaaaagaaaaagtagaggaattgcatggggggagagaaaaattataaaactaaaaacaatagcagacagctattgtaattggtaaacatgtgtagtagtaaaaggatcccgagtcggtgaagactccaaagtacgtttgtatatttatatatttcagagtagtgaattggaggaaatcaatatctatctaatccccataagatacacccattattgaaaccatggcccattcatatatttacttatttgtttctgtgtgaccgttattacttatttgtctcattcttaaattagtgaatgattaaaaaaagattgtgtgtgtggatgggtcatcaactcatcatgggtttaggtaaatgttactcacaagtcacaattaacaactttttttttataaaagaaaaacaaatatgttcgttgccacggtagtttggctcactccaaatttaataacgtattgtattcgcaaaagaagatatactaggagaaagcaaaatgtgttttgtagtattaaaaaagagtctataaagagagagagagagaatgtgcatgaaaataagaaagacagagagaggggaggaaaacaaagaagcaggtgcatagggagaagtgccatgagtcacgtgccctcttactcgaccacgtgccgtcgaagcaatcccaatccaactccgattcgtgttccaatttttcattggggtctaaacttgattagtgtactactatgtaattaattagtgtggttactaattagacacgcacacagacgcaattgcaaattcacatttagattaaggagaccaggatccgttatagctgttaattaggtagggtagtttatccaatacaccaagcatgcatttaacgttaattgagtgtttgctagtacaatccatgcttgatagtataaatgtattgatattcatatattacaaattaaaatatgtatgcttgtactatctatataaagttacggattgtgactttttcttttggtgtaaaaccgatttattatcactgttttctgccacaaaaagctgtcggtggcactcacttcactaatccagtgacagtaaatttttataaaataagattatctaaattaaagttaaaataataacaataacacgttaaatacttaaattagatccatttgttcattctcatctcaaacactcgaccttttataaaggaaaatttagtttcactctctccgactccttccaaaatgatttactttttaatatccaaactcatctaaatttgggtctatatatggctccgtatagatatattctaatattgcatttaactgacgtagacaatattcaatgccataaattttcctcttggttagttggtgaaaaaagtcaaaaccgaactaatccaacaaatattcgttaaattttagctagtttggtgatgaagtaaagtctttaacatattcttacttttgtaaaaaaaaaaagttatattgatatttgatcaaagtatgagtatttacatgaaccatgtgaatacgtatataaccattcacttaaatctcgtgaggtacttgaagaacaaaaataatagtggaagaggacgcaattcaattgttaaacacggcacatgttgattgatagataacgtaaactttatttcataaagtaaaaaacaagaagtaatcaaaattaattaacttcaaataaaaaaagaaaagtaaaaaagtagagagattgtgatcataaaccttgatgattatgtttaagtaagcatctttgcagtgcaaccacatgcaaaggctttaggttaattttaaaagcagtagccaattatccaatttggtgatctatagctagtctcaatcttcatgagacaaacataggtccccctcctctgtctgatctaacaacccaactccaaattctgctttatcagaaattatatgaaatcaattaccttttggtgcccaacaacctccattttccttcagcttcaaggctcatcatcattactactttcaaattcacagctcgattactagtacgacatagacatagacataaagacagagaatg

SEQ ID NO: 32884 - DNA, 3003 bp, Unknown
  misc_feature (1)..( 3003): 2750-1469P.txt file - cDNA_ID_3062607; gDNA_ID_1620407; Annot_ID_156162
aatgtgagtatcaggagcatatgtattctttatgtagcatataataaaagaaacaactgtctctcgaaaaaggagggctgcagatctactcttccaacaaaattcactgacctgaacccttctcgtagttggatcaagagttgcaaacaaacgattttcagcgagaacattagcaccagtcaattggttcaatagtgtactctttccagcgtttgtgtaaccgacctaaacacaatgggtataaaacatttaaatgtaaactgaagtgttggtcatttcctacaagtctaacatgctgtggtgtacttaccaaggatacaacaggtacaggtatagcaacacgcctgcttctatactgcttccgatgctttcttacagattccaactcctttttgagaactccaatctgcccaattcaatatgaaaacgttcagaagatgcttctatcttaatggaccaatacagaaaaatctaaacaaagacagaacttaagaaagcattaatcacaaactttatcacacaccatttctttacaaatgaagaggatatcactagtagaacaggctaaaaactgcagaactatatattttttacttacttgagtacgcaagattcgcttatcaacttcaatttgtttttctcccatacccttaacttggccaccagattgacgctcaagatgagtccacattctagttaatcgtggcaactggtactccatttgtgctagagcaacctggaaacaaatacaatttgagccacggtttctgacaaaagcagtatcaaaaaaaattacagcggtcatctctatatatatgctttatcttgcctgcaaggctgcttcatgagttgcggccctttggttgaaaatgtccaagataagggcggtgcggtcacaaactcgaacatccccaccaaaggccttttccaggttacgcaattgcctgaaatataacatataaataagaaaatgtaacacatactcaattcacaagtcgacaaactagttttgaaacaaacaagagtaatgaaactccaacagactccaacaatccgatggctactttagtagatattattcagctgaatgaccgagacaagctacactatatagaaagaagaaacatagatggaaaattttaaacttataactttgggtgttaggaaacttcaagagcatatgtttccactaaaaacaaaagttacacagaaacattaccctggtgaaagttcatcgtcaaatatcacagtctcaacgtccaaagcattaattgcactttttatctctgcgacctttcctgatccaatgtatgttctaggatttggggaagctagcctgtagtataccatcaaacaatcatcgacttaagcatctgccgtaaactaacatggcagcagacactaaataaacaacaactagatcacaggggaccaagaagaatccagtcacatccctaagtagcaatacatagataactagaaacaactaacttttgataagtagaaccaaccactgcaagcccagcagtatccgcaagttgttctagctcctcaagagattcctcaatattaaacaagcattctccatcaccctttctttccacgcccactagatatgccttctcttcgaaaatctgaaaatcacatataaagtatccttcttcaatacttgaacagcaaatactaatttcatgctcaagcaaatctatataccaatttcatcgaatttaggaaagtaagcacttttctccgtttccgagcaaacatcttatgaacaaacgttatccactaaatgatgacgaagaagagaagatagaaataagttaaagtaacctcctttccatttctgagcttgaatctatcgtccaagctctcttcatctccttttttcttcctcaacattttagatggagaagcaatcgtttcgttgtcgagatttgtctcctctgttggtaagtcgagaacttgaaggatttcatcttcctccacagtttcctccaactcaataccatgttgagcaaggttacaagataatctccacgaatagcagttggcatgaagacgagaaggtggaaaagaaactattgcacgattgggtttaggtttatggtttgcgtgccactgaagtttgaaaattggagaagaagaaaggtaaaacgagctcatggtggagaatgaaggagcttctgagagattgagtgtgtggaaatgagttcatggatggtgaagaagcagtgagttcaactacgtgtcgtttaatttaatcctttaatgtacaatgattgccgtttttttgttttatttttgagttaatttgtttggttactagattagctgtatcttgtccatggacaacattattgatccataaatctatgtttatttattatgatttctctttcctctcgatttttcttgggaagaagaaactcatgggaattttcaggaattttgtcagccattttctctcatttgagaaaccactaaattaggtgtgcaaaaatcctttcttttctctgtcaagtcaaaatgtgctctttctctcttgtttattcacaaatgcaggcttgtttttgtcggtcttcaagaagcttatttatataatctgaatcattgacgttgctttttatgttacttctgtctgttagtgaaaacaagaacccctaaatttgtctggaaaggaagcttttttattgatgtttctctgtttactttgtagagcttcaaaaaacttctaaaggaatgaatgtttctttgatttccaagagagttttggttcgttgactgagtttagttttggagatctagcaactgaaagctggttaaatacttaaatggacgtagcaggctactgtttgtgaatcctctcgatggcgatgttgtttgtgtggaaaaagtatggcctgtttcagatgtttctctgttgattcaagttttaaacgagagccaagagtcagaaatcaggtcacaggctcgtgaaagctgctttgagtcaaacccatg

SEQ ID NO: 32885 - DNA, 3000 bp, Unknown
  misc_feature (1)..( 3000): 2750-1469P.txt file - cDNA_ID_3062611; gDNA_ID_1620407; Annot_ID_156161
gtgcagatttacgtgttctacccggaagggcctaaggtgggagtcccagtgattaagaaggaagtggcaataaagatgcgagacgataaagttcatcgagggatcgtagttgttccaatggccataactgctcccgctagaatggccgtatcagaactcaacaagatgctaacgattgaagtctttgaggaagctgaattggtgaccaacatcactgagcataaactcgtcaacaagtactatgttctcgacgatcaagcaaagaagaaattactcaacacgtacacggtgcaagacacacagttgcctcgcatccttgtcactgatcctcttgccagatactatggactcaagcgaggacaagttgtcaagatcagacgaagcgatgctacttcattggactattatacctaccgatttgctgtttgattcttatccactgtttcttttgttttgcattttactacaaacattgcttcttcattgttttgaatactaataatagactcaaattggaggctttacaaaacataaaaggactttaacaagttttaggaagtccttcttttcagacatacctttcatgttcgaatatacaatggtggaacctgaaacaactggtaagatgatcgtttgttatccctgctgcctgcatgaaggagtaaaccaccgttggtccgacgctgcggaaccctcttctcactagatctttacttatcacttctgcttttggagtttttgcaggtacttgtcgctggtacctgaacttgctcacaatcgccttattcttcacaaaactccatatatacttgtcaaatgatccgtattcttctatcacctgtcaacagagatagagcattcatcaatctgaatgcaatggacagttgcttgctttagtttcccatcctatgcaacaagcctatctgtccagacttgatcttctttttcttgaatcttgaaacaataatactttgataacttctagacctccttttatttcaatatccagaattttgcaaggctttgaatcaatgtgctcaaaattgggtatcttgagcaaccaaccaagagtggaagagaggtctaccttaagtatctggcgtgcattctcaatgactgcccttagcttaagatcagacaataaagtgcttgccgggcttcctggaccaattatcttcttctcattgattttcacaatggcattggggtcaaaatcagcaaaaacttccctgcattccacacttttcataagaaaacggaatgtactgcttcaaagaaatgagagaaacgttcatgcaaaatgagtgaaccagagtcatagcaagaacctgaaagcctgtctcttgctcagtatcgtaggccatgtgtgttcggccaaagcacccgaaagcacaaggagttcaaacaacctcctgaacatacaccagcaaagaatgacagtaaggaatattcatcaatcaaacagagagcagatatacacaagcgagaaaagcttgaaccgtacttgtcatcgtgaactggcacaccccattcttcatcatggaaaactatataacatggatctggcgttttcatacaaaacaaaaaacagtcaatagagagatctttgaaagtaagtcgatgattgtgtatatccatctacacctgaatgtagataagagtatgaaactgaccggagtttggtgtcacccaagtacacctcttcttagtctctgaaccattaggtggtgaatccaaagcaccttcagagacaacacttcttggcttggaagggtaagacttacttctacttccaacactgtacgacctaatcaagcgaccagttgatgctcggctgtggaacgagtccatggaggcatcagatgaaaacgatgcattaagtgacagattagaattcaggttctgctcatgccgtcgtagtatagaagccgcattaagagtatgcttctgagaagaagaagacacagtttctgttggtgtagcataagatgttttctcatctgatccagtacgcccagatgaggatctttcaagctttcgcagtgactttgatacagctttgtgtgtgatgaaaggactagcctttttagcagtagaccccagagttgacctggtctctgcttcagccacattcatggactgaactctaggagcacctgacatgggtttgactcaaagcagctttcacgagcctgtgacctgatttctgactcttggctctcgtttaaaacttgaatcaacagagaaacatctgaaacaggccatactttttccacacaaacaacatcgccatcgagaggattcacaaacagtagcctgctacgtccatttaagtatttaaccagctttcagttgctagatctccaaaactaaactcagtcaacgaaccaaaactctcttggaaatcaaagaaacattcattcctttagaagttttttgaagctctacaaagtaaacagagaaacatcaataaaaaagcttcctttccagacaaatttaggggttcttgttttcactaacagacagaagtaacataaaaagcaacgtcaatgattcagattatataaataagcttcttgaagaccgacaaaaacaagcctgcatttgtgaataaacaagagagaaagagcacattttgacttgacagagaaaagaaaggatttttgcacacctaatttagtggtttctcaaatgagagaaaatggctgacaaaattcctgaaaattcccatgagtttcttcttcccaagaaaaatcgagaggaaagagaaatcataataaataaacatagatttatggatcaataatgttgtccatggacaagatacagctaatctagtaaccaaacaaattaactcaaaaataaaacaaaaaaacggcaatcattgtacattaaaggattaaattaaacgacacgtagttgaactcactgcttcttcaccatccatgaactcatttccacacactcaatctctcagaagctccttcattctccaccatg

SEQ ID NO: 32886 - DNA, 3003 bp, Unknown
  misc_feature (1)..( 3003): 2750-1469P.txt file - cDNA_ID_3062615; gDNA_ID_1620407; Annot_ID_156159
gctcctgtaaacattgtcttgtctccaaattacaacagaagcgttgctgctgctcctttaaacgctcatatcatgaacaagggaagcctgaacacagcatggagtttgcttcttcttcttccattaggccttttggtttagtcttgtgaattacctctagccaattcggttcgatttcggtttgtattttccggtttacttgttactttggcttgtgatttagtcttgtttcttagccaattcggttcgatttcggtttgtaagtttacttgtttctttgcattactctgtctgagtgtttaatacaatgttagttttggttaatatcctaaattcaaattggaaagaaaacattaaaggccggatcggttatacaactgtggaatttggaaacaaatgttattataagtgggcctaatgggaacttctgcccattaaaggcccattatttgaacttattagctttaagcttgtccacgatttacattagctatcttcttcgtctccgggactgagaccgctctctcttccttatcctccatcttccaatggtttaatccagcaactgtcgacgatgtcgataacgtactccgctatttcctgtaagtttcttcctcactgtgtgtcgaatccgtcctcaatgctcaattttatccatttattgtgagactgtgattgattttggtttccgttgttttatccagctagtacagtttctgggttttcaccaaaaagtgtaccttttgctattcatagcgtaaccaggaggcaatttcttaatcccaacacgttttatagatttgggttctctccttctcttcaggtcagattcctttactagtcagtatcatccaattctccagactctgcttcgttgttgttttggttcttagaattagaccacacttcgttgcttccctttgaagtagagagtcaatgtttactgttatgtgcggatatgttgtgcagggaagtagcattgagtttagccttcagttgaattcaagagttgtgcttagtaaagagcgtcgatctctgccattagttgtgagaaatgatcgtcctcagaatgaagacttacctaagcagtacacaaggcgagagaagaaacctttcccagtccctattgtggacctgagacgagctgcgagggagagagtcaagaacaacaaagacaaacctaagagacctctacctccgcctaaaaatggtatggttgtgaagagccttgtgcctcttgcttataaagtatacaatgcaagaatcagattgatcaacaatctccaccggcttatgaaagttgttcgtgttaatgcttgtgggtaaaaattctcttcttcttcttgtttcatttttggtctgttttgagtatggcctttttttgatgttgtatgattggtctcttaggtggtgcaatgagattcatgttggaccttatgggcatccatttaagtcgtgtaaaggtcccaatacttcccaaaggaaaggtcttcatgaatggactaactcggttattgaggacgttattgttcctcttgaagcctatcacctttttgaccgccttggcaagcgtatccgtcatgatgaaagattctcgattccccgagttcctgctgtagttgagctctgcattcagggcggcgttgaaatacccgaatttccagcaaaaaggagaagaaaaccgattatccgcattggcaaaagcgagtttgttgatgcagatgaaactgaattgcctgatccagagcctcagcctcctccagtgccattgttaactgagttacctgtctcagagatcactcccccatctagcgaagaagaaacagtctccttagccgaagaaacattacaggcctgggaagaaatgagagcaggagccaaaaagctgatgaggatgtacagggttagggtctgtgggtactgtccagaggttcacgtaggtccaacgggacacaaggcccagaactgtggtgcattcaagcaccaacagcggaatggccagcatggttggcaatctgcagtacttgacgacttgataccgccaagatatgtttggcatgttcctgatgtgaatgggccaccgatgcagcgagagctacgaagcttctacgggcaagcacctgctgttgtggagatatgtgctcaggctggcgctgttgtacctgagcattatagagctacaatgagactggaggttggaattccttcgagtgtgaaagaagctgagatggttgtttgatatgtagaagaccttgtaaacttcttcttgtacaaaatcctccattccaccttgtgttgtataataatatcacagcccaggtctttttgacttttgaaggacaaaaaaaacaatccacgctaatcctattatcaagggtaaaaatgtcatttgcttcgttttcatcttttctcgttgccattttcttttttttgtctgtgtcaagtcgataccacttgtctggtagctttatacccactttcatctttttcatgttcgtagttgttcctctggttatcctcatcaacgggacccttgaaaccgtgtagccatgtaagcctttgtctttgtctctttctcttgcttcagcaagttcacgtctgctctatttctaattttgttctaagattcaattctccttttttctatgcgagaaatttaagattggttctctagctctacctctttaaatttgttactatgtgtcggtgtccatcattcatcaaattttttccttttttatccatttgagttgatgtaatgatgttgcttcgcttcatactggtcagagttagtctaatcttcattttagcacaacttgacaacttcatatggttatgacttatttttacttgggtctttcaaaggttaagtattttagtcttattttgggatgatgcagcttgcttaatgattagagtcttaaagctgtgctctttcttcatcgatttgagcaagtgatcttggaaggctcttgagttctgaattccttgtaagcaatcatg

SEQ ID NO: 32887 - DNA, 3000 bp, Unknown
  misc_feature (1)..( 3000): 2750-1469P.txt file - cDNA_ID_3062619; gDNA_ID_1620407; Annot_ID_156155
ctttgtccttctctgacttctcctcacattgatattagacttctacacgaaacccagaaccttcctctttctcatttctctctttcctctgttttcatcttttgctcttcatctctctctttctctccttgtgtgattctgtaatttactcatctgatgaatccaactcacggagatttcactcccttgaactctaatcatttcgaggatccaaaggtcaggtttaggcatcatagccttatgcaagactatggagaattgcatatggtacgaactctcttttcttgagttttagatcaagtttcagtttctgggtctggttttagttgtctctggatctgagaatgtaattttatttgctcaaagattgatctgggctcagagctactcggaaaacccggaaaaaggaacaactttcttctttaaaataatagaaagaagaaacttttaagtttaattgcttctgcttccttaacaaagttaattacttattaagatttctatgtgtagttagttatgcaaatctctattagtcttaactcttaaacatagttttaggatttaaaaccttgttgtgtacatattatcagctcgatactctgatctttgagatcatttggttatgagcttttgttaacgtgtgttggttgattatatacactaggaaaccgaagctatgagaaaaaggttacaggcagtgcgagaaagaaaggcaacactaatggctgaagtcaggtaaagacagtttcaatccttgacaaaatatatcattagtcctttcctttgatgttttcctcacttgttaatatatcgttcgtttataacctctttaacagatttctgcgacggagatacagacatttgagacaagaccagccacaagagattaaaaaggtcagaagatcaaatggtgggaagaagatccgagtggaagtgtctcctagtaacaaaagtgaggcggaaactaagcatgtttcgcttcctgacttaaaccactcggaaaaggctcacgatgaaaccaaaaccagtcctaagagaagagttcctttgtttgatctaaatcagatatctgtaagcacatttttcactcttaatcagattgtgaagagacttagaaaccaaacatgtctttactcataaattgatttatatagggagaagaagagcaagaaacagaggcagtggacaataatcaagagaacacgagagttgaagaaagtaattcatgtaagagattaatgatcagtagcattgagatgcagcagaaagatgtgaagccatcttcttgcaggaatggcggaaacggatcaaataagaggaaaatttcatggcaagatcctgtcgcagctctcagagtctaaaataagaagacggaaccttttgttcctcctcatagatcttgttgtaacatagcttcacatcaaagttagcttgcttatttacttatcttgattgaacaacatatccaattgtgacttgaaaacttaaaaaccttatccaatggtggcttattgcaaacgtgacatttctataccgaaacatgtgtcagcaaacgacatttatggaagtgatccaaaagtcaaggaacaaaattaacggtcagatgcattgacacgtgtctaaagagacacgtttcgtgtaactttaaactacattattaccgaacacaaagaaccgatctttgaaaacaaaacaagaatctttatggaagaagacgggtctgattggggcggattggctccagagatactcatcaacatcatttcaaggcttacgattcaggagctatggaccggtccgatgttcgtccaaaaatcgtggctaactgtttgcagagatccgtatctctggtctatcttcgatctggagccatggttcgattcctatcccgagtcgactcacttgtggtcccctgagttcgagcagaaggtagacttaatgctacgatcagtcgttgattggagcgaaggtggtctcactaagatccgcgtccgccattgcagcgaccacgctctctcttacgcagccgataggtaaatatctttcttatcaagatcgtgattgagtttgtgatatcctctattttggaattttctatggctacgagtctgattttggacatatcaatagatgcccgaatctacaggttcttgccattagaagcagtcctaacgtgacagacgcatcgatgacgaagatagcgtttcggtgcaggagtttaaaggaacttgatatcagttactgtcacgagatatctcacgacactcttgtgatgattggtagaaactgtcctaatctgaggatcttgaaacgtaatcttatggattggtcttctcggcacattggctctgttcctacagaatacttagacgcttgtcctcaagacggagacacagaagctgacgcgattgggaaacatatgatcaatctagagcatttggagattcagttctctagattatctgtcaagggtcttgcttcgatatgtgagggttgtcccaagctagagtacttggacttgtttgggtgtgtgcatttgtcaagccgtgacattacaagcaacgtgtcaaggcttaaatggcttaaggaggtaaagaagccagatgtgtatgtgccaaggtcaggggatgtggcgcagacggagaggtatggacattggagactctatgacgagagatttgacatacaagccatgagaatctgatttctacacacacactgccatgttttataataaagctgcccatagttctgacttgggtcggttgtttgttatatgtcgtgttgttaaaatggaccttaggcccacgggtctaaacgggctatttgtaatgtttgaacgggtacccatttaaacccgattactaacgggtctaaacaaatattaaccgagtggcccatttatttttaagtttttggaattttctatgctaaaacgacaacgttacgagttcttcagtttctcagttctccaaacgacaacttcgagccaaaacaatg

SEQ ID NO: 32888 - DNA, 3000 bp, Unknown; identical to SEQ ID NO: 1480
  misc_feature (1)..( 3000): 2750-1469P.txt file - cDNA_ID_3062623; gDNA_ID_1620407; Annot_ID_156152

SEQ ID NO: 32889 - DNA, 3000 bp, Unknown; identical to SEQ ID NO: 1483
  misc_feature (1)..( 3000): 2750-1469P.txt file - cDNA_ID_3062627; gDNA_ID_1620407; Annot_ID_156151

SEQ ID NO: 32890 - DNA, 3003 bp, Unknown
  misc_feature (1)..( 3003): 2750-1469P.txt file - cDNA_ID_3062631; gDNA_ID_1620407; Annot_ID_156147
ttgatgttgaccgtatcgatttggtgtgggaagcagccatgaagtatggtcttagtgctgtttcttcactcacaaattgagtgaagagagagacacgtttcattgttgtcttttgactctcccaagattggtcattctttgtacaggtgaaaggagatgcaagcaggaaaaaaaagtagaatttcaccttatgtattgttttatcttttattaatgatgtattactttctttttagatttccttaatattaatatatgcacctaatttccaagaaaattcaacaaagcttttaattatccagcttgatttgcttctctgtttggcacttacacaatcagacgacaaagtgtcttcaatgttgctgtcttctatacttttaatttgattagacattattagttgagagaaatatcgaaatatcaaactaaacagtgcattaacagaaattgtaaaaagctgatcagattgttgtttgttctgctaatgaattttttaaggtaaaagtttcaatgaagatttttgaatcaaaccaattgtttatactttattacaaacacattctctacactaaaccaacaaaaatcccacaataacaaaagagacagaggaagaagagctaaacatttgctcaaagagacatctgcttgagttctaaaacaaatgcagaagaaagagattattttacctaattagaaaagactccataatgtgactaacccttgaatcgttcccaaaaagtagccaagaagatcaagagatgagacatgagaagaagaatggaaatgacgatcaagaagataccgagctgccaccatttcctccttaccgatcttatgaatccgaacttacaagatctacaatcatagcataaaatgctccaatcgttcctccatagttgacagtcgctaatccttcccaccatcatctcatcaccgtacattaggttcatagacgacggtggtccttcgtcttttcttctgtaccaaaacgtcgcgtttatcgcgtccatgttacatgtctctggtggcatacaacatccattctgtaacaacatcaaatgtaaagataaaaatgtttgtaaaatcttatacaaatgttttacaaaacgtatatttgagtgatcttttcatcggtatattgttcgaatgtactaattgtacactttaaaagtcggtcttgagatcaaagaatatatatctatgatgatcaaaccttgattggtggcatttttcttctattgtaaggtttttcatttggagatccgtaaatgaggtcgttgcaagctcctttatcatagacacacgatttgatattgttccaggtcacatgatcgtccatgattttgagcttgaaccacatccttgtcgccggaaaccgccggctttgcatctcatttactccggcatacgccaaaccgatgaaaagcattaacaacaagaccaccaccatcaccacaagtgcaggcatcggaaacttccgccgcaaaaacagagctgcgttgctgacaacaaacaccgcgagaagaccgacactagctagcgtctggacacgtggcagaccgagaatatcttcgcagtcgtagctacgcatgtaaagaagccacactgcgtagccgaggagtgtaagtgagaggacgaaagtgaagatcggaaggacaccagcggctaaaatgttcacaagtgccatcaatgttcccatcggtggcttattatcactttgtgactccatttggtctgaactcttggcttctggctcagtcgttgcggttgctgtagctgtggctgtggcggttgcggctggttcctcgacgggtactacttgagcattatcagccatgtgaaagtgaaagaaagctctctctctctatggaggtgttgagttgatatggggaaatgtatatatagaaacagagagatcataaatataggtgtctgagtgagtgagtgtgtggtgggttttacagagtcaaatttgtaagttagagataaataagtacacattaattaagtacaacgagatcttgtccgaatatcaattatccaaaagtgttttttttttttgttttgtttaaagtataaattcattacagtttttaattgtttgttttgtttaatttatggataaatgaagtaaaaacccttatagagaaattataaaccacacaaactaaatattgcacatcaagattaatggatatatgtagtgaactaagtcaaacataaaatccctaaaaataatacattaaattttctaaaatctaatctaaataataggagaacagtaattattatgttactgtttttagacaaaagaaccagtcgttcttacacattactttgagaaaataaaaaaatgtttgtctaaattttttttttttttttttgtgtgtgaataatttcaatcccaaatatcatatcaaacaaattaaaacaaaatataaataatttctaaattctaatcaaaaatattagagaataaatgatgtttctactttcggacaatcgatccagtcgttcttagaccatccacatcggtcatttttttaaaatgtctttaagtataatttattaataatttaagctgatgctgccacgttgcctctcgaataggtaaaatgtgtctttccaaggacacaatagacacgggtcttacttctttattctgttttttattaacttttgttatatttaatactaaagatctatcaattttttgtgcgatgtggatgctcgtaggtcaattttatatttaatactaaagacatattgacattgattttaaaaaataaaatggtgaatcagatttcaatctaaaatcacataaacaaattaaaagacttaattttgggcccattaaagcccaataaaatgggctacttcggttctgttgtagtaaacggtcgaaccggagagatatgagtgtcatatcctgatttccccactcgacgctgatttcttctctgcttctgtaatttctccaattcattgatcagatcagccatg

SEQ ID NO: 32891 - DNA, 3003 bp, Unknown
  misc_feature (1)..( 3003): 2750-1469P.txt file - cDNA_ID_3062633; gDNA_ID_1620407; Annot_ID_156145
attttaagaaattaaatctttttttttggtatctgtgtgttactttttataaatgtattttgaaaagtattatttcaatttatagataaatataattatgactctcaagtggatttttttttcacggtcaattggagtttggctgtgaatcttgtgaataatatcaactaattaagagtcggccgatactccgtatctttgatcactttcacccatatcttgaaatttaccaaatgttttctttcattggggtttctataccttttttttttggttctttctgtaatttgggttttaaagaaaaaacctataattacaaaaaaggttaaaagttaaaactaagcacgttcaaatatgttctttcgagatcccaccttcctgtctatcttataagaagtcgaacacgtgtgctcgttgtgtgaattagagtggttatttcaacatatataattaaactatgtatgtatcataaatacactgaatatgttggagttgggtcttgtggtaggctaacttgttcgcttcactttggtttagtttagccttgtaatcggtggtttcatatactgaaatttttaattttctaatataatccagatgacaaaaaaaaatcataaatacactgcaatggccatttttaaaaaaactttaaacgaaatatatatacatcaccaagtatcaagtaagtaatttggttgttttgatttttcaaaaaaacatttaggtgattcttttaacaaccaatcatatatgtagcaaagattaattatgtcaatcttttaacgtcacttatatagtttagctgtagtattattgtaagccaattgtacggacttcgtaaccgtttcgacaaagatacaaactaatcaatgtttaagatggcataatattccgacttcccctgccactcggtagtactgctgcgccatcctacaagaagcactcgtaaatgagtggttagacggccaaaaattagcaggattcaatccttgattaagagatggttcagataagccctctaggcctctactcgtcacaattcatatattaattgatcacactgcatgaaatgataagatcaagtcaattacctcaaaattaattgaaagataaaatgataaagcaacaagtaatgatcatatatggatgtaacaaccttcttcatccatacgaatatgataattcttttgtcgatcatttgccacatctatttaactaagtattttgtacattaagatcattttgcgagtattcccgcgttcccaacaaaaacgaattgaaaaactacatagggtgaattttgctctcgtggcattaaagagagaggctgacattatagattatgatatatttattatttttcttagtagatttcttgaccagcctttagatatgcttgctctgtcatggcataaagccttaaaccctaaagccctttacatttgtacagtaccaacaattgtacccaatgttaaatgaatgcggattaatttgtgatatgagaccatcaaaataaaatacttataagatagtagatatatagaaccgtaacaaaaagatgagaagaaaaagacaaattgaatagaaactggaccaaaagataaaagagtatatgaagaagcaagccaccaagaagtgtaaccatcgttgcttcaactgtaaaccgcacattaaatgtgtgtgagagaaagagagatagactccagctgtgagagctacgtccattgcatcaattgggttatatgtcgttaacaattttttaaaaatacataaataaatcaataaaatatttagaaaaaatcaatattataatgatattttgaagaagttaggtccataatggaaatatagagacttagtgtctatttatcaagaaatagtgtctatttatcaagaaataatgtctatttggtccacaattatcatattttttgtggccactcaaactacgaaaataatgaatattgttaatttttgtcttatttaagtctataactaacttactaattcggttgaaattgctaatatgcattttccttggtccactattacagtgctactgctgtcttattcttgaacacaaaataaaaaagatttcaaacacaaaatatgcatttttttgttccaccattacaaacctttatttggagaagtatacagttggatattaaatattttaattaaaaaattgaaaatattgaagttctttttctccagtattttggctggagcaaaactaaataaattccaaattaaaagctcgaacggaaaacatttactatgcaccaaaataaatgttgatatgaaatttgcatcagcatatacagtatgtatgtagtacaattgaacagagtcaaaattaattgtcactgaaacagtcagattttatttctgttaaaaaatattttcagacaaaaaatgattttttaacgtttttttatataattttattaaacctcaaaacattcctcagcagattgttttataatgttattattattttttcttaaataattttatttgaatttcgttatagagagataaataaaagatttttggggtctagttggctctcatagtttgaatgcttatataaggaaacagagctcgaggctctcaataatgccacataaaacacaacaccaaagcctttataactctttctggggtttttaattctctcaacgaacaaaaaaaaaaactcaactaatattctccatcctctttcttcagatttaagagaaaccttatcgttatattctctcttctcttttctttttgactcccacaagaagaaagcaaatttctttttctcaggattgcttgaaaactgtagaaatctttaaggtttttttacaccaataagagtcagagagagagagagagagagaaagagagatctattcataaaaaagacaggtaatctcaactccgaggagataactgatataacaatttgagagaataagaagaagaagaagaagaagaccaagctaaagaatg

SEQ ID NO: 32892 - DNA, 3003 bp, Unknown
  misc_feature (1)..( 3003): 2750-1469P.txt file - cDNA_ID_3062652; gDNA_ID_1620408; Annot_ID_156192
ccaatggagaacagagaccaggtgaggcaaacagaatcagctgagaagagtcaccgcaaggaaaatgtgaccaagagtgagaaaccaagggatcaagaaggggtaaagaagactgaagcaaaggataaagacagaaataaagagaagaaagaggaaaaaacagagtcgataaataaaactcgtcaggagaaaccaaaattgatacgagggcccaagttagaggaaagagaaaaggactctccggatttaagaaattgcaagctgcctgacgtttcacggacaagcatcaagaaccttcacaccgagggaaatcttggcaaacggaaggatcatatgacaaatggattcctgtatggtgagttattctctgatccaattctctgtctggtgaatgaggagtgtagttgccatattaaccatcgtatgatatatggtttggtacttagaagcatctaatagttttatccaatcatggtatgttttcttaccttaaaagattttttaaatttacgggtatcttactggtttggtagtttcttggtttggagtaatgatgcaagatccgtatttcttggttttggtctgaaatgttaacaatgtagtttattacctgtttgttgtaacattagtctttaattctttcgcagaaaatggaaccacgccacacaagttacagaagctgagtgcttctgtaccatctgtggaaaatggaagaacattaggtgcaccccgaactcctccaatgcctgcttctgaggtgcaaggaacaacttgcaagccacaagtcaaagaagtcagaattaatggttttgctgtctctggagaaaaacgtaaagtctgtccaccaagccctttggctgcaacaatgaaagtgaaagtcaaggaaaatggtgaagcatccgcaaagccgcctcatcctgacctaaagtatctcaatcagatactccatgtacctacaagggagctgttgccagagattgatgatgaccaagaatggctacttggtcagtcgggtatcaaattaaaaagggcgagaacagatcctccagattctggcgaatccttgcaggtctggaaccaagctttcagaatagagtctgcggatatcacagctcttccttatgtagttccattttagctatgactatattcctacgctacaatccctgaggagaagaactatccctcgcacaacgccactttgcagcagcatctattaaagaagaccgacaacagcagtccatggctccccaaagtttatgagcagggatcaaatatgttatacacgcccataatatgaacacccacaaagctctgcatgggtgggggaaaagaatgaatgaggaagatgtaagtagagtaagtttatagagaagttgattgttgtttgacaccatgttgtgttataaggacaaggatatgtgtggcattttgttctgcacgcaattttgattccctgcttgcatcatcaacattagtggataaagtttgtatattacagagaatggaaaaagaaagagtagggctctatgtgtgttactgggcgtggagacggaagaaagtttaatctttccgttataactatagagtatatagtctcgagtttctcaggaatactattgtaccaaatcctgaataaaccaatgatcactagccaatcctagctccatgcctaataatgttgtgtataattttagtaaattcaatcatttctatcctaaaggttaaatctttcataaatttgacttaaaggatcggtctcttacttcaaatatcaaaccatggacttcaatcgtttcgggaaatcttgtaacttcatttttttacggatgtattataccaacttcagttaagttcaatgatcttagtcaaatgatcgaattcctcaatcagaagcaaattggtgaagagagattggttttcacactaattgggagagagcaatttcggttttggttactgtagtgatcaatgcagcgaaggtgttcgatgaaatgcgtaggagagactttcgggaaattacttcactaagagcttttttactgatgcgaattccttttaatgatagaacaagatatcaagcaaagaagccttgtggtcttgatactgaattctagaatacacagtgacgtggtggtcttgtcttttgataagcttgttgtagctgtctcctctctcaatggctatctcctgcgactgaaacggtaaacctttattctctttagattcgtgtgtattcatcagtatctggtcaggttacaataatatattgcttattaactgatcaatctgttactgtcctgccctgcttactatagtagacagtttctgtggttttgtaatacttaggcatgtgttaactattattagaggacttacagtgagttaaggtgtcttcgtgtgtgtttctctcaaaatgatatatttgttactctgtatatatatatatatgctcgtggaatcctgatgagaatttggttacagctttatcaatcctctaaatagttttcaacagtgcaaggttttgtgttcctctcttgaaaatatagtctctgaagtgttaacgagctctatatatgactagtttgcagagttcaggcagcaatgtgaatgagctagagaatccaataagcaatgataggactgggtcaatagttcaagaacgtgaaggttccgacaactaagcaaactgcttcttcaatttggttccgacaacttttatcattaaaaaatatataaaatatcttttattattaaaaaatatagggatatatcttttatttgattaatcattatattattgtagagaaccctcagccaagagattggtagctagatagataaggttgacttggagtcaacttctagcttagagttttgataaattttatagctttcttcatttatagtaaacgttttaactcatttttttccagagaatctgtacccttggcgttcttgtactggttcatcgtaggtgatactcgacgtctagttgttatg

SEQ ID NO: 32893 - DNA, 3000 bp, Unknown; identical to SEQ ID NO: 1489
  misc_feature (1)..( 3000): 2750-1469P.txt file - cDNA_ID_3062659; gDNA_ID_1620408; Annot_ID_156198

SEQ ID NO: 32894 - DNA, 3000 bp, Unknown; identical to SEQ ID NO: 1494
  misc_feature (1)..( 3000): 2750-1469P.txt file - cDNA_ID_3062667; gDNA_ID_1620408; Annot_ID_156186

SEQ ID NO: 32895 - DNA, 3003 bp, Unknown
  misc_feature (1)..( 3003): 2750-1469P.txt file - cDNA_ID_3062700; gDNA_ID_1620409; Annot_ID_156230
cggaaaaggtgcgatgttagatggaaacgcggtggcgattttggtagggaagcttagagaagtcggaggtggtgattcagaggcggcgcgtgagaattgtgtggcggttctgttgacgttgtgtcaagggaatttgaggtttagggggttggcgagtgaggcgggagcggaggaagtgttgatggaagtggaagagaatgggaatgaacgggtgaaggagaaggcgtcgaagattctgctggcgatgagaggaggaggcggaggagagagtgagtttggggaaaatgcggaggcgcgtgagtggaaccgtatgcttgaagcgactgggctaagtcggactcagtttcaaggagggcaaaatgggggttttgcttattcctcccagttctagctttttttaaaaaattgtttttttgggcatctctttgttgtttacctttttttggtaaaatgttatcttatttttcctttttttttgttttggtttgatataaatgggtgtaaattactaattttgtgtgaattataatatgtgattatggtttttttttccaatcaaatgacaaaagtgaattgtccatttgtttgtaaaaacatgtctaatgttttttgtaattttctatcacataatgttttttgcaattttctctctttacctttttaggaaattatcttatctaatttttgtaaaataattaattttgagtggaatatgatatgtgataaaaaaaaatttcacttgatgagtaaagcgaaatgtcaatcggttgtaaagagatgtattttcagcttgatgtgatttattagttgaattgacttattgcaaattagagagatgcgtggatgaaaacgagcgtgtgatggagagaattaagaagtcagacagttcgtgtgaagatgtcagaggacaaaactctgaattattctactacaaaaacattccgtgtgatactatgagatccaataactaaattttaagtaaccaatcctgttttattgtcaaattaaatgcaggcaagaggcaggcaaaatactaaaaaagaagattttgtatgttttttctagatattgtaaatatttgaattgatcatagattcataggtctcacataactgagcacttcttcatattcttgcccagcccaagtattggtctcatgggctataaatttttgatgattttgggaatataaatttctagaattctttcatctttataagtagtagtattgttcatatgattgtggattttcgattaataaacagccaaaattcaatttgtacaattaatgaatagccaaatatcagcttgaaacttctttaagacaaaactgcttaagcgaagattggttatatatagtttataacatcgtacgtagatcaacgatcacgtattcacatatatttcccaagtgcaacactgtatactgattcagagaatctctttgaagtttgtttttgaataatgatttacgtgtttgtgaaaactcaactattttaaaatgtttagtggagagagggttagtgtgtacgatttaaatataaaagaacttgagacaaactcattttcttttacccattcttcaaatcacgcgtttatgtgtatgatttgtgttggtactggaaaacgagtatgtcagcatctttgtttaagatgtgtataattaattggtgtagaagaagcgtttgtgtatatgtcacataattattaaatcgcattttgcagacgctttcaatatgatttatcagtagataaagcttaaaaaccgagttctatgtgtggttaaaacaaaaatagtagtcaaaactgaaaaacatatcatatctgttagttggcacagaataattatcacatcaaacatcgaaatgttttttttcgtttgtcgacccaattggaagaacaatatcataagacaagaccgtatggctggggcataagttattgttatccacaaggttcttttgtgaccaagctacttgattcatatccatgtgacaagaagaacaagggtgaattatggatgattgctgtttccgcatgcttgatgatttcgtcaaacagccctaataataggtaagagttaaaaaatttttgtttttatttaaaattcgaatgaataaaaaccaaaattctttaaggataaaatgaaaatagctttaagaaaataaaaaacccttatttttatttttatttttaaaaaccctcttctatgtatttaattgtttaagtacgttttctgctaactcaagataaataaatattattcttaattgtataattttgtttcatgatgttgtggattcaatcagttggttttatttataaacaagagaactagtagtgaagtgatgatttctttaagacaagattgaacatctatggcttgttagatgaaactagttgatctttagtcccttatccgctattatccaacaccctatacccataatgctcagaccaagcaatgcttctcagttctcagtattcggaagctatgttctaaactttgaaatttgataaatgtacttgaaaaaagatttaggtacggtctaaacttgtctctgttttagtagttagaagaagaagcacacacaacatataaattaggggttcctcgtcactaacgcggtttcggtgggtcccacaacacccaacactgagaaagaaacaccattcttctccgtgttctgtctctatctgctaattaccacaaagaagaacttgcaaatcccttctcttttgttcaagtcgtacgacagagcctttgaaagaaagaactggtggggaagcgttaagctacagataactccaagatacgggtctttgtttgttttgaagatcagattcattttacgataattccgttactcgttattgtgtatatatatctctttcccggaaatttcggttcttgttgtacaaaaactccaaaaaaacgcataaaaaatattctgtaaatggttgaaattctctgggaatttcaacgggtcttgtggtatcatg

SEQ ID NO: 32896 - DNA, 3000 bp, Unknown; identical to SEQ ID NO: 1500
  misc_feature (1)..( 3000): 2750-1469P.txt file - cDNA_ID_3062704; gDNA_ID_1620409; Annot_ID_156225

SEQ ID NO: 32897 - DNA, 3003 bp, Unknown
  misc_feature (1)..( 3003): 2750-1469P.txt file - cDNA_ID_3062708; gDNA_ID_1620409; Annot_ID_156224
cttggagaggatgtttgcacaatattcaatttaccctaaccggttttttggttttacagtgaactgaaccgaatttattccttcctaaacttgaaagattatctgatggattttcattgtatcacaaaaatgattttattaaatgttccccaataagtaaaattaaaaattacaaaataaatagtaccattgtattattaaagggtaatgtataatcctaccctcagacctggccatacgatatactttataattaaggacttgttgaattttcactttaaagaaatacaaagtaatggtattcaagtttccaagtggatgatgctttcactcttatccataagtttgaaaccaaagtccggtattcctttgatcccatccttcttatggtccggcattgcttggatttcaaccttcctcagatgattcttctgtatatcataatagagaatgtaaaaaggggaacacaagtcacttggtaccaagacaacctcgccgttttgagttgtgtctactaacgtcaatggaatgtcgttatcaactaaatgcagctgacaaggctgcaaactcaaaactgtcctcgaccagtttccagcattttccaagacccataagtctaccaaaccgttttctttaagactagtatgataaaaaatagctggtttcccaccgtactctataaaatccagagagtcaacatatgcagacaacacaagaggcgcttggataatgttaaattcttcagacctaacgtcaaaggtgacaacgatatcctgaaacatactagtgaaagcaagataatatataactccaccgatgcacagtccagatctcgtaggagtatgaggttgatcaaactcaattcttttccaagaacctccaacttccagtacgaagacccaatgctccgagattatcgtttccaaatcttgtgaggatgatgacacaaaagtgcaaactactttgtattgatcaagaacaggatcgtgccccaagaagtagaggagactatgttcgtttccttggacaaaaatgttgaatttgatggcgggtaaggttacgctctgtctggtggtgggattatagagacacgcttttccgcaaacaatgtataaaatcaagccacgaagagtcaccatatgtagtcctcccatcccttgcatggtcgtcaaatcttggtcgaaactagaaggcgatgagaatgatagcagtacagactcgcgggggctgtggcagacctcccttgaatcacacttgtggtccaccaaactaatgtatagacgatgtggtcgcagtggagatgcaaccgtaagataacggttgctaaaaaatcgggaacggataagagaagaccactgctttgaaacgcacttgaacctcataagcgatttatgaggcaatctagtcagaatctcgatcagtagatccaaaggaatctccggtgccacaaaaaaatcttctcctctttgtcttcttcttcttctttttcttcctcttctcataatcgcctttgaagacctcttcttccattgaaaagatgaaatcagagctacagacaaacgcatggctactactacaaacttgtatatccaaattctagggttgtgacagttttataaagtagaggacgatgatcgtctctaatcaacagttttccttttgttgattaggaaaagaaagtttaccctaaccggttttcttcggttttaaaaatgaaccgaaacccaatatatacggtatgttcctaaatttgaaagattaccggattggtttttatttgtctcgcaatgttcttactaggcttatatcgttcataaaatgaagtatggctcaataacaaattatcattgattcatgtatgggcttctgaatgagataattctaaaaaacatgcatgcttatgatttatgattaaggtaaaaaaaaagaaaaaattgattaaagtcatttctagctaatatttggatatcgctagcggtaagctcatttgaatcaagtttctttcgggattatttctaaatattcaaaaataaacagagttacctattgaaaacccaatttatttaccatttcattgcgattaatttaggatttttttacaatatgttttttaatcaatttgattacttatgcgttttcttaaacaagacttaattgtgcttataatatgactttgaaacatatacgaatctcaatttgttgaaaattaagagttcatacttagaagacgatatgttgttagtaaataagtttgtataaagacatttgattgcaatgatacaagtcaaacacgatttcggtgagtttaactatactaatctaatttaacctattcattgtaatcacacacattcacattgtttgtcgattaatttatttagttatacacttatgtgattctaactaaaataatattgaccttaaaattcatttaagaaattgaaattggttacgtataaaacgtgttacgtgtgtcggtcgtgtcctctcaactaagaaagacgcgatacaacacattctcgatgtccacaagcaaagggtaacttcgtcatttccgcttctacctaaaagccccacttgatccaaaggatattttcgtcttttcacaccaaccaacccgcttaacgaactccaacacggaatagacccctcaaagaaaaaaaaaacagctagcggccgcaacttacaaaaacttaaccaaagtatttattatgtaataaaataagaaagatatttagctgttaaatgtttgtttacgtcttctccacggagaaaaagacaagaaactctgagtttttgatatttataaaaattgcaaaaccgacggtaacagaaacaaaaggcggttcttttttccatatgtgtaattatttccttaagtcatagctataaatatgaacttggacctcaagttcttttcctctctcaagtaacaaaatactaattcaaaagctttataaagtttcttttctcattcggttctaaagttcctatttttcaatg

SEQ ID NO: 32898 - DNA, 3000 bp, Unknown; identical to SEQ ID NO: 1508
  misc_feature (1)..( 3000): 2750-1469P.txt file - cDNA_ID_3062724; gDNA_ID_1620410; Annot_ID_156255

SEQ ID NO: 32899 - DNA, 3000 bp, Unknown; identical to SEQ ID NO: 1517
  misc_feature (1)..( 3000): 2750-1469P.txt file - cDNA_ID_3062789; gDNA_ID_1620412; Annot_ID_156299

SEQ ID NO: 32900 - DNA, 3000 bp, Unknown; identical to SEQ ID NO: 1515
  misc_feature (1)..( 3000): 2750-1469P.txt file - cDNA_ID_3062797; gDNA_ID_1620412; Annot_ID_156296

SEQ ID NO: 32901 - DNA, 3003 bp, Unknown
  misc_feature (1)..( 3003): 2750-1469P.txt file - cDNA_ID_3062814; gDNA_ID_1620412; Annot_ID_156285
gtgttgtcattagcattcttaacataagagtgtctttgtgttttgttttctctccagatgctctcatccaaagacataaactttgtgggttatacttacaagaacgttgaaatcgtaaaccatgatcaattaccagggataggtagatctcacttacacaacaaatttgacttgtaagtaaacatattccatgtttgctctgttgtaatttgtgattgtgtttactgttgcagctgagctgaagaagaagagcacaaagccaaagcggccatcaattaaatccctctttggtacttatctaaaagacatttatcacaatctatttcaactcattgtctgatattagcatatggttttagcactaacaagaattgttataaaaacatttggcagaggatgaatcagccagtagcaccacaagccaccaaggaagctttatgaaactcttgccaacacaaatcgaagttccagagaaagaagacaaatcaagctcatctagtgaaaccctatcatcttccaccacacgtttcgacaatgccacatcctaaaccagactctttgctacactttggtcccggttaacacaccaaaacacggtttgaggtggcggatttacggttggagatagtacagtttccattgtggcggtgaaggctattgtgtgagaagattaaggatttgttcaacagtttctacataggataatatttggttgttcaaaaggtttagtttgaagcaaaaggaagtaaatagtcattttcagaatgtggttttatttatttgtttgattgttttgtttgggtaaaaatcaaatttggtttgtttaccacacagttctaaagcggacaatgggaaaaatgtcaaaaaaatcatgaactttcaaatttgggacgaaaaaaacatgaacttccaaaatgccattaaaatcgtaaacttttgtttgacttttgataaatagtcaagttttgttgactttgccattttgaacatgtcgttaagttttcgttaacaaaaagataacgtgattaattttctgttaattttttctgttaaaagcgaaacgacgtcgttttgaaattaaagaaaaaaacaaaaaacaaacaccaagtagagttgaactggtgaccttttaggtgctattgaaggactaaaaccattgagccacgttaactttttagaagtatagtaaacatatacatatatatatatatatacgtaactaattaaaaataaccaactaaaataaatcaataatatagaaaattacctaaaatttacacaatccttctcatatgaatataggattaatctatacatgcacatagaatttcattcaacttcactttatatataattttatttataataaaacatatattttataaattaatttgataaatatttaataaaagaaaaatataagatcattattccgtcttcaaatcaatttttttattcataattagatggaaagtatataaaaagttattttttggtaatatatttataggtgttatatttcacaagtttgatttttatataatttaagagaatttttttttaattcaatacgtttaataaaaaaatttacattgttatttgagaatatatattaatggtaggtgtatttaatatttttacatgtttagttattgtttttatagttcggtttttatttggtaggtgcatttttataatttacatcatttttaatatttttatttgccattttggttaatatggaggatttggaagagccggaatgatttagtcttcaacaaaaaagcaatcgctgtcgctgatgtgataaaccaagcgataatggacacgaaagaatggctggatgttaagcataaaaatgatgacaacgtcaaagggggccaaaccaagtcctcaagaacggacaaatggcaaaaaccaggagcagaatgggtcaaatgcaattatgatgtctctaaccatgcgggaagacaagactcaggcctcagatggattattcgaaactcacaaggaacctgtttggactgcggctgcgggaaatttcagggtcgacaaacaataaaggaagctgaatgcactgccctcatatgggcaatacaatgcgcttgggatttgggatataggagagtagaatttgaaggcgacaacatcacagttaatcgccttattcgaaacaaagaaactaatccacgacttcgatactatttggaattcattcaacaatggagcaaagctttcaccactgtgaagttcacatttcgacaccgggaacaaaacgtttgtgttgatgttctggcgaaaaaagcagtagctaatcatataaatcatactctatatcatttttgtcctagatttctaatgtcgtttgtaaacaaagatgctgaacacgtgaattaataaagttattggaaggaaaaaaaaaaaaaatagttcggtttttaattagttttgcgtatatatatatatatcagttttcattaatatcgaaatgttatcatagcatattggttgagcgcttgtgataatttaggaggttcacgagttcaatccattcttggcgcaaattttaatatatttttattttgaaacgacgtcgtttcgcttctaacggaaaatgttaacgaaaagttaactccgttattttgttgttaacggaaatttaacgacatgcccaaaatagtaaagtcaacgaaacttaatcattttatcaaaagtcagacgaaattttataattttagcggcatttcggaagttcacgttttttttatcccaaatttaaaagttaatgatttggtttgattgaaatgtccggttctggtttggttttcttttgtaccggttctcataataatagccacgtattaaaaatttattagtaatggatttgggccagacccattctcaaagcccaatcaatttctcagtgaaacatatataaacctaattaaagtgaagcagaagttgtattcttcttcttgcgaactcgctgaagtctgaaagatg

SEQ ID NO: 32902 - DNA, 3000 bp, Unknown; identical to SEQ ID NO: 1527
  misc_feature (1)..( 3000): 2750-1469P.txt file - cDNA_ID_3062820; gDNA_ID_1620413; Annot_ID_156321

SEQ ID NO: 32903 - DNA, 3000 bp, Unknown; identical to SEQ ID NO: 1521
  misc_feature (1)..( 3000): 2750-1469P.txt file - cDNA_ID_3062842; gDNA_ID_1620413; Annot_ID_156333

SEQ ID NO: 32904 - DNA, 3000 bp, Unknown
  misc_feature (1)..( 3000): 2750-1469P.txt file - cDNA_ID_3062896; gDNA_ID_1620414; Annot_ID_156370
aacaaatcctttgccgagtaagcggatgtcgcggctcctcaggtgcatacgacgacgccgatcaacacgtgtccaataactagatgacacgtgggttatttgccctcactttggttttggttctcatccggttcatcttattataatggtttggttttgaaaatttcggataaagtttggttcaattaggaactggtttgaaaacacaagcataacctcaatctcatacttcgattagtaacacagtataatgacataaattgcaaaaaaaaatttgaaaaatgaaaaatatatactaaaatacacagttgtatattcacttatttgcataatattttttaatatatatatttttagacaaaaatacaaattctacatttttgcgtcttgataaatattatgcagatttttttttagttggttaaattctttcataatcaaataagaaaacgttattccagtattatgtgttagcaatagaaacaaaatgagaccaggattggttttgttaacatcagctcggttttgttcggttaaaattaattacgaaaagaataagaaggttccaaagtttgcggaccatcatgtcggcacgatatgaccaatgacgaccatatggatgagtaatagccgttggattaccaagaaagttggaatcatgtgctctttgttataactttgctcttgagttttcttgatataaaagcgaacgacgactttttgtcaaagtgtccatacacgccagagaaggcagagaattaaaggcattataaaaaccaagtgtcgttaggtttaagattgtataatgattagtttactcttaatcatgagttgacgtttgaatagaatctaaacccaaatcactaaacgtaatccgatattcaatatgaagttatgaaccaaacagttcttgaatactaacagaaacaaacgaaacttacatcaaattaaaattcgtaaaatctaacctgatgaacattgatctgcttccctactaatttttttctttctataatccttatttgaatattactagtattatgaggatatggatttctatatttattagtacattgttttgattttaaccagaaacatcaaaataaccaaaccatatgaaatcagacaagatgaatttcagtactaattctatcaaaactatttataacccaaacgtaataagcaaatatcgaaccctagtgcttgttgttatcataacaaatttagatgaattggaaaagatacaaaaggtcgaatcatattcgtagaaaatgaccaagcatccttggtgtttatgggccacatcccacatgttaaaaaaagatttgtgtttcgagtggcttaaactctcaaccaaacatttgaatatattgcttaaagttatttgacttaataaactatatatgtcaatgaatcattttattatatgtattgaggttctccacccacacaatctaggctttcagattttaactactccgagaaaaaacgaacaaacgttttctatttcgttaattacatcatcgtcgagtcgccaatgataacatgtcactacaaaagaatttaaaatctctctttttatcaagtgaaaatgaaaccttactttaattgaatataggtgtcgttttttacgtggatgtgattagagctactttatcaagacacgcattagctcgtcatgtaaaacttctaaactaaatgtgtttttgtcgttttgactacacgttaaagtctgccgaaaaatactaaactatatatagtaaaagcaaatgacacgtcgtcggtgaaattgatgtcaaacaaaaatgtagtcacgtcgaaataaatatttatctattcgtattcgttttggttcttaatagagtatcatattggatgtcatactaattttatctattcatattgtgtgtatttggatattcgaattgtgccaattgctggagataagtcttagtggcccaaaattgtttcgttttttgttcattctgtaattgcattctctttcgggcatatataaaattcccacaaactcaatagtactcatagtctcatacgtacatgcaaacttctatatatttactcgcaatgtaatcagattcttgtaataagtctcctttggacattcgtcttcttttctcctattcgacttttttttccccgcatatatgtgcacgatattatctaatatactatgtagcatctctttagaacttggttgaaaaaatgacaccgtaacaaaattgtataatagtggattttcatcttgcgcatgttttattacttgctatgtaatcagattcttgtaagacctcctttggacgacattcatctttttttcttttcgaagaacatagttttttctttctattttcctttcgacatatccaataaatagcatttttaaaagcttgtttacaaaatgacaccatgataaaattgttaaaaattatgttaattttgcccatattttgatcaaacaacagaaaatttgggaatattttttttgtcgaccacttttatattattagaaaattttgaattaacacaaatagatttaaaatattattaatgtccatacttttttgcatggtggtaaaacaccgtaaaatgttatttgaaaaaaaaacaaacgaaatcaacatcattttatttttataattgattaaaattccaaaaatactatttattttatttttggggaaaaattgtagtttcttgggtgggcttccacaaaattctattatgagactggactggacccataaacagaggcaaaccttacttttgttttctttgcccatctcacataatacactctaaaatcaatttatttcattaacattaaattgattttagagtgtattatgtgaaataaagtaattgaatattaaattaaattttcccagaaaaagcgttgacagttttatcttcaaaaacatccacacactgagaaacagcagaagaaaggcttgagagccttcttctccactattttcaatg

SEQ ID NO: 32905 - DNA, 3000 bp, Unknown
  misc_feature (1)..( 3000): 2750-1469P.txt file - cDNA_ID_3062903; gDNA_ID_1620414; Annot_ID_156365
tatgttcaatttaatgcattggttgataaagttgaataaactactgtaacagccgttggttcaaaataattttgttcacattatagtatttaatgtagtgttgactagagttggggtagtaactggtaagtaccactagctagctagttatgaagtgaacgtgttacaattctctcgtatattagatttttattttcttacatcgtccttccttaaactaaatgatatgtagtagtatcatttagatctctatatgaaggaaatggaactaaaactgttaacacggaaattgtgtgaatacaaaccactagacaataactttcgaatgtctcgtagtcgtaggcatatatatacatgatcgaatattaatgtgtcctcgtatgctaagtagatattacgaggccctatggagaagaaaaagagaataatactactctcttttgtacgaactttacttttcttttcctatattttttttaaaaatatgtaattcacttcttccatgcattcctttgaataattatttatgacttttttacaacatttatgaggtactgcatctgagaattacctatttttaacattggattcaactgatggtgttaagtgtgagaaagcaagatcaaccatatgactatctatctataaccaagatttactaattacgtcctaaccttctcagcttgaccatgcctatcttcatagctagacctctcggtggatcctttctaatgattgaaagtatgatcttacccaagttcagttcatgtttgatcaattgactcttttaagtctacccaatttttgtcttcgcctcttgggaatattggaccttcacatctaaattatagttcactttatgccaaacgatacgcaccaagcaactatgatttggtataaaatggcactttcagttattttcatacgatacttttttacacaccagttattgaagaataaaacatgtcattttcattttctatcgtatttatattgatattagcattgtgagagatttgaattcaacatatagtaaattctgtaagaatgtatggaccactattctacttatttttcacagtgtaatatttatttagcttcaacgaatttgacaaaatatattatcaacttgctcggtttatttattcatatcttatcacaaagtacttttgtcattcaatatccctacatgtcccagttccgtctggatatatgtattttagcagccatcaatgtatttttgtaaactaaaaactaaaaaggagtctaattttttttttcctaaaccattttccatcgatcttataatattcgttattttggtcagtctcccaaattatttagtcttattatttatttattaaaaaaatattagactatttgataatggaaggccaaactaaaaaagttgtaagatattatatagttaggtctacatttttaaaaaattcatcgatcaatccatttcgcagttctcaaagactcaaatgtcatacagttgtctatagtcaacattcttaatattctagtggataataatgcatccccaactatatatgtgtttggtttgagatatataaagcataaaaatggaatatcagaacccaaacataaagtgacaaatgacaagtggaaggctaagaacttggtgctcttttttatttgtttcaaacaaatttagcgtttcgaatggtaacaacatgcatgatcaacatctctgtttctttttcttttctggtgaataaatgataaaacatggtggatgcggttgagaagaaacgcaattttgaagtcagtgtattgttcacaaccttgcttgtttgctgattctcacgtggtcttttagatctgcgtttgtctaacgcgctctttctcggaaagccacgtgcattttgattcccatgccaaaaccactttctgatcatcattgatggcgcttttgtattcgatattttaatccatttggtaagtttaaaagataaacattcgatgtatgtagaaagagaagaaataaaaatatcaaatggatgaaaaatattgaacaccaaacgcctttttttattctaggccacctgcttggctgcttcttgtgtaagtgcacgtatttttttcatggttctattgttattgaaatacaataaaagtcatcgagtctctcatcctcttaattttgtttgtctaaatttctacgatgatatgtggtcacaaaaaatttcatactccgttacgagaatttctttaactagcggaaaatgtttaactgtacaagattgacgaaaaaaaagtttatctccatatgaaattcctcacgatcaaagtaaaagaagttgaataatccatagagatatagtcatgacgaggagaacattattttacgttttggatttgatttgtgatatattaatttagtttgaagttgacgtgttagatgcatgctaaggtcaaatctcttacatatatcattcaatgactctttcacttccattatagtacgaaaaagagtgcacgggagatgaaacaacgaaacgtgtaaggataactcgataaacactcttgcacttgtagtagctatagtatgtcttgcatcttatctagaaataaataattgtgtagtgagtattgaataatagatatataaaggaattaaggaaatactacagagactatttttcaggagtcgactttttccaaatgctacttttgtaacaaaaacagaattcacaaaatcttataatattagaaattgggctttcgaagggctttaaatttcagatccattggcgaaacaccacacaaggcctattaagccagttccaaaacaattaccaatatgcacacaattctcaacgatattacgataatgccaccaactgttcttttcctgtaatttccagtttagagctttcttcttcctttccctatcctcaaccccaaacgaacgctcttcaagaattagggtttcgttttgaatcttctctgattcccaaatccaaagatatg

SEQ ID NO: 32906 - DNA, 3000 bp, Unknown; identical to SEQ ID NO: 1535
  misc_feature (1)..( 3000): 2750-1469P.txt file - cDNA_ID_3062907; gDNA_ID_1620414; Annot_ID_156364

SEQ ID NO: 32907 - DNA, 3000 bp, Unknown; identical to SEQ ID NO: 1531
  misc_feature (1)..( 3000): 2750-1469P.txt file - cDNA_ID_3062919; gDNA_ID_1620414; Annot_ID_156358

SEQ ID NO: 32908 - DNA, 3000 bp, Unknown; identical to SEQ ID NO: 1546
  misc_feature (1)..( 3000): 2750-1469P.txt file - cDNA_ID_3062943; gDNA_ID_1620415; Annot_ID_156407

SEQ ID NO: 32909 - DNA, 3003 bp, Unknown
  misc_feature (1)..( 3003): 2750-1469P.txt file - cDNA_ID_3062962; gDNA_ID_1620415; Annot_ID_156392
catgtaattgggaaagggaatcggagacaactaatgattgaagaaaatggatacgttgaacttgctggaagtaaccaattgtcaaagctttcattaccactagcacgggtctgtctctcaaatggtatatatctgctcaatgagtctctctcgaatgattctaaatcagatcttggatcaatattatccgtggggatgaatgagaccaaagaaggatcatcctctgatcatgaggaaggtaacacgaacacagactcgaaagaggcaaaaggaggaatgagccaagaaataattcaaaactcactctctgcttttgaggatattcgtaatagagaaaagcagttgatgagacaggctctctttgccaatatggcttatgtagaattggagttggcgaatcctatcaaagccttgtcagctgctacttcactcttgcaacttgcagattgttcgaagatttatgttttcctaggccatatctatgcagcggaggccctctgcttgctcaatcgacccattgaagctggtgcacatttatccgcctatctactcggacaggatgattttaaactgccatatgcgcaagaagactttgaccagtggtggaagcacacaagttctgattgtgaagagacattggatccctccacgggaaatacccgggattcagttttccttaagccagaagaagctcgtggagcacttttcgcagaccttgccgcgctgcttgccacacaaggacatcacgaccaagcaaaatctttgataacgcacgcgttaactctcttaccgaacaatgtacaagctacagttacagcagtctacattgatctcatgttgggtaggtcacaagacgcccttgctcggttaaaacagtgtacccatgtgagctttgttccagggagattggaagtgagagcctcatagaagatttgtactctaaattggtatggtttgttcttttttgaaattcaagctttagaaattagttggttcgataaatatcagagaataaacttttgtacaagtttttttttgtttttaatttcttgtattagtactgtgagatgatatttgcactcgtgacttagatttgggtcttgagggattagtcgatttcttgttcaggaacaacataagattgttagaacaaacaccagtttttgtacttttttttaaatcttgtttaagacagacccccttattctatggctttagtagatttgtttatttttgaacaagaaagtgtggcgataaacaggcaatgaccaacgcttagcgtttagaacacttagttggggtttacgcgattttaggtggtttattcgtttacgatattatagataaaaattatgttaaactatatattagaaaatattaaatcgaattctaaataaaaatttgacaaaaaatttctttaatttatatcaaacaatatatgaatgtttataaccatgtgtgtagaagtaaaacttataaatttaaacaatgtagttagaaataagaaaaatatattaaaataaaatttatgttattttaggcagtcgatacggttttagccgtcagctgaacgcctaacgtatagtcggaatctaaacgaccgcctagaccactttttaaaacactgcttttgaatctttcaaacttcatccgaaagcaaaactaaagcttctagaacatgtgaaagcttgtcaagaaaccctagttttgaactcataaaacctagttcagaagagttataccgcagcattcttttttttttgtaatacaaagtctctctttttctcctttctaatacaagatgcaattaaacaaaatgttcctctagttataataatgtagaaaaatacgtgtacgctagaaaatttctcgaccaacgtaaaagagggtcctagaacggtcaacttcgacacgtggctcgtccttatgtctttctctttgtgtacagaagcaatgtaaatgcaagcaagcgtgtaagaactaattgagtcattgacacatgagagtgaaaaaggcaatcaaaagtcatcaacacatttctcttttaaatttggtatgcttgtttcgtggaagcatgtttggtgagggtagaacaactttggttttggttactccaatgatccatgcagcgaaggtgttcgatgaaatgcctagaagaggctttggggaaattacttcacctgaagactgaagtctgttagctataagggtttagtgattttgtcttgatgagaattccatttaacgatgataaataatgatgcgacctacaaagaatctttgccgccttaagttaccattgtttcttgtattagcgttgttgctgatgattggaacgggtaaaagatatacatgcatctaaagttgttaaggataaacagtgacgtggtggtcttgtcttttgataatcttgttactctttcctcactcaatggctacctcttgcgactgaaacggtaaacctgttatcactctggctttgtgtgtattcatcagtatctggtcaggttagaacaaatatattgcttattaaccgatcaatctgttgctgtcctgccctgcttgtcgatagtagacagtttctgtggtttagtaatactagagaacttattacatgagttaaggtactgtgtgtttactctcgaatttgcttatgttttatatcaagttacatttttgcaaacaacaggtttcaactatgtctcctgtctttatcaaaaaaaaaactatgtctcctgtacaagtggtagacaagttgttacaattattcttcatgtgtcgcatctaatttaataatccgcactataaaaagtatgatttatttaactaaaaggaatcactagagtctagaggtggtaatcgatcagtaatcataatatatattattgtttagaaatgtgagaaccctcagccatacggttgagttggagtaaacttttagctgcttctagatctaattttccgagctgatttatcgtaggtgattgtcgacgagtagttatg

SEQ ID NO: 32910 - DNA, 3003 bp, Unknown
  misc_feature (1)..( 3003): 2750-1469P.txt file - cDNA_ID_3063002; gDNA_ID_1620416; Annot_ID_156432
tttttttggtaatcaatcgcaaactaaacacttaatgattcgatagttaccactaattagcagtaatttattgtaacaataagaacggcagggtattatcaaattggtttttgagactttgtggttataagtggcttgacttatggatattctattcagccacacgaaaaaaggttacaacttgcaaatctcagattttgatagagtaactaataaaacagtagagagttgatgagacaaaaacatcttttccattgctcgaatgagcaagatatttgcattagatatctcttcggatataattatattctgttgataatactaaccagtataagttcttaggatttttttttaaagccttttctatagttattttctttaaaatcgtaatttatccagactaaaaacattttaggatgaagctatataactaaaccatagatgataaatttataatttgctaaaacgaaacagtgacatttctctatataaaatagtgtgctttatcgtggattttcttaaaaataacatattatcggacaatataacacgttatgttttgatcaaataaaaatcatgcgctaaaaatgaatcataatgtttacgaaaatgctacacaccagttttgcagtaaaaaacatggtggttaagttgtcttttaaagtttaaattgtcattatttgtgagttcacaatatatatttgtgcgtgtgaaagaatagataaacatatgattgtgaatgatgattagttgtcgtgatttttaaccacatgttagtagtattcaaagccttgaaccagaaaacggtcattgaacaaataaaattgttgtatatgagcttcctacttaattttctaacgcatagtggtattttaataatcccgtattaaagtaattggaagaattgaacaaatcagaactttttgttatttgggttgatagtggacacacctccgtatcaactccacataatgagttgtaccaaaaggtattttatactttcttttcgcttttgcacgtttagaaaaaataaactcgaaagcgaggttgcgaatcgaacacgtaccttgcgcgatttcatttcatttgttaaataaaatctaaattaagatgaaccaaaaaggcaataaaatgacagaaaagagagagttaaaaagtcaagatatactttgattggagtaatggtgagcacttaaggaagccagccaaagcttggtaagacgacgagtctctctatatggagaatgattgtcctacacgattttgtttcacggtaggactctcctataggcttgtttttatttcttttctttatattgtttcattattacaacaacccacaaaatcattcaaaaatgaaatgagatcatcctccaatcacccatgacccatatatgatatatgttaggttaaactattacaatattcaatcctataggcttgttttttttgtttttttcctttatggttttcgaacatttttaaggtatatctcgacacgagttctctactgttcccacaaaacatgtttactacataaatataataaagaggaattggcgaaaaagctagacaaaaaaaaatccattaatcctctcatagaaactagtttttgtgagattaaaaatgctcgatagatgatcatatgaaatcatagttggacgtatacacatgattacaattagagaaaatgttaagtgtaaaatgcatatgtagatatcttataacgaaagagtaagtactggttagaaaaatgggcatgcaggcccctacgcgttgtaccaacgttaaattaaagccacatttcaccatacgacaacctccggtcctttagctctttcttgcttctttgctcttcgatctgactaattactttttgcatgttttttgttgtccaatgtccatcatcacgtgctaatagcctatcatatgaacattgtcttaatagcccattaaacgcttggtgaaccgtttttgtagtaaaattttgggcatctctgccaacattttcgattatatttcttagagtgtttaaaaaaaaaaaaaatcccatcttagatatatggactaaacattgataatccatttcttcacattttatgatgaatatgtttgaaccaatacaatgaatatataatttagtttttttttatttttaggtttttttttggtaaaaagtaaaatttcataccatttttgaaaattttgacaaaaattacaaaagaaaacaaaaaaaaatgagaaacctaaagctacataaaccaccaaaattactacataagcataaaacagaaaaacacacactagcaaacacggtaaaagacttttactaaaagtcatgaataaacaccgattctaaacagtaaagatcgaacatttataggtagaaaatttgattgtcaagcttcattcatcaacttttcatcttcacatgcttccacgtaaacctcaacaagcttctcaagtagctaatttgattaagaaccattgtgttattcccaagaaccgcattataaccaaataagataaattttctggttttgctattcgtaaacttctccaccatttcttccacatccaatatctaaatcgcatttacaagtgtttaaaggaatcgaaatttatgtttgagaaactctcggataactttttcgatgatcggtaaatggcggcagttgtatcatgaactagttggtgtatatgttaatcatatgcttagaatcgtgtaattgataatgcaatgagatacgattgttcttagatctatatgcaaaataaaatttgagaatcgaccaaatgattggatattatacttgtcatgtttggtgattcatacatccaaatgtcaaaaacgtaaaagttccattgtggccattaacgtgcgttctcgccatcctcgtatatcgctaatgaaatctaaaccaataaaaaaacttcaatcttttttttcttcacaattatcgatccaaatcaagattttcttgatttgaattccttgcgatg

SEQ ID NO: 32911 - DNA, 3000 bp, Unknown
  misc_feature (1)..( 3000): 2750-1469P.txt file - cDNA_ID_3063006; gDNA_ID_1620416; Annot_ID_156426
ctttaattgaatgtacaaagttgatgtaaaagctttggctccatcgttcatggagtctagtacattgttttgggttttaaaagttttctgtgttaaagctcgtcgtctaattgatgttgtgtttggttttagttgaaaggtttagacgtttagtaaaaaagttactcaaattcttgaaatctccttggccttgctgattataaaatcaaatattcatttataaaattatgcgaaagggtctaattatttttgaaaccgaatcgaatgaagacaactccattttgattgattttttttttgttgtattaaagaataaaaaactcgactggttcaacaagactggattgtctttaaactactggttcaatgtattttgggtacataatgaaaaaaatacacaatccgccttggccacgtatccatctttggcttagttgatgatgataatacttttgttttttggtaaggctgatgatgataatagttagaagaagttcatagaataatccaatggatttccaataataaaacacagaaataaatataatccaaacaattgccaaaaataatgaataagaaaagggacccacaccaaaagctaaaagcgcgtgggtcagattacaaaaagcgaaaccccaaaccgtggctagacagcggacgaacccgtcccttcaaacgtggctcacctttcgaaccacagagagcagtttacactccaactgtcaaaaacgtgttcccatgacgtcatcctcaacgtatctttatcactttttaaaactaaagactgttttgtctttttctaaatcgtcccctttctccgaacaccatacttaaattcaataaaataataaatatcaaaactgaaccatcgaatcggaaccagccacagtacacaatacacttagacgaagtaaagtgattcagaaggacacgtgtaagtcacataccgtgggacacttgtcgttaccagatcctccgtgtttctcacttttcttataaaataaaaacacaacacttcttcactttctgtaataaaaatatctccaaaagttccaacacctgaaaacataaaaagatagaaagagaaataaaacatcttatccaaagaaaaaatgaatccattttactctacattcccagactcgtttctctcaatctccgatcatagatctccggtttcagacagtagtgagtgttcaccaaagttagcttcaagttgtccaaagaaacgagctgggaggaagaagtttcgtgagacacgtcatccgatttacagaggagttcgtcagaggaattctggtaaatgggtttgtgaagttagagagcctaataagaaatctaggatttggttaggtacttttccgacggttgaaatggctgctcgtgctcatgatgttgctgctttagctcttcgtggtcgctctgcttgtctcaatttcgctgattctgcttggcggcttcgtattcctgagactacttgtcctaaggagattcagaaagctgcgtctgaagctgcaatggcgtttcagaatgagactacgacggagggatctaaaactgcggcggaggcagaggaggcggcaggggagggggtgagggagggggagaggagggcggaggagcagaatggtggtgtgttttatatggatgatgaggcgcttttggggatgcccaacttttttgagaatatggcggaggggatgcttttgccgccgccggaagttggctggaatcataacgactttgacggagtgggtgacgtgtcactctggagttttgacgagtaattttttggctctttttctggataataagttagtttagggattatttggacatctaggattggtccggagttccgtacctgtattttttgtttggtaccaaatctttagtaataaatcgtctatcatttattcttgttagaatgttctttgtttgtttttggtaaacagatttgatcaaattagagctatagaatttgaaaattttgttttgttgtatctgaaactgtaaatagatttctctttgtttcgttgatgtattgacaatctttaccaaatttccagagcttataaaagcttgaaacctctgcttttccaaatataatcctgattcacattatcatatattccttgtagactcagcaaaaaaaattaaaactataaaatctcttacacattagtccaaacacgtgaatgagtaatagaggtccttgaccattagactgatatagcttctatattgtggttcttaaaaaaggtagaatatttatatgtggcctcaagcttctcatgagtcacgccttatggtaatcatctatcttttttcttctaagcaaacactgaacacttggaaatcttttcactagaaaaacatgtccctggccctcactaactttacatgtccttttctttcagttatagaagtgtggggtttcttggctcgctagatttaaaaacccttcattatgtatagggttgtgcttgtgcctagaacccttcattccaaggcaaaagcataaacctacaatccggtctaaatcagaaccgatttaaaccgagagaaaacactaaagtaattttgtaaaatagagccatcatagggataaaatagtaactaaacaatagacgtcaagctgacgcgactggtgttcactttctctttctcttctactacttctgtcctctccacgaagatccaaagcttataaacacatacaaataaatccactccaaagtttttctcttttttctctgcattattatcacttcaccacattcacaacaatcccaaatttttctttctcatactttcatattttgattactacttctcagagattcttttggtaattagggtttcctccaattttgcagcttgatttatctatataccaatcggaaaaatccttacttttaagttcggtcttgtgttaatttgcgtctgttgttattgtaatctagagaaagagagtgagaggcaataaaaaaagctatg

SEQ ID NO: 32912 - DNA, 3000 bp, Unknown; identical to SEQ ID NO: 1549
  misc_feature (1)..( 3000): 2750-1469P.txt file - cDNA_ID_3063012; gDNA_ID_1620416; Annot_ID_156423

SEQ ID NO: 32913 - DNA, 2680 bp, Unknown
  misc_feature (1)..( 2680): 2750-1469P.txt file - cDNA_ID_3063016; gDNA_ID_1620416; Annot_ID_156422
gatctggtaagtggaagggtcgtagttgagcaactgagagtaagagtacaaaccaattcctatgtaatcaagacatgtgtaatgtgataaacccaagtgaaagtagtggtcggatctaagacggtcgatcttgtaagtgtcggagtagttggggtaagcttggatgaaatcggagaaagattcttgatgagaaggaagagaatttgggtcggtgaattcggtgtccgggaagatggtggagacggtggtttgggcgaaattacggcggagagtagcggaagtgacggtgggggttgaatgtggtgggtgttcggagctggtggtaccgtgaaatggtgacgatgagaagcagccgtgaaggcagtttggtggtgaagaatctccgggaaagggttggtgcatttttcttctttttttgggtgcaaaagatttatgactcttgtaattgtcaagtcattagcctatcttgtgttaaataaatacgctaaagtctaaagtttataaaagtagtgcacctaagacaaaagcttgtttctcttttcttttacactaaaaagaaaagcagaagcaaattaggcgggaataatgatgattatcaagaaaatactgaaaagtgttcactttgtcttgtttccgcaagtgtttttttttagaacgcgtagagtttagtggtcaagaaagtgttttctttttcacttttgtttccttagctatttacaatgcttacatgctaagatataccactatgcccaattgagtaaacaaaaacagccaatagttatgttatatacatatctattttttttatgttatatatcttgttaatgaaaaaaaggcggaatataaaagattaaaaatataccaattcttttagttagtacaataaactctattttttgtatcaaatagctatcaaaagaacactgatctgtctgttggtatatcggcctcgctcctcaagcttctattatttaatttacaacgttatcagaaagtgtaaacatcacactgcgttatttgtttattttctcatgttatgttattactatcgtaaaaaggacaaagttctctggtcgatcgtggtggtggttaaaggagcacgcgaaccgttcgaggactataatgatgagcgggagttacttttacaatttagaaatcttgctctttgaagaatttagtttgatttctcaaaattagtcattaagaaatatagatcgcgactaaactagggaatcaaacgcatagaaatatcgaataatgggagaaataaaagaattggataatcctattacacacaccaaaaaagaataatagttttttttttggggactctacttaacctatatttgtttgaatcaaagccaagctaattataggattgtaattaaaatacacattcgagagaatagggtgctacaaccaattcttatgttgggggtcaaaagcattgtccgcaattatattatgcatattacctcacgcatttcaattttcatatgcctgtttgttatacaataggtatatggtgtgaggttgtgtccaggtttggaccaactaaaagatttcaattaaaactaaactagattctgatccgcacatacgtgcgaagtttcatattttaataaatgtattggaatacatttttagtgaaagatattgtagtgtataaattataatatgcatagaaaagtgtatagtgttatttatgatacaataactaaatttttttatttttttatattatttatatttcatttgtgttttgcatagtaaatcgaatgttagatttgtttcgatttgcggaataatatagagatatttggaaaatctgtgtatttttgttagtttgatgtatagacaaattagttgattttgtttgaaatttgatcaattagatgatataatgtaaactttagtccgcgacaccgttgttcgatttttttgtaactaaaaatttgaattttaagttatagttgttttgtaaatattgttttttttgtttagtgtttaagattgtataattgtgttaaaattgttaattctaagattacactcgtagattatcgtcccgttatgagtatcaacccaaactcgttctactagataacttcattccgtaaaattaaatattatttttgttattttaaatattaatattgttatgagtatctaatcgtttttttaaagcaaaattcaagatatttatttagttggagtagttattaatttactaaattacttatacaaaaaattcatttagttagttttaaactacccttacaatgttgtagttcacacaatgcttctcaattaatagtatagatagttataaagttttttctcatcatcttatttgagagaaatataaatacttgcgtgtaagaaaatttaaatgtattgatctgattctacctctattgtttttaatatactaatgtcaagaagatttttttttatttcgtcctcacatggcataacatgattagggaatttattatatgatgactttcaaactctatgcagatctgaatttgttatttcttaatatatattctgcgatcgacctttatatagtatttggctttgagtagtaacatcgcactgcttataatgactatcatctcttgtataactattcacatttttcgtaatattttattcgcaattttaatcttctatg

SEQ ID NO: 32914 - DNA, 3000 bp, Unknown; identical to SEQ ID NO: 1561
  misc_feature (1)..( 3000): 2750-1469P.txt file - cDNA_ID_3063028; gDNA_ID_1620417; Annot_ID_156482

SEQ ID NO: 32915 - DNA, 3003 bp, Unknown
  misc_feature (1)..( 3003): 2750-1469P.txt file - cDNA_ID_3063040; gDNA_ID_1620417; Annot_ID_156477
aacaaaagatgttattagccccacctgcaagacattcacagttctaagattactcatgatatgcttcaaacagagtaaaaaactatgccaactcaatagcttacaccaattccgagaagtgtgcttgttgagaagaggtacaaaaagttcccaaatacttgcagcgccgtccaaccggttaggctttcaaattgaatcttttgcacggcgttgaacagtacaactgaggttgcatcattcaccactccttctccaaagactaagctgtatagcaatggtgtttcatcttgatggagaatctgtaaaagtttaagatgcaatgtaagaaaaaacttttaatagaagaagtagtaagacaaagaatcttctaaatcaagaacctgtagagtgcaaacagtatcagttgatgagaaaatcgttcctatggctgaatcaaaacaagaaagcattcactctcgcaaactgataagtaataaccatctcaacaagaaatgaaaagaaacatagatcagtgaaaaatcttaccaagatagtctctagcactcaaccccttaaatcccaacttgggaaacagccaccaagtccctggttcacattataaaaacaacaaaaatagagatggtaacaactccgagataatcaactttaaatcatatagtcaagtcattcaaagattaatgaaatattttttaccaaacgagataatgacagtggagatgaaaactccaatcacaccaaaggacatgatggttaaaaagttgtgaaaaaacttctttttcttaacttggaacctgccacaacaaaccaaaaaatcttcagtcaatcaccatcatagtgtaatctaacccattaaccacaacatagtaaccaaaaccatagtaagcttacccagcattgaagattattggaggaagaaggtaaatgaagaagagttcttcatcaaacaccaaaatatgtgaactttttcctttactaataagtaagatcactgttcctgatgctgctccctacttgcaacaaaaccaatcaaaaatagtgataaaattgttctttaagagcagaaaagctcaaaactttagctaaaacaaaaaaaagaagaaattttgaagaaaattactactaaaatggcggtaatagattcattaacccatcgattctcttcaagcaagtggccgataactaaacatagacagagaatggcgatgaacactgagattggtatcacctgaggatgctcagctgctagtttattcgtcacaaactctgttaatccgatactcatttttcactcgataatgttttcgatttcgtcgattttgaaaacaccaatcgcaaacgaagaaggcacacagagaacgatagagagagagacgaggaaagagtcagagagtgaggagagatttgaactgcgatgaacaaggcggtggttacaggtggcgaggagacgaaagacacgtggcatgtttccaacgtcatcagactgagtaaacgtgaggctttttggaattgtactgcatcttgggcctttttagggcccaaaactaactcatcatgtatttttttcttaccggatttggggatttttttcttttttcttttttgggtctaactaactcgcgtaaattgttgttctttttccttaatttatttttacctcttgttctttattctgtttatataaaattatgaaacttgaaaactcaatatttattacaacgaattatttggtgaagactcgaaccaatcgaaataaaacactctactgagtaacggtcccggttgcaacagccaagacgctagaacgtgatcgtttcgtttggtcgtgttttgatgacgtaaaaagtgactcagcgacctatttcaccacgtgtaatctttaacgaccatgttctaggacctacctgacttttaatcgatcatccaccaccgccttctcaacattttttaagatactagtatcattatagctataatataaattaagaaacttgtaaatattataattaacgtgaaaacatagaattcggatatataatgtgtatattagataaataataaatctgctcatatgtgatatgtatatgcatatatcatatatgtaaatgtagccattattggaatgcgtattgggtaatgggtagtatcactagaatgatacaatttttcttatatacagagaagagaagaggaaacaagaaaaacaaatacgttccccgcagtagactttttatttgttggtaccgtagaggaaaacagatatacaccaattactataggagtgattaagggagaaattgcagggatataattgatatctaatagccgtttctacactaatcctaattataacaagaccaatgattgacacatgtatattgcaattgcatgcattatatagtttattattatgcttgcttatagtttagctggttttggaaacaagtaggtagtaataaagaaaaacaaagagagagtaggtcgtaataaatgaagaacgcataactataaaaaataaatacacaaatatatgtaaaacaattgtttggtttctctaggttggagacaaccaatcaaaaaattatattctaatttaaaataaaacttatttagttatcccatgaaaattaaactcttgtattctcaaaaaaaaattgagtcaaaattacactcccaatattttctgtctgcaataaagatatggagacacattgaaaaacattttagtttatttatgaaaaaccaaaaaaataaaattttagttgatgttttctttttaaagtggaaaaatgtgtcaaaaacaaaaagtcgaagttcttttgttttcccttttaaaataatcaacgatcatataaattcgaatcccacaaaccaaaaagctctctctctctctctctctctctctctctctgagtaaatctcagtttttggtcgaagttggtgaagtcgccgccgggacaactcaggttgttacagatgataaacatgcgagataatccaacaatg

SEQ ID NO: 32916 - DNA, 3000 bp, Unknown; identical to SEQ ID NO: 1557
  misc_feature (1)..( 3000): 2750-1469P.txt file - cDNA_ID_3063055; gDNA_ID_1620417; Annot_ID_156470

SEQ ID NO: 32917 - DNA, 3000 bp, Unknown
  misc_feature (1)..( 3000): 2750-1469P.txt file - cDNA_ID_3063078; gDNA_ID_1620418; Annot_ID_156504
ttcaatagccgcaaccgctgaaaacgcccaacaacatcctacaaaaacatcactcattagtgtcactatcataaatattttcatgtgtctaactacatatctcaataaaacggtatgaaacaaaatatatataacttaacatagaaaaatttaataaaaatatggttattcgattcggtcagttacactatggatttggtttggatcggtttgttcactatgaattaactcaaattgattgaatacataaatttcggttggttcaatttgatttcacttatatatatatgaataaagatttgagttataccgcagctgccttgattcttgataggggtcacagctcctttcttcctccagtcaacagaaaccggcaaagcaccagaagaaacgttttggtacctaaacggcgacattttagtttggctttggctagataatgccgagacacctttgaaaccagtgtacatggaacgaaattcgtcattggttaaatcagcaaactgatttaccgcaagtttgaaagttcttccggcaggaatgctatttaaatgttcaatgcgttcgacgttgtttttgaacacaacgtagcgattgttttcctccttcacatccgcgtagacacggccgtgtttagtcatccactcgatgtgcctcttttgcatgatgagttcattgtcgagtggacgagaaagagtgatggagaaacagaatgatgaaaatatagcgacgaagagaaagatttgcatatgttttaaagccattgttttaggaaagttaaatgacttttgctcttaatttgattacttcagaagggtactgagatggggttttatagtgaaaataaggttgatgtaattgctaatgttcacatgaagtgattgatccaaatcaaagcatttttgttttacaagtaatgactacattcattcatacataactaaatgatcgttgatgtttgatacgtagccattttagtcctacatcaacctgaaatcaagtcttgttcactcactttgctcggatttttagttaattttagtggtgggtttaattagttttgtaaacatttatatttgatgattaggaagtttgtatctagtaaaatttaatttctctacttgtgtactatagagattttcgaagttggatatgtgttgatgatgttttgcataaatatatttccttatttaattaattaaaattaatatttaagaaagcatttttaattgacatttcaaaaaaaaaaaatctatcatgagtataaattatttggaaaaaaatacttttacatgctgatacgtagttacgtacatgtttatttttcttgtagtacgtaggtacctttcatgcatcaaaatcactaatcacataaaaacaaggaatcttcttttgtcttttcactaatcaaatagtttgaattcaaagattctgtttattcacaagagaaccattcgtgcaagttaaaagcttaatcaaatcaaaaagaaaaatgattcgacaaaattaactaatttgatcaaatcatagtcattcacaacaagtgaacttcattacgctaagtattcttttgtagataaatcgatatgatttgctaaaagtttcctgttcaatgatgtttcccaccaatttcatctatctgaatctctatgaaagtttccctgtcattagaatacaatataaatgtagctctgtagttagggataatataagaaatattgaaataatcattagacgacaagagggatacgtacgaaattgcattttggacttaaatccaaatcatatttggctgaagtgataacgtctaaaatactaaattcaaaattgacaaataactgcatatttacaaatataatgattagaattattttattatagtgatatagttagttttcttacacaaagaagaagtaagacatattcttggatcttcacatggtatttaaataattgtaaaaacgttataaacttataattgtcaactggagtatataaataaataatatatgaattcttgtacagggaaaaatgcggtgtaaataccaaactttacgaagcgtggcaaaaatgttataaaaaaaaaatctataaaactttgttattgtgatgtgaaggaatcgccctagtcaacaaattaaatcacaatcacctcatgaacacaactgatttaactatatcaactttttcttgaaccaaaggtaccaagtacaaactaataacgatacgagttgtcagttgtgtaccaagtttttactggcaaataaatcgacttgctaccaaagtaccaactaatacgagtgtctctgttttgttaacttgacccaatctttcttcctcgtctctttgcaaaacgcttaagcccaaatataactaatatggcccaaaatattcttgagagatccaaacctataactcgaatacccggtaggacaaaacgcttcatgtcatattctgacactttttaacacttcatgatcggtatttaaatagcattttcatttcttgtataacaactgagttcatatatatacatcattgatcatatattgagtattgatctaactaattcataatcaactattcaactgttttcattaaaaaaaacaagtttcgtatataaaacttggaaatattgtttttaattaatttgaacgtacattgttatgggttcttctaatgttaagaaaacaccaaagagagaaaaaagggtggtcaaaaaacaaatttagaaatcaatgctataattaagctatgataaactaatcatttttttatcgaaacgtaatgaaactaattttaaattttaacaatcaacgattttacttttttgtctcagtctaaaaataacaatcgggtttctaatataaaacaaactcggtgctccacgagaatagttgtcctcttctcaaacatatctcaacttattgtttgaatataaaaagagatatcaaaaagaagagaagaccaaaaacaaaacaaaaatctctaataaaaatg

SEQ ID NO: 32918 - DNA, 3000 bp, Unknown
  misc_feature (1)..( 3000): 2750-1469P.txt file - cDNA_ID_3063107; gDNA_ID_1620418; Annot_ID_156513
aaagtcatatatatatatatatatatatatatatatatatatataaattactgtcaccgtctttactaataaagtgaaagtaaaccaccgaacgacacttttgccaaagaacagaattttataaaatgttaaaacatcaagcaatcaaacattctctgttctaaattgtatttattttgtgaggattgtatccattattccatatccaacttatctactatcatttaagtattaggtttaagtgtcgtgttgcggtggagtaattaacgcagccatttttggccatgatgggaataaagatacataaataatgacttaaactggtaacaagctcttttatactctcggtcttaacattcacaattaacagacttatacatcaaatagttatacatatttaagatccttgccaaatgtttattggatagagaccaagaagtaatacgtcggtgtctaacatgtacactagaggctaatttgttaataggtgtccaacacatcatttatggataatttgttaaatatgaatttcagaactcagaagtcagatcattcttccttttaagtcaagttggtagatatatatgtaaccattttgagagagttaattaagtttatgaatttttttattgcaaaaaaaaaaacacgtaatcagagtgctatttatttgaataacatgccgttgtacgcctagtttgttgtttgggactattttatatacaaacatttaatttataaaaacatagtgttgggcaaaaagaaaagaaatatcattcttttatatttcttgagaaaataaaaatgcttttttaataagaatgttccataaacatttacctactttttgttaaaggatttaatcattcaaacctaatttattcaatgttgatggtcatttagctaagttgtcctctctatggtgttgtaatttttaccttaatagaaacgaaatattgttcattataatctacaaacaatagattttcaaaaaaagattatagttgataaataatttctatcattcattttttatacaattgtttcatctgtcttccttcaatattaattactcctcttagattttttcaagtttttttctgtttaatttattatatattatattacagccataaactttttagccttatctttttctctcttttcttagctgatatctcatcgaattttttgtttttttaatctttaagtgtttaatcatgtaaatatttctaacgaaactttcatcagatagctaattcatcaggtaagtaatatataataatgagtgattaattaaaccaaaatgttggggaaaaacacataaaaaaggatgttgacatgggctttgttattacttattaagtgacatgaaagtttccaaacagttttaggtcacctaatgtgttggaacataacagttagagaatggtcatatatccttgccggagtattaattagggtcactaacaattagcattgccctttttcaactattaatgtgtgtctactctatacatttacacacacaaggtcgggtcagtttatttaatgcagtttcggttcaaaattggataccatttcttactttttaatacttgaggaaaaacaaaatgcgacagatttaaaaataaaaaatttaaaaaataataccaggacaatagttatctaaatgtacctatcaaacagtatagttttattttttcgatttaatccagtacccaaatctctgtattattctagaatccagttcattatgtattaatatagaattcatgtttccattattatgataaatcccaacctttagtatacaattctatgaatcaagaattaaaattttcaagaatcatggcatattataaccaaaaaaaagatacgtaagaaaatgtagctgacattgattgctatataactttaaatatggagagtagaatgattcgtaagattaggtggttgtgtgacctatatttattagacacatcacccacttttctatatctcttgctctctcacgatcgactgttacttactcgtataattgtaattcactaccaaattgaattattgtggataaggaaacagatctactctcttttttattttattcattgtaaatcagtagaataataatctttatcaaaataaagaaaatcaatagaagaacactgactaagaaaaattatgggttcgagttcacttaaaaaaaaaaaaaaaaatccaaaataagttattttcttggtttttatatattttctaataattttctttgaatttaatacatattttcacttatatatttgaaaagaaaaatacaaccaagctacactaaatcatcttattcatgattgagctattggtttggttcggtttcaaaccaatctaaatcatttgggttaaagataggttaatcaaataatttgaacatatattctcctaaccgtttgggtcgaagataggttaatcactcatatttgaattaaccctctttcaaaaaaaaaaaaaggttaatcacatggtttgtacatataattttagttcagtttgaatctctttgggttcaattggttcaaatcggtcaagatgcacactcttaccatcaattttaccgtcccggtttttttttgaaactaatgttgagtaaacgacaagtcaaaaaatatttttgtaaatttttttttggtgaggaaaaatatttttgtaaatgaatagaataattaaaattttacaggaattaatttgtagaaaaaacttttattgaaaatgaaattaaattcttaactatagtaatttagtcaaatgaatttacaatatgccaatttaaaatgacaatgggctattgttgtccatatgatctactaaatatttgttgtccactctaacaaatctgattcttctttccttgtaaataaagatatggatctgttactaaaacaaagtcgctttattcagatctgaagaagaagaagaagaagaaacatagttgaagtctctgttaatatg

SEQ ID NO: 32919 - DNA, 3003 bp, Unknown
  misc_feature (1)..( 3003): 2750-1469P.txt file - cDNA_ID_3063117; gDNA_ID_1620418; Annot_ID_156507
aatttcgtacgtatccctcttgtcgtctaatgattatttcaatatttcttatattatccctaactacagagctacatttatattgtattctaatgacagggaaactttcatagagattcagatagatgaaattggtgggaaacatcattgaacaggaaacttttagcaaatcatatcgatttatctacaaaagaatacttagcgtaatgaagttcacttgttgtgaatgactatgatttgatcaaattagttaattttgtcgaatcatttttctttttgatttgattaagcttttaacttgcacgaatggttctcttgtgaataaacagaatctttgaattcaaactatttgattagtgaaaagacaaaagaagattccttgtttttatgtgattagtgattttgatgcatgaaaggtacctacgtactacaagaaaaataaacatgtacgtaactacgtatcagcatgtaaaagtatttttttccaaataatttatactcatgatagattttttttttttgaaatgtcaattaaaaatgctttcttaaatattaattttaattaattaaataaggaaatatatttatgcaaaacatcatcaacacatatccaacttcgaaaatctctatagtacacaagtagagaaattaaattttactagatacaaacttcctaatcatcaaatataaatgtttacaaaactaattaaacccaccactaaaattaactaaaaatccgagcaaagtgagtgaacaagacttgatttcaggttgatgtaggactaaaatggctacgtatcaaacatcaacgatcatttagttatgtatgaatgaatgtagtcattacttgtaaaacaaaaatgctttgatttggatcaatcacttcatgtgaacattagcaattacatcaaccttattttcactataaaaccccatctcagtacccttctgaagtaatcaaattaagagcaaaagtcatttaactttcctaaaacaatggctttaaaacatatgcaaatctttctcttcgtcgctatattttcatcattctgtttctccatcactctttctcgtccactcgacaatgaactcatcatgcaaaagaggcacatcgagtggatgactaaacacggccgtgtctacgcggatgtgaaggaggaaaacaatcgctacgttgtgttcaaaaacaacgtcgaacgcattgaacatttaaatagcattcctgccggaagaactttcaaacttgcggtaaatcagtttgctgatttaaccaatgacgaatttcgttccatgtacactggtttcaaaggtgtctcggcattatctagccaaagccaaactaaaatgtcgccgtttaggtaccaaaacgtttcttctggtgctttgccggtttctgttgactggaggaagaaaggagctgtgacccctatcaagaatcaaggcagctgcggtataactcaaatctttattcatatatatataagtgaaatcaaattgaaccaaccgaaatttatgtattcaatcaatttgagttaattcatagtgaacaaaccgatccaaaccaaatccatagtgtaactgaccgaatcgaataaccatatttttattaaatttttctatgttaagttatatatattttgtttcataccgttttattgagatatgtagttagacacatgaaaatatttatgatagtgacactaatgagtgatgtttttgtaggatgttgttgggcgttttcagcggttgcggctattgaaggagcaacacaaataaagaaagggaaacttatatctttgtcagaacaacagcttgttgattgcgacacaaacgattttggctgcgaaggcggtttaatggatactgcgtttgagcatataaaagcgactggcggcttgacaactgagtcaaattatccttacaaaggcgaagacgctacttgcaattccaaaaagaccaatccaaaagcaacttctattacaggttcactttagttaaagagctggcatataataattaaacagattaaaccgatttttaatcatattatccaaattaataaacattactatactagataaaattcatattttgaatcttaaaaagctcatgtacgttcacatatcataggttatgaggatgtcccggttaatgatgagcaagcactgatgaaggcagtggcacaccaaccggttagcgttggaattgaaggaggtggttttgatttccaattctattcgtctggtgtgttcactggagagtgcactacgtatcttgatcatgcagtaactgcgattggatacggcgaatctactaacggatcaaagtattggatcatcaagaattcatggggaacaaaatggggagaaagtggatatatgaggattcaaaaagatgtcaaggataaacaaggactatgtggtcttgccatgaaagcttcttacccaactatatgaattcaaaaccgtgttaagcttttaattgtgtatgtttgtgtgggattgatgtctaaaaataatttgaattgttttatgtaaaaaaattgtatttagactgttgtatgcattttatgaaattgtaagcttatgtaatgcaaaggattgataattttcgaaatgtttctttcaaatttcaacggtattagctagggataatttgaagcatatgcacaatcaaattccaccaagtaaaaatgaaaatttgttaaaaaaatgaagtttgaaaactcttaaccatttactgagaagactgtaataaaccgaatttggttcagtttgatttttatggaaaaagacgaaccgtccggttaatgctttttacttttttaaaataaaccggttttggtttgcttggatataaagccgacccgacccggattgaccatgttccttgcacgactcctttttctcaccgttctccgtcatcgtcttcttctttctcacattcattgactctcctccataataaacattgcaatctctcagaaagataagatcagccatg

SEQ ID NO: 32920 - DNA, 3000 bp, Unknown; identical to SEQ ID NO: 1568
  misc_feature (1)..( 3000): 2750-1469P.txt file - cDNA_ID_3063127; gDNA_ID_1620418; Annot_ID_156497

SEQ ID NO: 32921 - DNA, 3000 bp, Unknown; identical to SEQ ID NO: 1564
  misc_feature (1)..( 3000): 2750-1469P.txt file - cDNA_ID_3063131; gDNA_ID_1620418; Annot_ID_156495

SEQ ID NO: 32922 - DNA, 3003 bp, Unknown
  misc_feature (1)..( 3003): 2750-1469P.txt file - cDNA_ID_3063154; gDNA_ID_1620419; Annot_ID_156547
acgagctgttgggacgtggtcttcagatctcttacggcaacgacatgatcttctccagcgaagaagtcaaggcgacaggtacagacgtagatattccggcgattaagatctttgtcggttccttcgcgtcggaggaggaggatcatagctccaagaagattacggtgaatttagtaaagcgtaaagagaatatgttcaggagaaagattcgcaagtttctcaaccatttggtctgaagaacaaaactcgagtttgttgtgttagaatctaaggaacatttagagaagcacattctggtaaataaatatcattatccatatgatgtgaaaatgatgaagatgattttgtctatataacaaattcagtagaatatgatttttgttttgtgaaaccttaagtctataatttgattatattagtagtctatatagattgtctcaagagtcaagtctcaagtgatttgattatgaagatggcaataaaacttacattaatctacatgtagtctcttagctttggagaattaggattggttttcacaggaaccaccttgttgtgtggttgcgcttagttcagggcaaggtgtggggttgaccttgtcagcggctcctacgacatctgagcatttccatattggagacctttttgttccggtcagtgtaacattggagaagcagagattggtgaaaggtgaatcttttaatccctgaaccatgccagcacgctcgactttgatgccccatacgttcttgatcgttatgcctcttactatgggaagagcggatgtgttgaatttatcgtctggatgatctccggtgtcgccagagatcttaatcccggtccggactttttctaggtaaaccccggagattgttatcccctgtatgcttcctcctcggccaatgtttgtcttgatgtggatgccgataccagaattgtagagagtgatgttttcaactgttacattttggattccgccagaagtttcgcttccgatggctattccagcaaatggggaagatccagtgatgcggcggatggtgatgtcacggcttggacggttgtatgcaatgccatactcgtcccaaccgctcttcaccgcaacaaggtcgtcaccagtagatatgtaggagtcttctatacagacgttagagcttgaatctgtggtaattagtaaacacatcagtcatgatttgaaacgtaacaacatgattaagtagaagagagaaactgataaaaaaacctggatcaattccatcggtgttgtacgaatcagttggagcgaggatagtaacatgatgaacaacaacattactgtaagaaaaaagatagttaagtactaatggccaagtgcatattaaagttcatgagagatttgtgaacctgcaataaaccggatgaagtgtccagaaaggggagttctgaagaacaacatgagagacgaggatgtttgttgagttgttgaattcgatgagaccaggtctggtaaactttagagttccatgtctccacatgttccaccaaggttctccttggccatcaatcgtcccatttctgcctagcaaacgcattgacagacaatctgatttagaagatacatttccacgacatctaagctgacacaaaaaaaagtaacaacctgtaataacaacgtcgttgagtccgtctccgtgaataaagctgatatatcttcgtccaggatgctcccgtcctcttccataagacggcaaaggatcggtcaaaggccatttctccgtatcctaaagtaatcaaacaatcagaaatcgcaatgtagaaacaaacaattcctaacaatcattgaatcaagttatgtaaattagtaatcattcacctgaacggctttaataacagcaccatcggcgaggtataaagtcatgtgactcgtaagattgaagctttgagtcaaatacacaccacgaggcacataaagaagagttccttcgttactgttattggagtttcgtatccgatcaatagctgaattgaatgctttggtgttcaaggtcttgccgtcaccgacagctccaaaatccgaaattgatagcatctcgtttctgtgtttcattggaactataccagagcatgtaatcggagctcccagtgagagatggtgaggcaaaacagtggagagcaagaagagtacgaaaacagagatcggagcttgagaaatcttcatatctgagacgagagactttggtagagagtgaagaagagagagagagagagagtaaaatctcaatggaaatttctcgccggagaattttgattactgtggatctagctagagagaagtaatggcacggacgaagaaagctaaaaagcagggagattgttaacttacgtttttgtccttctcttagcttaaaacggtctgataattaaacttcgaatctaaacaatttaatattttacagcataatcccagtttaactgtaatctaaacaaggccaattaataaatatgcaagcccataactacagtttggcccattagtttttccccgcgccaaatttgccctagttcctttcttctttcccgctatttccaaaatctcccaaaaggtcaagttccagcaaaatgacacaatctttgtaatcaacattgttctccgtcaagcttctccttcaaaattcgtaagctttctgttctctaactctttttggtttcagtatatgaatcaatccgactttggaatctctacttaaaaataaaaatcgatctttttgctgcccagatagtgaataaccttaaaatcgatgacgagagaggagactgaaaccagtggagaggatatgatgattgatgacccaaaacccaaaatcgaaaacgatttcaatgttcattacctccgaatttactacggcaagttttaatctttatcacatttgggtatatgtctcttcataaatcaaatctgacttttttcgctcataacaacatatatgcaggaaatctatttccttacactgatattcacaaatg

SEQ ID NO: 32923 - DNA, 3003 bp, Unknown
  misc_feature (1)..( 3003): 2750-1469P.txt file - cDNA_ID_3063167; gDNA_ID_1620419; Annot_ID_156537
gagaaatggttgctagaatctcagaacttgagaagacaatggaggagagaggaactgaactctcagctttaactcaaaaacttgaggataacgataagcaatcatcgtcttcaattgagactttgacagctgagatcgatggcctacgagcagaattagattcaatgtctgttcaaaaagaagaggtggagaaacaaatggtgtgcaaaagcgaggaagcctcagtgaagattaaacgtttggatgatgaggtcaatggtctgagacagcaagtggcctcacttgatagccagagagcagaactcgagatccaacttgaaaagaagtccgaggagatatctgaatatctgagtcagattacaaatctaaaagaggagatcataaacaaggttaaagttcacgagagtattctagaagaaataaatggtttatctgagaagattaagggtcgtgaacttgagttagagactctagggaaacagagaagtgagcttgatgaggagctgagaactaagaaagaagagaatgttcaaatgcacgataagatcaacgtagcgtcttctgaaataatggccttaacagaactgatcaacaatctgaagaatgagcttgattctctacaggtgcagaagagcgaaaccgaagcagagcttgagagagagaagcaagagaaatcagaattgtcgaatcagatcaccgatgtccagaaagcattggtagagcaagaagctgcttacaatacgctggaagaggaacacaagcagataaacgaactatttaaagaaactgaagcaacactaaataaggtaactgtggattacaaagaagctcaaagattgttggaggagaggggtaaggaagtgacatccagagattctacaattggggttcatgaagagacgatggagagtttacgtaacgagctggaaatgaaaggagacgagatcgaaactctcatggagaagatcagtaacatcgaggttaagctacgcttgtcgaaccagaaactgagagtaaccgaacaggtactaacagagaaagaagaagctttcaggaaagaagaggctaagcacttagaggagcaagcattgcttgagaagaatctcaccatgacacatgagacttatcgaggtatgatcaaagagatagcagataaagtgaacataacagtagatgggtttcaatccatgtcagaaaaactcacggagaaacaggggagatacgagaaaactgtaatggaggcatcaaaaatactgtggactgcgacgaattgggtgatagagagaaatcacgagaaggagaagatgaataaagagatagagaagaaagatgaagaaataaaaaagcttggaggaaaagtaagagaagatgaaaaagagaaggagatgatgaaagagactttgatgggacttggagaagagaaaagagaagcgataaggcaattatgtgtttggatcgatcaccatagaagtcgttgtgaatatcttgaggaggttttgtctaagaccgttgtggctcgaggccaaagaagagtgtcgcagcgaacttaaggactcagtgccatggtacgttgtttatctttcccaagcctagtttccacctcacatgaatgcaaacaatgaaacaacatatatgtgtttattaggttttggactctggtcaatcaagaagctggtggagaggtatttttggttggggacttttggtgtacttgtgttcgattttgttgcacttttatatgtttgttaacttttgttgtattttgtaagtcaaaatttttggtttattgtgggcaaagttggtggtggtttttatgggaggtcagggaataaaggggctcacacaaatggagttgatatttttttttctttgggcgtcggattgtatagaacgattaaatgctactgttggtatagtgcttttgcttgtttggaatttgttatagtatcatctttgctctttcataacaaaattatacacatcgctttacagagtttcgttctctcattcatttcttattttattgggttttttttttttgcattagcagtcgttatatctcgccttgaatttctaatgtgaactagtttgaaatgtttgaaatgtttattctttaatagcaaccacttttttttcaagtgtttttcacaaccgaaaaagtcagccatgtgaatgatacacaaaataagtcagccagtaaggtttggtgatgttagatcaatcaaatatttgagaaaaaattccataactagttgatatttcctaaatcgaagttaattgaaaattaagtacaatttggcaatatcttaaattattaaattttaaatagaaactctattcacttttatgagtttatggaaacacactactttctcctctaaaatcagacagtgattatactttgaccttaaaatttgaaaagagtctaacacgttataattcccaattactttattatctgattaattcaccaagatacattaaatctaaaattatgtgatagatattcatataaatcatattggattattccaacaaaaaaaaaactcttaaaatttgtttccttatttacaaacaatacattactgaaaatttctaaataaaatatcaaaaagtaatttcaaaaccttgttttgtcaatttaatatttttatttttacaaaaaaaaatctgaaacatgcaaagaagcacaagtaaagtacaagtggaaatgtatgaaaataggaatcataaaactaattttttaatttaatgataggaatctgaaaaaagcaaaattttatcacatcccgaataaagaggaaaatgcaaaatatgtctccttttctcactatgacaggttgtttctttaaagaagcaacggaatttaacattatagcaaacattaactatcaccagctatcatgcgcccacctctccaccgtgctctccatcatcatcattccatatataaatcattcacttgtagaatcttcttctctttcacactaaaattcatcgatg

SEQ ID NO: 32924 - DNA, 3000 bp, Unknown; identical to SEQ ID NO: 1581
  misc_feature (1)..( 3000): 2750-1469P.txt file - cDNA_ID_3063185; gDNA_ID_1620420; Annot_ID_156583

SEQ ID NO: 32925 - DNA, 3003 bp, Unknown
  misc_feature (1)..( 3003): 2750-1469P.txt file - cDNA_ID_3063192; gDNA_ID_1620420; Annot_ID_156578
ttgacggtggtggaggagaaggtggcggaggagatgattggacaggactacatggattgtcgcatgaagaacacattgtacaagaaacaacctcgtcttttgatgtcactgtcggtgtcactgacactagcagcataacaacaagtgtagacaaagtgtataaatggtttgtttccattgtcagaaactggatttagaaacttaattttgtgcgaagaatatacagaggaagtagatgagagagcagaggagggagaaagagtaggagtgggaaagaagaagaagaagaagaagaagaagcacgttcagaggaggagtgttcttctttttatcgatggcttttacaaataatttataaataaatattttcagcataaaaaaggtgttttaataaagaaacaattagtaaaagttcggtggagtgtattaagaatttatctgattcttataaaatagagtttactggagattaattattggagattcttgggatattatatttatcaatagttttgtgtgtgaaaattataattatccattgcagatacaaaattattgtaatttttgtggtgcatgattttatttattcaaagcatgattttagtagtcgaggacgtagaattttttggtaaataattttaatttagaaatcacagtgttttaagaaaagaaatgaatagaatgcaagaaaaagttgacgcggacacgttaacctttttaaccaaaggtcttgtaataaagcaccggaaatacgcggatgtcgggggcaaagacgtcacgtaatctcttgaaatgtagaaattacgatgatacctctagtcccgtggcgacctcgtggcggctgcgtcgacgagccaagtagggttggggaaataaaagagaatcttcaacaaaagtcattatagtggggcttgactcttttgcaagctttcacacgtggacgtaattcattggttttttgttttatgacgtggtagctttagaagagtagacgtgaagatgacggaagtcccctacttaagcgattagtgtgaagtagcgttttttctcatcaacaacttctttcgtttcgacaataaaaacatatgagaaatttcgttgagtagcaaacaaaagcaaaaacattcctccatatataagacaaacaagaaaagttcaaagctctactaattagcgttgtgacttcaaatgtataacatcaagtttaaattagctctaggtttaaccatggtatgatcagttttatccagtctagacaatatgcaagtagaatatcaagttatgtggtatttttttccaaacaaatttcattattaacattaaaaagtatttatttaaaaaaaaaaaaagaacattaaaaagtaggcaattttacgaagcatttaaaacatcggatcgtcatgattataaatggcgtaaaattgggttacgtttttcttatttcataatcaaattaataaaattgggtcactgtatcagcagtgagagacttggaacataccacatgttcggatgttatgtcccgtattgagatgtcatattttcatagcaaaagaatatgtgaacattgtggaagagaaactaagtcacgaaacctagtggataggtgttgagcacatattttttgcattctataagaactcattttatcaaaaatatcataatcgaagtaaaatgataccgctaaaacgactgatttagttaaaaaagaacaagaaaaaaaaaaaaaaaatgtttcctgtttgtcttaatcttttaggtacttaaaataagatgataccaatcacaaaatctgagcaagcttagactcttagtttataatcaaactgaacaggcgattgaagatgatcacaccatgcttatggtgatctcatgattaaagttactctgctttttaaaagataaatattttgcttgcttttctgactcaaatcaattgttaatgctaaaacattttcatgttaacaaagaagaaaaaaaaaactggaaagtcatacaaaatcttaaactaatctctaaagtttgcaaagtatgtgaattttgcaatggctaaagagaagatgcgttgcagcgttgggttgagaattgaactctggcttaattagattcaaaatagcaattcaccatcctactagttattcgtttcgtttaaagacaacttttatatttcatttgattgttgaggaacaaaagttggttatataagtgagaactttttgctttttgggtttcaattgaataaaaacaaaaagttgtcgtcgatctgtgaaattcaatttatatctatagagagcatttcttctatttattgggccagttcttagtggcccaataacaaaaagcccaataaccctattggagaactgtattactctacagtcatgagaaacaccgctcaattcatcaccggaattaacaaaaagagtttgaaattcagaattgtcatcttttgtttcgatcggattccttattcgtgtatcttctccgattcgatgggaattggctctcatggcaatggtaatcaagaggtttcgcgttaatcaaaaggagtgaaacgatggcgttttgtatttggtgtttaagcaacttcagttcttaccgttttgagtgttgatcatttgtttggcagagaacttaaaaggttagatctttcttctgaaatgatttcattattaattgtctgcttgtacttgaatcatgttaattatgactgagcttttcttcttgaggatgaggaaatcgtaatggctaatgcatacaatttgtctactaaagattagttgaagttgataatgctaagcacgccacaagtatatgtcattatcatatgaatgttttgtcacagaagatattgacttcgtataatatatattttctaatgcaacttggtaatattcaatgtcaaccagtagtcgtagtccttgtatatatctggacaacatcaaacttttgcaatgtttttgaatctctgattgctatttatcttttgggctcaaaccaatg

SEQ ID NO: 32926 - DNA, 3003 bp, Unknown
  misc_feature (1)..( 3003): 2750-1469P.txt file - cDNA_ID_3063208; gDNA_ID_1620420; Annot_ID_156568
atctctgtactagtagaaaaaaagaggtctttattctgtatactaattactaattagagctaaatcaggatgagtccatcgcaacttgtctaattactgttagccaagaccaccctagagtcaatatcatatgttaacaatgatgtaaaccttttagtattgaaggccaaagtagtaattaatccattgactaacttcttttaaaccttgagacagtgaaatactaactcattcaacaaaaatggatcaagaacaaggaaatattctgattaaagccaatgtagtaattaatcgactgaataactaacaattttatgattctgattaaagccaatttattcggttatattcggtttacatatttgatttagaatgtttagttttattggtttggttcgagtagaataaaatattcactgttcgaacaacaacaaaaaaaattccttcatttctctctcagccctaaaaaagcttcacgccggtttgtttcaccgccgttgtgcttcttcttcttcttctacctgggttctctctcaaacaaacaaatctccgacgactcattcgttcctcccaggtaagcttcttcgaccaattttactttcgcatttttctccgattcacagaccctagctgttcccattaatcaggatttagccagaaacttctagggatctaattgtttttgaatctgaatctgtatttgagtttaacgttttgtctccttgtgtagaatcagaagatttagtgaaatggctttttgcaataagctaagccgtttcgtgaggaggcagagtgagaatgcttccatgattggctctctcaggtctttctctgctgatgccactcaccatagattccaccaggagactcacaattttcttgagccagaatactatattggtagctgggaagctccgagtgatccgaaagatgcagagagaaagcttgctcagcttaggagagattatgctaagaaagttcgagtgtatcgtaaagagtacattcatgagattgagatgcttcgtgttgagaaacagcgtaaggatgaggctagattgttggctgaacgagctgctaatgaagagaggcgactcttgaaggctgaggctgctaaggttagagctgaggaacgtaagattgctgacgaagagttcaggcaaactctggtgagttcactttctctcttctccgttctttgtttattgtatagaaaccatggtggatgtttgatcaagtagttggattagtgtgagatgattcttgagtaaataggagaatgggtttgtctggataaggttcatctagcatgtggagaatcaaattgttgttttcctcttgaaaatttggaaccttttcctagttatgcatcagggtgtagtagtattatatagaagagaacttcaaggtatagtattatgtttgtgattggaagagaactttagattagagctgatggagatgtatgactaagagctttgataaacgttgcttagcatcaagtggaggttttgatgaatcctgtagttatcattgtctccttacattagctgttgttgttctggttacagctttagcatcgtacctaacaatcaaaaataagatggattttgatgctggatcttgatgcttttaatgggaattcttttgagggcagtgaaacttgttagttagaagcttcctttgttcgggctgtaggtagatgagacatcgcacacacacacactgaccaaagcagtattcactgattcattaattgatttcacgtacttatgtctgcaaattaattcagaagagtagtaccactcctaggtttctatttctagtttgagttcctcatgtttcttggtcacagcctcagagcagtaatggtcatagtgcttttcttcttaaagttgtaaaactgattcaagcttgattcactgactggtttatgtgtttaataaactgtagataaaagaaagagcagaaaagctagagatgtggaagatgatgggccaaaagagggaagagaagatcaaagagagagagaagctactgcgtgaacagagttcactatggatcgagcaaaaagaactggagaggaagattacagaagccttggttgacaacgttgttctctaaaccaaagcttctcctctgaatctttgtttaagaaacaatcactttagtccttttgttgaagacaagtcttttttttttcttagagaagaaagcgaaggctgttttagcctttttgcatcaagcacataatgagaattgtggtcttgtgaccaatctcttgtttgttgtggttctggtgtcgtaatatcatcattaataagaagttttctcttgttgattgttatcagtagaagattgttttttggtaaatcatcttcctcattggtttcgaatataatgaacctaggcccaatagttaatcgagtaatgggcttagtaggcctatcagcgtgacatgttttgtaaatttatacaatgccatgagggacaatattgtagttttctataggaaccgaatttgtaaatttctagaggcccaatagttaattcgagtaatgggcttagtaagtctcttcaatgtttgatcgacaagtacaagaatctttatcaacggttcgtaaaaattgtctacggtgatagaaaagatgaggctgtaactagggttaaagtagatgatagcccgcaaaaaacagagtcggataagatcaatttggagggaaaaaggaagagaggaatgttgctggaccaacctgagagacctctcaagaaaaggagaaaatttgctataagctaatccataagaaaaaacaaaggccggtctcatcaaaagtactaaacaacacttgtgttgtgtagagttatgatatctagggacataaaaatctaaccgatatcgaggaagatatgtacaaatgcgaagatcagatgttcgaggtagatatattgatgggagctctaacaagtgtagtggagagtgcataagaagttattaagggagagatg

SEQ ID NO: 32927 - DNA, 3000 bp, Unknown; identical to SEQ ID NO: 1587
  misc_feature (1)..( 3000): 2750-1469P.txt file - cDNA_ID_3063220; gDNA_ID_1620420; Annot_ID_156563

SEQ ID NO: 32928 - DNA, 1544 bp, Unknown; identical to SEQ ID NO: 1591
  misc_feature (1)..( 1544): 2750-1469P.txt file - cDNA_ID_3063235; gDNA_ID_1620421; Annot_ID_156609

SEQ ID NO: 32929 - DNA, 3003 bp, Unknown
  misc_feature (1)..( 3003): 2750-1469P.txt file - cDNA_ID_3063239; gDNA_ID_1620421; Annot_ID_156608
aaatagaatatgaatgatttggtatggttttagtattaaatctataacatattttcatcaaatatttctaattttcgttcaagaaaaggttttacatcaggttttttagtcctactcaaataaaaataatccaaagaatggattatagtacttaatagatattgaaaaaatgaatccattaaaaaaatattaacatatatattccattttttggattagttacttgctttggtttcatatcttttttttttatgattgtaaactcctcatgattttaattatctatcattaatatgtaaaaacatttgacagaccaatttcgggagcatcaatgaatccagcaagaagtctaggaccagcattagtgatgggagtatataaacacatatgggtttacattgttggtcccgtcctaggagttatatccggaggttttgtttacaaccttatcagatttacggataagccactccgagaactcactaagagcgcttcttttctccgtgccgtttctccaagccacaagggttctagttctaagacttaatctttcttctcttagtttggtcttcttcagttgctcgttcctcttgaatattttcatgcattcttaattcattaattaacttttagtttcatctagaaagacatgatcacctctaactcttgattaaagttcttgatatccaaaaacattactaatcgaatatacaataacacaccatgttcatgtagaattcgctagagtactcccagcaaaatgtagataagatttattatagatactccacgagcacgatgaaaaagttttcgacctcttagaaagattggtatgcgctatggacatcacaaacatgcataacatgctcttccaaccaaaaattcattataccaaatcgcacaaagcacatttgtcacaatttatctccaaatttgggagaaacttaacatacaatattcacactgcgactagaaagatcctaccactaatatccagctcggtcctcatatcggattaagtaaaattatactataaatattagactgtgggcatccaacctaaaaccaattgacaataagtagagagatccatattttatatataccacttaagatcctactcaacttccgatgtgggacaatatccctaataataaataccctaccatcaagatagacatatatagtctttcaaacacacatgtacaacaatgtattctacgaagaaggtggatcaacgatcattcatggagtacgttgattcacctaaattcagtatcatcttccaaatgaataaataacccatttacagtatttatggtttttcctttgcgtcattttcgttaaggggtgggccttttgatttttgttagggtttgattcgcttttgatgtttttgttttaacaaaaatttagctaaactcaaaccaagattagtttcatttcgtctaatttactttggcttggtttcgtttgattctagttcgataaaaaaacaaacaaattaataaacattacacgaaagaaaacttatcgcaatttgatatatgatatcaaaaatagttatttattaggagaagtcaactcagttattgaaacaaaataagtaaaaaaaaaagcaatcatgcatggaaagcctcaaaacatatataaatgatttaatcaaataataaaaaattattcattagtaattattcaatttaattaattaattgttaaaataagtatatatagtttgaaaccgaacagtaattagtatacaaaaatgtcaaaaaagcgtcaactttcaaatttgtaacgaaaaaatcatgaacttttgaaataccatgtaaatcataaagttttctatgactttttttataaaatgatcaagttttgttgactggattatttcgggcatgccgtaaaattttcgtaaacggaaataatttcctctagaattttctgttaaatcaaaacgacatcgtaagtatatttcatatttgtatatattagatattctttttaattttgttatttttaatttatttcataagtttttaattaaatgtctatatatatatatatttatattcgttgttacaaatatatcaaagtgttgtcgtaactcagcggtagaaagtcccttaattggcatgagcttgttagtttgatatccgatggatgcatttttccctcattattttctatcaaaacgacgtcgttttatgagttccgtttacaaaaaaatctaaagcaacgtcgttttgatttaacagaaaattctaaaacgacgtcgttttgatttaacataaaattttaatggaaagttaactccatttataaaaacttcacggcatgcccgaaatggtccagtcaacaaaacttgaccattttatcaaaaagtcaaaataaactttatgatttaaatgacattttgaaagttcagacatattttatcccaaatttgaaagttagcgtttttttgatattttttccaattaatatataaattttgctccaattaaataagtttaggtttggttgttttggtttgaaaccaaataattagtagtaatacatactattacttagtagttagtactaattcggttcggtcaaaattaggcaatcaacgtagatacttttttctttttttttggcagataggtcaacgtaataattatagaaatacaacaaacacatttgactagctccttaactgctacaaatcgtaggcagttattagatacaaatcgtagaaatacaacaaacacattttacccatttctaacataacatcaaagcctgatcctgtttttcataaattacatctaagtacagctctatttttccaactcattagatataaaccaatcattctgtaattgtttcaactaatttctgtttcacatgtataaaagctcttcaacctccaagttctcaacccaccaaaaatttcaatttcttttctacttttctccaaataaaaaactcacatccacatttttcttaaagaaaatg

SEQ ID NO: 32930 - DNA, 3003 bp, Unknown
  misc_feature (1)..( 3003): 2750-1469P.txt file - cDNA_ID_3063243; gDNA_ID_1620421; Annot_ID_156607
ttacagtttataattgttattaagtaacggtataccacgaatccatgagacaattgttaaaaaactgaagtttaacccctattaaaacagcatattaataatattttaaaattttataaatattgattcaaatacatccaccatataacccaattccaaaataaaacccgttctgtaattcctttacccgtcccgtaatatttttttaaagtaataatttttaaaatttaagaattatttattatatataaaagttttgcaaattgtatcattctctaacacatttatattttatagtttaattttatatatagtaacattatacataccacataacatttttggttttatataatcttttctaaattaggatgatttgatatgtttaatattaatggtcttaaaaaataataaattaaagatttaacccgtattcaaacagtggattaattatattttatttttttattaatgttgattcaaaaacccgtctctccaaatccgtcttgccaaaaagccatttattttattaatattaattttatttatgatatgactctgaattataatctgaacattttagctaataacataggagtgcaccatatttatttaataggagaatgtaccatatgacccgaatgcacttttatccaaatccaccaaaaaagtcttgcaaaaatactgtagagataagaaacgatagtcggttttgataggtataagattagcaaatatattaggtagcttaaattagttaaagaatacaaattgaaaaggtatattacactttattcgaatataatatcaaaacttatataacacagagatttgataattgtttaattgttgaatacttttttgtgctaatttttatgtgattaagatttaattgatttcgtatataaaatattaaattgttttacgaacttatttgtttataatttggtaacagatagatatttgaatattcagtgtattttgcttcagtttaggaaatctttgatgacccgtctttagatccaataaaccttataattaagagatgaatattgttgttaaatgattttggtaattttaatgacgtcattaaagatttttgtttttgattaaatttttttaatggcattgtcatgtaattaattacaaaaattaaggttacatttaaaatgtacttcccaaataatatagtaggatatgatattctataatatttatacactgattaacaatcacgacttaaaaaattcctttaaaggtagtaaactttgtacgttcacgtgcatgcatgtttgattaatacaacgtgaggactcgaagatatgaagattttttttacttccaattataaatcacaaatattctttgtttgtgttagttttttttaattcattcaattagttcaattctaatataatctggattgatgagaatggtccaaactattttatatcgtgtaattggtagtcattcattattgcaggaatctttgatagtttgtaatattaatttaggaaacggtattttttaatgtgcaagtatgactatcaatattattcgtaaatctactcgaaatctgatgatcttcaaaatatatactactttattattctctactaattcaattaaaatatcatccagaaataccgtttataactaacactagatattaatcccaatatttttgttaaattttttttttataaataatttataaacatatgctattgttttgtttgatttaaatgtatgatacaccgtgataagataatttataactaaatatataaaattttaagttgtatctattttgttaatattgtttattttatttagtatttaatactgcattattgtattttgattgttaattctagaatttcaccgtagtatatattatgttatatcatctaagattgaaaattgtaaatgtttgagagaatttttgaccaaaaactctaccaaaaatatatatgtatatgtaattttacgtgaaataactgaagtaactttacagaattctatttagtatataatttctatgttattttttgtttttaatggtcaatctacaaaaagaaagaaattattagaacagtaagatttacatctataagatttaaaacagtataatcttgatgtatatgtaacaagaatcttgaaaacacatttccattgagatcagtcatctcttgaagtgattcgctcaatcggttaaaatgcatagcatcaagcatgggtcgaactttatcgatggtcctactcaaaataaactttcaatggcctataaatttttagatcataatccttggcttatgttatttatgctctaacccggcctacatagcatccaggtctaaaatatcaaatttaatatcaactataatgcaattaaaagagactggatgatgaagaaatcaaaccaaaacctcatcaagaaacacaagccggaatcacttttagacttgcaccagaacgcaaggaacccaatggtcttgtcatcaccaaacccaacatcgttttagctcgataccgaatacgagcccaataatgaaacaaagcctcaaacattctaacaagacctatataattggatcatccctacaaaggtggtttgtttttttcaacttttttttttggtcaaacattctacttttgttatacaatctgattttaacaggtctacgactacgtagtgaggaaaaataataactcctacaaatgtgcaactccaactagactcccattttagcatcttttacccatctccacataacatatgatcctacttttcatctgttgcatccaatcacaagtctactattccaaatcattagattcaatccaatacttctgtgattgtttcatttaaggtatatttcattttaaaaaaaaactctttatcactaaagttttcgtttattttttctttctgaaataaaaatctctccattcagctttaggaaaaaaaaaatttgtttctaagaacaaatccaaaaaatg

SEQ ID NO: 32931 - DNA, 3000 bp, Unknown; identical to SEQ ID NO: 1593
  misc_feature (1)..( 3000): 2750-1469P.txt file - cDNA_ID_3063256; gDNA_ID_1620421; Annot_ID_156596

SEQ ID NO: 32932 - DNA, 3000 bp, Unknown; identical to SEQ ID NO: 1589
  misc_feature (1)..( 3000): 2750-1469P.txt file - cDNA_ID_3063260; gDNA_ID_1620421; Annot_ID_156594

SEQ ID NO: 32933 - DNA, 3000 bp, Unknown
  misc_feature (1)..( 3000): 2750-1469P.txt file - cDNA_ID_3063272; gDNA_ID_1620422; Annot_ID_156631
gagtgtaggttatataagtttatcatatctccattggattaaaagtaggcaagatttaaacaaagtgattcatcaataatgatatgatatgtgtcattcatttacaaattatgtaacacataatagatattttgtaccctaaaattttgaaatttattgtacataaattttagaaaatctgttggactgtgactagttcttcaacttatagagagttgagtgtgtttataatcacatactgcctctttaaaaaacgttaaccaagtcgaaactcgaatatggtactaccacacatgacaaaatagaaaaaacacttgaatgtttaccaagtagtacttggtccattggcccaaaaaaaatgagaatttgtgctcctttgaaaggagttttcaactgctagacccaacccaaaagaatgtacgattaggcacattttccataattgatgtaatgtaaagaaacacttgaattttaagttttacatataatatttacatttaattcatcttcctcatgaatatgttgttcaattatcaaagaacctacaaagatacagtattataactataagatcaccaaagaagaaaacaatcatttgaataacaaaaacagtaaaacaccatataataaaaccgtgttctagatacaaatgtaaaccatagtatctcaccttgcttatcgattcatctttgtaaaaaaaacaaaaacaaatgtgttcaacttggtttgcaaaaaacaaataacacaagtacacaaccatccatccaataacacaatcacaatatttgtttcccaacatttatgcaaccttatttttagtggacactaaccatagaagaacaaatttcagttgtagtgttacaaagtccattaaaattacgcgttatcaattacaaaaccacatctgttttttttttttttaaacactttaaattttgtgtcagataaaatgaatatatgttatgacagcaatcactttcaaaaggcctatcaaatgggtcccaaatgtataatcctaatgtcaatcacaagtaacctaagttcggcccaaatacctgatggtccactttacaatttttcattaaataaatattaagtaaataaaataacagtaaaaaaaaagagttattcagtctgaagaacattaaattaaggttattaacgtcaaagaaaagataatcattttctctggtggcggcgttttaaaaacatagatttgaaatttttaactttattctataaaactaaaaagctctctgtctagtagtatctaaacgaatttaactaaaaccagctaaaaacaagaagcataaaaataatatcaaagtagaaactaaaggatctaataagtaagacaaaattcgaaattaagatccatggcggatttttgtctcttctctcattggatcgcacttgacacaaatgatggttcgagacataacagcagagaagggtccggtccgaaccgaaacggaggaagaaagcaaaaaggcaagacctttgttgttgggttgttgataaagagagagagagggggacacgtgtagtgaaaagagaggaagagaggtcactctccgttcccggttctgtctcgtgcggtgcgattgttgggtgccatgtcagagtccgttcccctatgagcccggcgaatccgaatcatatgcctttcttttcgctatctctctctctctctctctccctttaacccaaacccatctctcaaagacttgacctttctctctctctatctctaatttatttatcgtttcgcgtgtcgccttctctctttctctcattctctctctctctttcccttcgtatctctctctcgtgaggccgtgccctagaagaagaagaagaagaagcccctttctccgggacttcaatccctaacttccgtcgccggatttctcgtccttgattatcggaggactctttaacaactttattccgatttcagattcccagatttgtaagctgctttctcctttctgggtatttcctctttttgtatttgcttatgtaatttcgatgatttatcttacttggtgaggggttttgatgcttgtgtaatgttaatgctgtttaattaaggactgatttagtgtgattcggtttaattgagtttctttgggggggaattgggtttatctccaatgaagctttatgtttagtgccaatgtgtgttgtttagctcttttctctattgatttgtgtgtgaaattatgtttgtttgagtttcattaccaatggctgtctttacttgaatctcagtgattcatgaattctaccatctgtcgttgattatttcagttatataggatcattgatctatgttttagaactagtgtattattgccttagagaacacctgattttgaagtagaggaatgtagtttgcagtagaggaatgtaattaagtatgaatttaatggaagtattcgtaaggagtgagggaacgaatcgtttattataaaagctgtgttaagattagattacttactaggtttgtgtctcatctttaattaagacttttgattacggatggtgaggcttctaacgttataccaccatttttaggggtgacatcatttagtttcttagcttctatagcttatatgcttggatgacgctgtttgatttcatatcggtttaaaagtgaatgaaattgtggttatggccttatggtttggtacactgtgctttgtccgatgctgcatcattgatttgagttatacttcatttaatcttatcaatttttctgttcagtatttctgagcatgtgtacaatttaagtatttaactacctcactgttgtttcagtgtctcttgatcttagattatggtttacattactcgttttttgtttacaattttagtgtagagacagagttttttgaaggccagtattctttagttacttcggtagctgtgatttacacatgaaggtctatccggttctctatcaagcatatggtatggaaacagaagtagaaaatg

SEQ ID NO: 32934 - DNA, 3003 bp, Unknown
  misc_feature (1)..( 3003): 2750-1469P.txt file - cDNA_ID_3063281; gDNA_ID_1620422; Annot_ID_156622
aactagagcaactgatagcaaagggaaaagaagtgcattgttgagattctactcttacagttgagagtgacttcaaagcacgaggtccgggaaatgtctttccagaaccatgacttttggggagaaggcgaccttgcacttcttctccactgatccctcttgctatattccataaccaagtactacaagtcgggggaaaaatcagaaaaacgtattaatagacaaacaagcacgagttgcatgtctttaaatttctattatcaagcaaataagcaactattgggaatttagtatgctagaaggtactaatcaaataatgaacaatctacaatagcctacgagtccaggacaacaaaaattctatcttttccaaagctattacccagtatttactccgtaatgttcttgtagcttcgtttcagaaaattgcagcaagtcccctactgtgtcaactcccaagtcagtttgcaagctagtgcccagctttcctcccagttgtttcctgcacgttatgtctaattagagctcaatgattaccagcactaactgaaaattttatgatcctgggacagcgataaaagatgcaatacacaactttggactgtcttacatcttataaaacacagctgtgttgatactgacgcaaatatttaagtgtattccgtagaatgtgacaaatactaaaagttctcctacgaaaatatgtgttgtgatcaatacactattgaaacttacttacattttctttattggcaaggaacttagtaattcctgtacagctgcatatggtacaactgtctgctgcgcaggtttgttcattccactagcaagtttggctagcatctgcttgttgaagttatatgttattactcgccatacaagcgataaaaggaaaacaaaataaaatagcttcttgccttgttatgggctatgccagcagaacaagtaaactcagtctccttaagcacctgtttccggagttctgcaacaatgataattccacaacttaataacttatcacgtcgatcagcatcttctcgacaaatccaattgcggacactctccttgaaatcatctccatcctgaaagtaaaataaataaattcagatcataatattgactatcgactatacttttgttggagactaaaagacaccaaaacagacctctctgttcattccaagaatatgggatttaagaacttcctcatctatcaattccaaactctctggaggtgcatcagcaagcatgctttctgctgcatcagtgaggtcaagatacacttcatcaatcgaagccctctcacattttccgctttttgctagaatcgaaaccacctgcagcgacaacacatagaatgagatgaatttagcaaatgtcattgtttagacaaacacaaacagtataataataacttccacttccatcaacctcagaaccggcactgcgatataaattaaggtcagctttaccacgagccacaggaacttgaaccaattgaatctgaggacaagcagctttagcctcatcacctctcatcgacctgaacattaacccaaaacacaatttttccctatcctcaaaagattgatacaattgggggaaagaagcatttctgtaattacacactaaccgctttacgccacatttacgtgcttcgtaactaacagcaatcaaaccaccaccttgccattcattgtactgtacaactgcactaggcagtcctcgcaactccggttgcttcctctgctccactaatcactcactcataaaaaaatcccttaaccaggtaagtaaaggagacattttgataaaatagaaacaaaaaagcacactttttggtatttggtaatttcccaaatccctaaaacaaacgccaacgagaaaaaaaaagaaaagaaaccgttattaaaattcgattgaaacccaaaattccaacaaagctaaaaagttcaaaaaaagtgttaaaaagctttgctttctctcactaaagcgtctagtggctgaatacaattcgggttagagagagaaggaccttgaacgtagaagcaatccatgtcgacatgagcgataactctagcatccgatgcttccggtctcgctaccggcatttctatttcagaaatctccgcagaaatcagagggagagagagagagagagagagagtttttaccaccgaaagaggggtttcttggggatgatgactgatgaatagcgcgcgaaaataataattaggagaaaaagcgagacagattaataaaatgagaaagtttcaaaacgaaccctcaaagaaactaaactttgcaaaataacccgtttagaacacaagtaatttgacaacaaaacatgaaattcattgtaatgatctcaaaccctaaatatttctccaaatttgccgtgtcaaattatttgtaaaaataggttgaagattgacattgttgtttttagagatttagtgtggtaacaaaattatggacatcaagctgcatctttcgaattatggttgatcgttcggtagataaacaaaaagtatagataaaatatttaatatttattcattacataaaatttttattgagtttatttttatttatataaaacaatcataaaaataatatgggtcatgtttttttcatccattactatttgttcactactattattaatttcactattattgtgaaatgtcgatttttattgctcattaaatttggctagataatcttcactaactaaagatttggattcaagaaaaacaattttctctcaattatgtttatgattacaaaaataaaataaaaaaattaggtattaaattataactgtaaaaattaaaacttatggggatttttggaagtatatacaagtttaagtactaatctgaaaatgtttgtgttttagtatataaaccactcacaggttgtgactttacaaattggaaaatttcgttgaatgcttcttcttctccgtctcgttgagattcctccccaacaacaacaatg

SEQ ID NO: 32935 - DNA, 3003 bp, Unknown
  misc_feature (1)..( 3003): 2750-1469P.txt file - cDNA_ID_3063303; gDNA_ID_1620423; Annot_ID_156657
gtagaagagatactctctagggttccattaacatctctaagcgcggtgcgatctacttgtaaaacgtggaacgctgtaggattaacatctctgtagacttatattggtatatggtttatgcgtaagatttctcttttaaaccttttaaaagaagaatcttttattttgttaggtaacccctcgtcggccctttaagtttcttacaccacgtgatcggttatcctatgtatatactacgttcgtgaatgacctattgggtatccaatgcaaatcacaaggttagactaatactgtttggccccatttttaatgactctctaaagcacaagcttcacagttgcaactctatcaattatagtgatactttacttagggttgaagtcttgaagaggctgaagtagagctacatgtgtccacaatcaccgagaggtaacataaaccatagagtcgcacctgtgaatctacatgtgcccacaatcttttttcagcaatcttaaaacttctttcacactgccatatatatattctataataaccaatatgaaatcccgaaacaaatcaggaactaatggagacccaaaagccaaggtgactaggattctattacgtagttgacataaacaagaggtcggtataatacccataaccaaaccattaactatttgggacctattgctagctgttttcaatcaagcagctttcaactttaagtttataaattcttcaccaagttaatacaacctcttatttttatttatttctgagaatattaaatgggctacaagaaagatttgtgacttgtgagtgatagatttttttttagaaaatgaagacaaactttgagacaaggtctttatgatgaaagaaactttattagtccgtgatgtttcaaccccaactgtttcattgttttctttttttttcccttcttcttcttctttattttttggatcataagaaattaaggaatctattgcataaggttggcatgttgtagatatataaattaattagtctccatatatatatatatatatctaggttatatcttcaaatttgttgttgcagacgaaaaatacctacaacattcaaaacttcagttaattgtttaagaaaaacacagatatgaccaaaaaaataaatatagagataattaatagaataatcttatctacatatatatttattaaaataatcgttatagaaatgttcttttgttcaattacaaaaagaagaaaaatatttatttcgttttataaattaaaatatttattaatattctctaaatctcgcatggttattgaactacaactgtaaaatacaattacaaaaagaagtaaaatcttttgacgaccacctacaaaatgatacgacggagacacacaaagcgagttcaactattaacattaagctcagattattgaaccaaactagaataactcaaataagatatgttttcgattcggcaataaaatttgattcgagatattttagaccaactaatttactatccgacaactgagtttggggtaaaaacccgtaatttattaaaaacattgaaataaataaaatcatttgatatttctattttctcattgttcattaattgtaacatgaaagctcataatcttcattttatagactcaaatcaaatgctctttcaaactaacccaacaatgtagtaaaaaaaaaaaaaaaaccaacccaaaattggaaatcataccatgttttagatagtcaaaaacaaggctaaagaacggaaaaatccaaaaaaaagaagaagttatttatgaaaaaaaaagatagaccgacgttaatggaaagaagaaaagacccaaacatgtggcctatatacccatgggacttatacatgattaagattggcatatacatcaatgtttttcttggtaaaacatatacatcaatgttatgccatcaacattaaattattttaaatagaattttttaaaatatatgatattaatttcttctaagctaagtgaaaaaaatatcaaagcagccgtacagttacagaatcaaacaagaacttgacagcgtaagaagacataactcatcatactttctttttttttcaaacaaaaactacatttacatatttacgtaattttcattattattataaaaaatttctaggctcataagatttttaggataaaagagaaatttgcaaagaagaaaactagtgtattaatttatgtatatgtttgcatttgaatgataagaaaatatctcgcatgactacaaatctttggatatcattatcttactatttatacactaacttctatatatcattttatcgttttatagccaaaatcagaaatattgcaaatcttattttttaatatggtttttaatatttgagaggcgggaaatgtatggagaagaatgtgtacacgtggcggtctggggaccttgtaacaaaaatgcaattaaaaagcttttgaagcaagttagccatagccgcttggcgctgtgtcgtcttcgtcttcttcttccttcttcttcttcatctctctctttcgttttctcagtaagtgaaggatttgcagaagtagatgattgaatatccatggaggtaatttatggtttctaatttggttttaattctttgaaagtttgatttttttatgttatgagatttctgggtttttgattctcaagtttttatggattttagggttttcagtaattgcaaaactttattctgaagattgagtgattgcttgagatataggttatcaatttcctttatccctaatattccaaatctcgaaatttcaaattacttctctaagttgttctatgagtttatgatcttagaaaataaatctagtgttttgattactctgttttgcatatttttgatgggtttgtgttacttgttttgtaagctaagtgatattcatttttgtggttgaggtcaatagtgtatggattctggttctttatgtctcagggtgattggtttcaggaggtatg

SEQ ID NO: 32936 - DNA, 3003 bp, Unknown
  misc_feature (1)..( 3003): 2750-1469P.txt file - cDNA_ID_3063311; gDNA_ID_1620423; Annot_ID_156651
ataaaaaaccaatttattaagaaaaaactaccgttgtaaattagtgagagaggagaaaacaaaaaacagtctccaagctacttggcctaataaaagagcatatctttagaagaaacatgcatgaggccgtaactaaaagaaagttcagaagagaacttctccctcttaatcatctctcatctttttctcattctctcttctctctctgtctttctgagccaaaagttcaggtgaatgatgcctggctcgagaccattcaatctcatgatctcatgattataacgatgatgatgatgatgtcggaccaggcttcattcccctcaacttacacgttttgcttctcaatcttcaagaccaatcgttagccgatcacctaattctctagtaagccaagaaagatgaacataaatggtgtatccgtgtatatcatctttttttgtatgtatgcgtctttcatcatcaatccgcagcaatgtatataatatggtgtatatcaaaaacacattaggcatatctattaaaattgtttccttaatatatctgttaaaccttgctgattaagagaaataatataatcgaaatttcttttgacatgcatgcatatatataagagtaacagatcaccgagtaaagttgaggggaaggaagcctggtttaaaatgttatcaaatgctatattttctgaagaatgtaaagcatgaaaaaaaaaacaagaattgatgatgcagcttgaagctgagttggtcaattttgtatatatattataggatcaataggtaatcaaaacttcaatactattgttttcttaatttgttttaacatcgtactttataatatggacttaattttaggtctaaattaattgtaggaagaaaggtatcgtatcgaaattaaagtcagctttaattagtgaagggcgtctctttttatctttaccaatttcgttgaaatatcttgttgtaatcagtgtggaaattggctaaaaataactgtttttcctttctttctttttgactatttagctttcaacatttcgtatgtattatttccacttgtttctagttgattaatcaagaattatcctcataagattaattaatgtagtctatttactgaggaaatagttaaacttttcaaagatatatcttacggtttaatatgatatgtaatgtaaatactatatagctaaaaaagtcttatataaaaaatggtcgatcaaatttgtaatcatcagaagagaaaataatcactgaaatttgatttttcgtgagaatgtgaaaaacgttgttaaactgaaatgtgacgagacaaacaaattcattacacatgataaatacaatttaaatatgcaataattagtgtatttatggttaaattatagagccaaacaaaaaggccgtaacatatattatggatgcctgcataattatttctaaataaatactttcactttccttttcttacttgaccgcataattattatattttcttttgctttctctatggagcaaaagatatgcaatgtgttcatagatatactccatgctttggaagagcttagtatacaaattgtttagaaatcgaaactgtgttttttttttaataatgtatctttctcgaactaggttactaacctcgcgcttagtgttcaaaattcatatattcaataaatctataaaaaattattttccttatatatataatatttgaattgatattgtaagaagaaaaaatgaccatccacaaatgcatgccgccgcaaacactatgggaaaagaaattttgaaatatagcgatttaaagtggtctgaaatggtttatagcgatttgagtgatagtatgttgttaaacgctaatctgcaaccacccacaaatgtaatgtttttgagtagttgcatagaaccaatgtaccctttaatgacatttctctagtttcactaattatattattattgttattcaactagcattcactacttataaatctagtttctttcttcatcttgaataccagatgatcacaaatgtttttttattacaatatattaaccttgttggttgttcatcaaaaaggtcgtttccatttgcacaatagcattatgttactatgttacaattagaagttttgaatataaaacatgacctgaaaagaagtaacataatcaatcagtctccaccatgaaaacataaaaagcttgatagatttattgttcaaacatggatagagttctaatcaaaaacagcaatgttgtcaaaaaacaatcaggtcttctgatgaaaatgagggagactgattcgccggaaattggtcatcacccaccaaagactcattgatatcacattcttggttcatgatattggtcatttgattttgctatatttgggatgtagcttttgtaatactgtctaaagcaagactggatgagtactcttaatgctgtagacatattttgctgttgagtacaaaataactttgatgagtacaaaataattttgggctgtggaaagactttacagcaacaaccaatcatcccttttgttgttgttttttagatctcctgttattcaactaataatttctaattaaatatctttctaaatcctatgttattaaacatgaaatttatttaaagtcattcaaaaccatttataatctcttgtaattcaattaaacatttataaaagtcatactacataaacaagaaattgaaaaatctgtcacaatctcaaaataaatgatataaagataagataataaactaattgcggttatattaacgttagtcttgtcattattacaacaatcctataaggatatatgcgttatagcattactataaaagatttatttttccaaactattgaaacacagaacaaaaacatctatagaaatataagtctcattcctcttcttcaccttgtctttaagagacaagcccagtttttttcatctcctccctcaccaacaccaaacacaacctctaagacaaggtgaagaagatg

SEQ ID NO: 32937 - DNA, 3003 bp, Unknown
  misc_feature (1)..( 3003): 2750-1469P.txt file - cDNA_ID_3063315; gDNA_ID_1620423; Annot_ID_156645
acttacgaatcggctcgatggctacaaggagagaaaacgtcgtcgttgaaggaaatgaaatcgatttggagctgcgtcttggcttatgatcatcaacttcttaccctctatagatgtataataatacgtttttttggtgtatattatatggttttcgaggttgatatatgtaatctaggaaagcgtatatgagactataatatgtcaaggtaagatatttttggtgggtatttatttatgcatgttttgtgatctatctatgagatatatataaatcttttatcttatatcatattattttcattatagtttttttccataacatagtgaaatctgtcccataattaattaattgtccagatcttcgcattctatatataaaaaaatttggcaaatagaaaatctgtcccctgtaaacggattaatatgctgcacccgtggttctaggattgcggtttttaatcccaccactggcggtttggtggtattgccccatgttaaagccaacggaagagacatctacacacgtctcggatacgatcctgtcgatgatcaatacaaaattttgtgtgtgatgatgttccttaagtgtgacgacggccatagacaatacgttatagaacaagagcatctggttttatcactaacatcacactcatcgtcgtggagaaagatcgagatctcgggagatgcttactcctacttagaaggtgggatttgcatcaatagtgctatatactatggtgttggacatacaaagatagctagatttaatattagatccgagaagataatgtttattcaagcaccagaggattataatgcaatctcatgttattcaacccttacaaattacaaaggaaaattagcatgtgtaagctatgactcctattgtgaatctaagttgcgtgtatggattctacacgatgttgagaaagaagaatagtcaagcatcatgacttgtgttgtgccttgtgacaaggagctatctttgtgcagtggagagagtcataacaacgaggttgtagtggtatctagatgcttaaagtcatctaagcacttttttgtttactatttcgatatggtcagagagagtatcatcagaagaattgaggttgagattgatggaatcgccgattatgagtttagacatatcaatggaattggtaaacatgctcctaggattttgtgtttccctggtcacattgagaatcttatgtacttgtaagttctaagttctactctaccataagttcattagcttctattttcatttttagccgtttcaaatcgttttttgtagtttggttacttgttcatggactccttttagccgtttgttttctcgaacgccacaactacgtctaccattagtcatggactcatggtgatcacctaatgtaaatgaagcacgagtttaccaaattacaatgactgtaaattaatattttcattcagtttgaatggtcaacgcaaatacggcatttctttagatgggcttataacgataatgggttacgaacggcttatagcccattcaaagttcttatctttcaatttcaagtaatttgctttcaagcccttcgaatctaccaaattccaatgactgtaaattatttttttttcccctcaaaatacatatttacaaatattaatttacttatgtatacagacattaaaaggcactaaaataagctaattatcatgatataaaagtaactcaagaggaaaagtaactaagcttacatgtaattcataattaggtgacatcaaatttactattttttaattttctgctgaatttttttatttattaaatatacttattaatatcgagatgtctaataaatatgagagagtgtttaaaaaagagtttagacatcgacatgagacaaacaaaaaatgaaaaatagtggtacaaaatacagatatataacttgaaaaaataaatataatttatcaacacaaatacaagtcctaatctgttatttataaattaataatctcaaaatattactttgatataaaatcagtgttcgtgtaatctatcatttatgcgattttttaaagagataacaatttttttttctttagtgaaacattaatataccgtttatttagtatgttaagtactttaataaaactctttaacaaaacaaaacaaagttaagtattttttaatatataagatatttctctgcatgatccaggtggaatttttttaaaagttaacaatagttttttttttatagtaaaacatgaattttgtttgattattccattagataacaactatttttcttcttgacaaaaaagacaaattttttttaagtaaaacgttaatatctcgtttgttttattccgttaaataattgaaatatataaaatattttcccgcatgattcacgtggatttttttaaaaggtaacattttgttttcttaagtaaacatgaatttcgtttggttattccgttagatgcttttaatgtatacataataattatccgcttgatttatgtaattttttttaaatgtaacaattgttttctcttaagtaaaatatgtatatctcgtagatttattccgttagataattttgatatataaaatattttccgcaaaatttacatagaatattaagaaaagatcacaaaaaacagaaattttgtttgtttattccgttatatacttaatatgtaaaatattttcctcttgatatacatatttcaaaacgctaatatctcgtttggttattctgttaaatactttaatatataaaataatttttctcggatatatttttaaatatacataaaatttctcttttaagttttaagtaaaaaaataataaatctttcgtttgcctttttatgaaaatatagattaaactaattgatgacaagaaaagacattagttttcttattaccatattgatgatttcatctctttctcttgtaatacaaaatggataaaaaaagaacagagcagaaatgaaaacatg

SEQ ID NO: 32938 - DNA, 3003 bp, Unknown
  misc_feature (1)..( 3003): 2750-1469P.txt file - cDNA_ID_3063323; gDNA_ID_1620423; Annot_ID_156643
tattaatcaagttgtcattgtattatgctatttcgctaattataaggtttgacatctgtataggagactttgacatttgggattcaaagtttaggaaataaaagtatttagacgcgctttggtgtttattattctaagattaagataacttgtagaaataaatattctaattaacatccgagttttatagcaactagggcatatccgcataatatatatatgtgtgtgtgtagagaggataaggtttaatgaggtcaacgtctctaagtctatgctaattattatctaatttatcttgtgcaacttccatttgataaggttaattggtttaatatagttttgagtaatatattgtcggttgtctcccctcttctcaccaaaaaaaaaggttaattggttaaccatagttttaagtcttaaaacaaacgaaaacttctgtacagatcaattccctaccaaaaaaaagaaagcaacaagaaaacaacatgcatagatcaaataatgtgaatataaacattcaagtggtgcttcaagtgatgatgtagtgagtattctatataaactacatgcaagcatcattatttatttatatttttcttaaaactgtatccagttcaatcaagggaaattaagaaatgctaatatatatgcaagatctaaatttcaaatatggttggaaatttgatcatgtattggaatattattaaaaactttgacggtttaaagatagtgtcatccccgttagaaaagtttcaaatctatgcagtttcaggtatatatctttaaaagtcgaaaaattctttttctgatttcgttatacaagagtctccaagtttatcatcatttattactaatttagatattgaagatgctgcacaaaaagtaaaaaaaattgattaatacttaagggtttttgtcacttaaatctcttagttaagggttttttcattaataatatagctgagggctttaaaatggatttatcgatacttgaggggtttttttcgtttaaatctcaaaaacttgtttttttcttttttttttggtaaaacaatctcaaaaacttaataccaaatcttattaataatcaggttacaacttaaaagacttttgtttataagactttgaagaataatttgtttctatagataaaaactgaaaggtgtttgttcaaaaaaaaaaatgaaataaggtgatttaaagattttcttattaataaataatttaagcaatttataactaaaagatatacatatgtagaaagagtttggattgattcgaggcatataagaatttaattgatttggtcatctttaagatcataagtattaataaggaatccaaaagtgatttaagattttgttagaaaagcaagataggcatcatgagttagtatatatataatatagaactttttgatatttttaatcaaattatattatatatttattagttcctcgaattaaatattttaaataaaatgtgggcatcaatagtaatttttgaaatctaaagttttaaacatgtaattgtttgcacttattagatgtatattactatttataccaatatataacagattttaataactaaaaaattataattttaaaacaaaaacaaacgtaatatgttactaaattttactttataacaaaataaaacgtttaactgaaaattaactctttatataacatatttatctacagagtctataaatatgactaaatattgctttaatactccagagcaaaacaaaagaaaaacgattcacaataatatttaatatattttctttgtgatattggttaatttctaccaagaaatgaagttgcctattatattcttaactctattaatttttgtttcttcatgtaagtttaaattatttaattaggataatgtgtcagtattataatcattacaaaaactgtttaagaatttgatatatcttttgaaaatttgataggtacatcagtacttataaatggatctagtgatgaagagagaacatattctttcagtccaagagcaagtccttttgatccacgctcactgaaccaagaacttaaaattgggagaattggttactgttttgattgcgcaagagcttgtatgagacggggtaagtatattcgtacatgtagttttgaaagaaaactttgtcgttacagtattagtgatattaaataaggtattgtaattttgttaaacattaataaaaaacaaattatattactgcttaatgttcatccatgcccttctttttacaataatgaacatgtataataatctaaaaattttatagtgtgcacttaacataaaatttatctggaaacataagtcattgaaaaattaaaaaaatgttgaagatgacataattggcgcggatcctcatttgtaatgaccagttagagtaaaagaatccaaacctaaaatacaaatcaataatcaaatattggatgttatacaagctatggagcaattaaagaaggcaacacgaataaaatatttgggtcgaatccagtcctttggattgagaaaactgaagcgaattaaccgaaaactcagaaatctaaaaacattaactgaatttcaacaaaaaaaaaaaaagaaaaaggtgttggtagattttatttttatttaaaaatagcagatatccgaaccaaataattttttatcataatttcggtaagatttttgaaaaagcaaaaaaatcgattaaccaaattcgcttacctaattttaaggtttgcaaaaggaaatactctaaatatcctgcaaagaggcaaaattttacacataaatttggtaaattaacggcgagatttacagtaatttcggctccaaaaaacaccccgccaattttattaccaaacccattcacttcaattcgcgccaaaactagaatcccaaaagaccaattcctatttaaaacccctacgccccccactctcatcctccattttcgcctctctcttccctctcctcctttcttcccaaatg

SEQ ID NO: 32939 - DNA, 3000 bp, Unknown
  misc_feature (1)..( 3000): 2750-1469P.txt file - cDNA_ID_3063387; gDNA_ID_1620425; Annot_ID_156697
aaatagagagcctctcctgctgttatagcacctctgatctcattgaatgacttaagctacattaattagaatgttttgtctaggttgctgcaatctaacattttgtgtgaggcttttattttattcttgaacgaaaatgttgttttgctaatgcttaacctagttgagaccccatagattgataaactaaccagagtaaaaaggtttatatcattatggaattctgcaaaagtgcttaaagagatcatgtttttggttttcactttcatgatcttgtaagagatatattctttccaggatttaacagacaatcaacaatgttagttttaaataacacgtgggtatattggaaaatccaatgttgtcatcagtcctttttaataacactttggtattacaacatgggcgtttccgttgttgatggcaatgtgaaatcgtctattaaaaacattgttgactattgggtcataataaaaacaattaaaaattaagttataatagatgcaatcatgcaaacaagtcgcaaaagtcgtaacgggatgagaggaaaattagttggaagaagagcaactagctaacctaccaaccgtgtttactttaaatgctacatttaatgatatataatctatataatgtatcaaaaaaatgttaaagtttatatcataatttctttttaagttatttaagatagaagagccaatggcgatgaagaatacatcacatgttcttttgctaagtcttctgctttgcctgatgtttgtgattggtcttgtagaagctagtataccaggttagttcacatgttaagagaatcgcacaattcataacctttacaatctatcatgtttttgaaatattggtaaacgatgaagtagaatgaaaatcgaaaacgatgttgtgaaaagagaattattaacttaaatgtaaaatatttttattgaatcaagataacatttttagtaaaatagggacagagaaaaacagtataaaataaaataaaatagggacagaaaattgttcttctcaattaggatgaacaattgactcagatttcagattttgaatcaaatggagcagccaaattttatcactaatatatcattaccttggctatgaattagatgacgatatgggtccagcaatatatactccaccatcaggatcatgtggagctcctatttccaaatatgatttccaagtactagccaagagaccaccaccatgtagacgtcctcgactcgaaaacacagaagatgtgacccatactacacgaccttgaagtctaagaacaatactcgaactatatgtaatattttcttaaagatttttgaagtgatatgtggagtgactctaatctaggtcattacctatattttcactatactgatttattagatattgtttaacgtttttagatatattttgactgaacaaaaataattctaaactcaatgtgttacttgcaccgattaatttacctgggtgagattttaaaggagaatatggcaaagtcctagggtcgaatcatacctgcaacttctttggataccaagcaaaaattttttttttttttttttgaaaataatgttaaattatattcaaagaaaagtatagcttttgtacaactagtgcatcggaaaatagagaatgtagcagaatattagaaaacctttacatttagagccttgtttcaaaccaaaattgtaatcctttatcgaagcggttatcgcctagaagtcggattgtagaaaaacgattacgtacttgcttgtcaattacttagctttgcaattgcgagttttcttcgcctaagaattcatgagaagatatttcacctgtctagaaaaataagaatatagttaaagggccaagttccctaaactaaacttgatactttaatcatctgtatttacaaccaatttaatctgctttttttttttttttttaatttactcatattagatttagcttaattttgagactgttagctttcggtgtgaacaaaagaaatttgtgaaatttgatattgttgatacattctctagaaattttggaaagattgtgtgtttcttttcaaaattcaaatattaataacgcaccaaaatatctgaatagaaagaataaataatgcgccaaaatattgatatgatgaaaggtatttttgaaatatatcgtttgagttgaggcgcttccatcatatcctcttcatttgtctcatcatcctcttcaaatttatctaagaaaataccttcgcagcaaacattatcacgtcatgcaagtgttctcaaacctcgcttctcgagaagttttacaagttacaactttgagatagactctgtagagcgtgcatgtgatgaagttataatatgaagtatttggtggcaagttctaatacaactagtatatttaagctaatcttgtttcatggccatctccctagacaaacgccattagttttaaagatttattatggtgggagtcccgtctcaatatgtttttagaccctaggtaaaactaaatttacatatccttttcacacgattttttttttttttttttgactcttttacttaaaggtttttttaaaaaaatttgccatgcaccctggcaatggcttttgcccccacctcccccacaccccctagaaactgacatgggagtgggcgcagtatatgtgatagccactgagtagagataatagagctttaaataaatgaattttgtggatgcaaatttgtcgaacaactagtatttaagccaatcttgttgcatggccatctcccctgacgaacaccattaaagattcatctatatgtggtagccactgagtagacttaatagagcattaaataaatgaaattcgtggatgcaaattgtagaagaactagtatttaacggagtgttgcttcatcacaaattcatcaagataagcttatagttatcactaagagttttgtctacgtacattttgtgatcaaacaagtaatcaatcaaaagatg

SEQ ID NO: 32940 - DNA, 3000 bp, Unknown
  misc_feature (1)..( 3000): 2750-1469P.txt file - cDNA_ID_3063397; gDNA_ID_1620426; Annot_ID_156743
tgtaaaagcgagataataacggataatagcggatgccctcggaaaaaccctagaggcagtttatataagcgagaaatgaaacaaataaggaaactaaatatatagcgaatcatcacgtcatgatcccgcgaccgaatgtgtcattggcatctgacgggctgaaatgagcttcccagtgatcgagtatgtcattgatcaaactggacttcaagggctccgtcttgcgatcgagtagtgaagtcgagattgaatggtccagtgaccctgtgatcgagtgcgatcgagtggatgtcatgatttggtgatcgagtggtttcttcggcttctcttctcttcttagttctcagcttgtctggttgagtgcagaaagagcagataggcttcctggtggttgagtggtgatcgagtagttctgatgggatgattcctccggcttcgcgattgagtgaaactgagctgcttgcttctccggggttgcgatagagtgattggccctagcagggctctgaggctgcgatagagtatttttgctgaaggcgtcattgggcattctgacttcatgttctgtttttcctctgtttgaactccaaaaacatccaaagtacctgaaaacaaccaaatatgccatgcacatgcaatcctaatgcaaaatcgtcctaagtatgtaaaacacactaaaacgactcctaatgagatgatttgtggatgaaacaatgacaaagtggtgaagaatgaatgcctaaatcatgcaaattatagacatatcacacattaacaaacctcttaaaattactcattaattttcacttaaaagttaaaaccacaaaaaaaaaaaattattctgttcaaacccactttaattactcgttgactttccttaaaacaaaaatggcaacaaaaatttgactacccatttcttcttcttatgcttcttctctttcagttaggtctcttcaccctaacactccatccataagtccataatgtggcacgtacggccacctcccatcatcgcgatgatggttcttctcccataatctcagtccgtctctgccgccattaaccaataaccaaatggtatcgtaccttcatcctctattttttcaatgatttattaactcttcgtttaaattccttcaattttgcacttcacatgattttttagtttcattcatgtgcttagagatatacaacacgtccggaataccattgataaggttttagtctatctataaacttttgaacgtattaattagcacaaagcatacgttttttgttttttcacaaagcatacgtacgttgcatggaataatttgtaaaataattactaggatagaacacaattgtatgtttattcctagaataaaacacatctttttttttattattcacatattttcagtacttgtgtagttacagttaacatttttgatgagttttaattaaatattatttttaattcatttttaactaaatattaaattaaaaaacactaattatacatgtcatcaatccatgtcatcaatataatccacgtcattactcatctgaaaccgcataacttttcggtttcatttcttttggcattttactgttcatcagcggaaaaaaacctgtcgctttctttctctctcgatggaacgaactctttaccgtaattccttcgccgttttctcttttcttgtctgttccggccgaaattcttacgccggagtcgcatttctggtatcgtgaagtcacatccatgtcgctgtcgcatttgaactgaacttctctaagttccggtaagtatgtttccaaactttatttcgaattttccgacaagaattcgacttctaagttcaatcgcaagtgattcccgtcactgaaatcgttttccgatgcttaacgatggtttttaacgatgcttaaagctggtttttacgtcgttgttgattgacatatggtggccgatttgttagatctatttgatttgatggctgagttactgtttgtttatcgactgatttatgatttatcaattcatttgtgtctgagtttgttatatgatgtgattgagttatggtttaaccttacatccgtggctgagtttttgttatatgacggctgagtttgtttatgttatggttgagtttctgttatgctatggctgagtttggtttatgttttgatggagttgttgttatgttatggtttgactaagtttctgttacgatatggataagttagatttatgttatggttgagttatgttatgtgtggctgagataggtttatgttatgattgagttatgttatctatggctgagttaggtttatgttttgcctgagttatggtatctgtggctgagtttattttatgttatggctgatttattgaatgcttacggctgatttatgttttatcagatgtctgaagaccaagcaagggattaccctccaagattttacccatagggggattctaatctggaggttaaagccattaatcacaacataaagctgggagatttctttgcaattagagaatcaataggacaagatatatgggatgaactgaaagagacaccgattggattaattgctaagcttgttgatagtcattttgtatggtctcgtaagactctacattatctactatgcagatagttgagaatactgaagaaggagctttggtgtctcgtggctggtcaacccatcaggtttggattgaacgaatttcgccatatcacgggattaaacacagatccactacctacagaaaagtttgagcctgaagcggactacaaagcgttctttagggaattgcctgcgccaaccggtgaaggtcctaagttagaagaacttacggaaggcttagtaatgtgaagagcatggcctcataaaaagcgtagatggtttgggttattgactcttttatccattggattttatggcttgcatcctaactctaggataccattagagagtgccaaaagagtttttgatgatgaagccatg

SEQ ID NO: 32941 - DNA, 3003 bp, Unknown
  misc_feature (1)..( 3003): 2750-1469P.txt file - cDNA_ID_3063427; gDNA_ID_1620427; Annot_ID_156761
gcgctgaaggaagaagaagaagacgaaataatggaaaattaaacaacgaaaattagggaaaattagagaattaagaaaggttttattcaatcggcgcgtttcaaaagtctacgcgattctcgagattcattttcaaatccttcttcctcgggatctatagtatagagcttcagtaattttgtcctcttgaggtatttgtttgaagaagatacgaattgatttttagctgaatgaatccattttggcagccaagcttttgttgaagagttcgatggtcaacgttacgctaatttcttatttgacaaattagttgttgtcttcctcttcttctgacattgtgccatttaacaaatacttcttctctgatccattattgtttttttgtttgcagagacgtctaaagaagcttgaaaccattattagagtatttgacaatggaaggagaatccaaaggattaatcgttgggatctcactaggtttggtgattggtgttgtcttagctatctcagctttgttctgctttaggtatcatagaaaaaagtctcagattgtgaatagtggatcacgaagaagtgcaaccattcccatcagagagaatggagctgattcgtgtaatataatgtcggattcgaccattggtccggattcacctgtgaaatcttctaagaatgggaggtctgtttggcttgaagggtttagtaagaggagtaatgtcatctctgcttctggcattttggaatattcttacaggtttgtctcttcctctgacaaatcttagtttcctgattaggttattattttattgtcttaactatactcaggactagacttctcttgttatagtagttactttggttattatttcaaagtttgaaagttcattaaaaaggggaatgctgttgtggatatgagaaggtcttgcattcttggggttatattccgtttttgacatatggtctttggtgattgcttcagggatttgcagaaagcgacgtgtaatttcacgactttgataggccaaggagcatttggacctgtctacaaagctcaaatgtctactggtgagatcgtggctgtgaaagttctagccactgattctaaacagggcgaaaaagagtttcagacagaggtaagatatatctatggattcatttccgaagaacaagttagtgtgtaaaacatgtagcattaggcagacttttaagcattacaataggctttctgaaatctctaatactcaatttattagttgtgtcatctataagacaggctacatgaatgaacaatctatatatcttactctcttagtatctgcttagtttcttgaaaaactcatccactcgccttaatcttttcaggttatgttattgggaaggttgcatcaccgtaacctagtgaacttgattggatactgtgcagagaaaggccaacacatgcttatatatgtttacatgagtaaaggaagcttagcttctcatttatacagtaagtaactacctggttatacataccatattaatctgcttgtcactaaatgaactgttaatgcaatgttgagctattcggtatctttgtagaacatttattgagttgatggtttagacttcactaaatgatgagccttggtaaagatttgagatgcactaaaatggtacttttgatacaggcgaaaaacatgaaccgctgagctgggatttgagagtatatattgctttagacgtggcacgtggtctagagtatcttcatgatggggtaagctgcttgctaaaaccattcaccattttaatgcatctcttaaacaacaacttcaaaactcatgttctaatcaattgttccaggctgttcctcctgtaatccacagagatatcaaatcttccaacatcttgctggatcaatctatgagagctcgggtaaacatatcttctttctctttgaaatctcagtctattgaaccacctcaagtttctaatggtgatcttctttaacttcaggttgctgactttggcctctccagagaagaaatggtagacaaacatgcagctaacatcagaggaacatttggctacctcgatcccgaatacatttcaacaagaacattcaccaagaaaagcgatgtctatggcttcggagttttgcttttcgagcttatagcaggaagaaatcctcaacaaggtctaatggaattggttgagctggtaacataaaactaaaaagtcctcgaaatctccaattgttttgtttggagaattgcatgtaaagactaaacgttttgttgttgttgatgaacaggcggctatgaatgcagaggaaaaagtcggatgggaagagatagtagattcaagattagatgggagatatgatttacaagaagtgaatgaagtagcagcttttgcttacaaatgcatctctcgtgcacctagaaaacgtcctaacatgagggacattgttcaggttttgactcgtgttattaaagtgagacattgcagaaagcggcagaagaattctccgtcgccgtctccacggcttcctcctcctcctccgatagtggaggagtcagaaggtgagttaactgcaaacggatcattacgatcagaaattcatcggagggataattccttggacagtagtatagctgaagacgtgattttgtaaacaaaatgaaaaaaaagtctcaatttttttaattattattaacttttaaaatgtgattttgtttttcaattcttttgggtttttagacgctagattgtctatatttgtgaatgaaaatttgttctttgttttttcgtgttaaaacgagttcaaaactggagaaccatattatatatttgggctatgaaaagaattgaattcaaggcccaattaaaacctagcctagcccattaaggtttagtgataatacagtgtcgtttaatcgtttatccaatttttatcgtcatctgtggaacggataggacgaaggaaaaagaagaagagtgaaagttgcagagcgagaaaaaatg

SEQ ID NO: 32942 - DNA, 3003 bp, Unknown
  misc_feature (1)..( 3003): 2750-1469P.txt file - cDNA_ID_3063432; gDNA_ID_1620427; Annot_ID_156752
tttcgctctattattcgtttagattcatttgttttttttttcagatcgaaccgtagaatttaattacaaaattagttcgtttttcaaaaaagaatattgttattgtggcttgtggggaatagaagtggtacagtgaagtcatgggctttgggtttgtgttttttctttctcgtttatgtttcgacgactttgaaaactcttttggattttattgtctgatatctttgccggtttcaatacgagtcttgtctctgtaactgctgacataacatttcctttccttcttttactttcttgttttttacttgaataagtagtacattcgatcagtaacttttaccaaattttatcatttgttttaactttacctaatagtatgaatattatgtacgagtacaattctcttttcctagttcgaataacccacttcaagaaatggtaacaatacaatcattcacagaagttacatttttctaagaacagtttttcattctaacttttttggatggtacatttaaagatttattattggatttatgtatcaggtgttttgaagaaaaagatgagaagagatagaggatttgaagctcagaagtagagagaaagacctaaggccatattgtccatttgaaaattcctaaattgtaaactaatcagaaagattagtatgctaattatatgagtagaatagaattttgtttgagagttcttgtaaagatgagactccccatgttctattctatgttttgtgttttagaattttaaatttgatatccattgtctttgactaaattgatgatgtttatctttttgtgatggttacaaagttgctccaaaacttaaaactaatttatttttgatcgacgaaactcggtcaaaaatactatgatttgtgaaaaattcatgtataagattgtacatatactagggctagggccaccagtttttgaaaagttaggtctcaatgaaactgaagtaaatctttctaaaatactcattttatttttttctgtttgtgagttgcgaacctagtataatgaagattcggggtaatacactacactaacgtagaaccaacatttgcagcaaacaaagataataattgcttaacaaaactaaactaaatatgtctgaaaagattggtcggcttcaattcttctcactcaagtcgtcggtagctttgaatactcttaaccaatccttctctcacgcagaaaagagaacaaacatgtttctcggctacagattatcatctattgtgactgaaccatcaaacagttcgtgttcttgattatgcgacaccacagtcttaattattttcagaacttgaaccaatttctcatgaaacctcaaacttagattgcgacataaaccagaatgaaaaatagtatagcaataagaatacgacatttttcgatatttcaacatttcaaacaaaatgaagtgtgcaggatttcaatcaaattttttgcatcctacaggctacacactctattttttttttttttcgagttagaacaaaaaaatctcatttttcttcgctgtttgtttttctccacaatatacaaccattctcattctctttttcaaaaatgcaacatttgtttttcaaactttttgaaactcccatcaaagccccctcaaatcttgagtagaaaatgtgcctataaatgaagaaaacggatcctgacaaaaggtagaaccataaacattgtgcactagatgtagaaattggtgaaataaaaacaaaacaacaaaaactgaaaccatatcgactcaaaacttgatggacaaaatagtcctcccaactttgaagatgagaaagatttgtccatctttgtccttgtgtagcgatttttacggggcctaaaaatgtaatagaacttacttcagcgagacttgtaggtgtggattgctttaccaacgtcacatgtcaaggtgatcaccaaattacagctttctgcattattgactcatcgaaatctcttcttaggtaagatgtttcatatatagcttgtcattccttcatttaaatatatactttcattattattttttggtatgttttgattttgaatacattctatcatgtttattttgggcacatcccctgaacttgtcccctttgaatattttccaagttcaattatgctctttatggttaattttatgatcaagacttcatcaatgaatcgaaacgtttgcacacaaaaattgatagattaaaacgtatatttttggataaaatgggatgatcctattttaccattcaactaattccctaaaatgaatgtaggtagcatactcaccatgtttttaattttaatggatctaaaatattagaccgctcgctaaatacatataattagaaactttcaggattacattaatccctaatcgacatctacactttttgtttctagagagaaatcgacataaggagcaaaatcaaaatgaagacaatatgtaaacatcatcgaagaatataccacccaaaaaatctctaattatctttataaaaatcagtttctgaattcaaggaaaataacactaaaccgtaaccgaaattttacgtgattgtaaagaaaaccaataagtgacccttgaaatttcatttattatatattgacttatttcaaaatatttctattaaatccttgccaaaaattgataaaccgaatctagtcgaacaaacagattcgttgataagatatagtacttttttttttgtaggggttgataagataagatatactttgacatagtaaaccttgattatatgaagatgatttgcctaattacgataattaattaatattaaacgtcggtcatttactgctgacgtcatcattttaccttagtggataaggtattattctctttcttcaaaactcaaatcaaagaatcgcaactatacatttctccaaaatctccgagttctacaattgtgtgatcaatcaatcttctccgatttcaagcttctcgatcaaaagaatcatcatg

SEQ ID NO: 32943 - DNA, 3003 bp, Unknown
  misc_feature (1)..( 3003): 2750-1469P.txt file - cDNA_ID_3063456; gDNA_ID_1620428; Annot_ID_156796
atttcctttttcttgaaaaaacaaagcattcaagtactcaggcgcatatgaaacatatgaaaagtaaaatgcttcaatagtagagacagacatgccttggaaccttggtgggtaaaaaaaacatacttgaatggcttcataatgaagcaaaataatgagagaacatgagaagcatcatcatcaaaagccaacacttcaaaaagaaaaaaatggatatggatatccatgggaataaccccatcaaagcatcttctcctttttcttcaagcactcaaatgtcaaaaaggtcaccacttttattaaaactcatatatatacactgagccattagtccatgaataaccaaccagccttctctcaaagcaaaccaaaaagaaaaaccaacattgaaagaggaagttacgataagcggagcagtaatagggcatctttctattggcaggcgacttggctatttgtatcttttgtgttcttgactattggctatgtcacttgccaaaggagagttgccctgtcactgcttccgcttaaacacagtctataaccggttctgctaatatcaatccttcttttggacatgtccaaagccgagattgattgatagagaattggtctctctggctacaaaactagtgcggttctctcgatttaagttttaatagcattcactttgcacattgcatctttcacatcaaatttccatttcatcaaccatctaaacctctttgttagctttgatataagcaacgatctaaagtctaaaaaccattaatcctctgaaaaaaaagacaatttcgatggttctattatgtttctccaatgcagaaattgtatcgtctgaattatagtagattttttctagactaaagtgtaaaccaagacgaatctgcactaacaagacacaccaatagactttacagagaaaggttacgagttttgaaaatattaacggaccatagtcatcgcgaagacagttgaaacggctgaatctctccgatttgcagtatttcgcttcgggagtcagaaagcagaggttgaaggcaaacgccgctaacgtaaaccttctctttcaggtggaatctctattaaaaggcttttgggccttatttatagtcttgtatctcaataggcctttggagtttgggcttaattatctaaatcggcctttggacttatccaaaatattttattcaactgcttgaacgtctcccttacatatcgaccatttcattttttaaaaagatccaacatttggtgaggaaatccaaaaatcgaatatccaatcagtattaaactaagacttattgcccaaattgtatactaattcagttggaacggtaatcgaacaagtgaaacgaatcagtgcgagacacgtgacaaagcactgacatagtacgatgatgtcgatgccaattttcaacactgttttctttttggcgtgggccttttcgatactgtttcatctcctctcgttttctcctaagattaaaaataatagaaagaggacaatgtattattattctcttaactcatagacataatgacacgtagtaggttctctagttcctatcttttgatttctgttaacgactatgttcattaggagctactagtcacaatgccttcaattaattttaacaacatattttagctacgagcttgtcgagaaatcagtttgttaatactattaaaaaaatagtattcacgaaaattttgaaattctctactaaatttttattaaatcacaaaacttttaaaattgaccccatttaaattgactcccactaatcctataattaagtgttatgttctctagtaatgacgacatcgttagaaattcaaacactaataaatgattttattaatattgctcaaagcctcaaagtcgtccatcgatcttctctcccccaaaatttcctattttagcggagactttccaaaatcccttgttctttctttcctcgttaagtttgccaaaatagggtaaagaatatgtttatctcgtagaccaaatggatcttcctaatgcttaatagcttttttatatatatattttaagttatatttcgtacggctattattttaatgcaacatttgaacctgccacgattgtcttttttctcaattatataaataaaggttgaaatactataattggtgcacagctacaataattatgatatttacttccgtaacgtgaaggagaaatatctaataaattacatttttatataaaaactgtactaacttacttaaaatgagagtgaaaatactaaatcgtatgaatattacagtagtatttaattaccattttattgaaatttgatatatatatatatatatatataaccatatattggtatatacacacatttttgttgacaaataaatcaattcttataaccaagtttggttgttttccagataaataaaataaaaacaagaattatcctgtttcttgttttggcatctaattatccttttgtatgtggggaggagaagatatggacacaaatttaaaatactctatacataatttttattattatcaagaacagaaatgaaaataagaatggcatcattttattgtgacccataaaacaaaaaagaaaagtgataaaacataaaaaaaaactttctataaaaaaaaaaaacattaagaaacttgccccttccttctctcacagatcattctagggctcctgacagaaaaaccaaataccttttcctctttccatttttgtagaatttcaaatctttctttcctcaatctttcacaatgatcttttcctgtgaagttcttgattttaaatcaccctttcttcactactagcttatctcttcttcaattttctctaccgacattcaattactctccctattcggtgagatctctctctctcttttatgactttggttatgatgactggtcactggcttgtttagggtttcaatctttacagatcttgtggcagaaaaaatcaagtcaaagcaagaaaaatg

SEQ ID NO: 32944 - DNA, 3000 bp, Unknown; identical to SEQ ID NO: 1640
  misc_feature (1)..( 3000): 2750-1469P.txt file - cDNA_ID_3063468; gDNA_ID_1620428; Annot_ID_156784

SEQ ID NO: 32945 - DNA, 63 bp, Unknown; identical to SEQ ID NO: 1642
  misc_feature (1)..( 63): 2750-1469P.txt file - cDNA_ID_3063476; gDNA_ID_1620429; Annot_ID_156812

SEQ ID NO: 32946 - DNA, 973 bp, Unknown; identical to SEQ ID NO: 349
  misc_feature (1)..( 973): 2750-1469P.txt file - cDNA_ID_3063476; gDNA_ID_1564194; Annot_ID_149019

SEQ ID NO: 32947 - DNA, 3003 bp, Unknown
  misc_feature (1)..( 3003): 2750-1469P.txt file - cDNA_ID_3063506; gDNA_ID_1620430; Annot_ID_156838
gagttagcgaaataataaaatctttggttgtacttgtatgtatatatatgtatggagtaagattaagtgagatcctaaattctattgaagtttttttattctatgattgaatttttttgttagtttgtaactttgtagtgtacataaaggtccaaatttatgaactgtagtgtaccaaaaagctgaggaaaataagtggttgtaaatgggttttgcctagagatagtgctcttatctttgtaagggggtatgaggaaactgtttataatgccaaaaatgtggagacatgtgtgatttgtttgtaaaagaaactaaaagttaaaccaaagatttgttagttttaagtaatgagtaggaagtcttttagtgcctatcttatcttatcttatgtgtgagtttgagtatatctctatgtttagagagccgtgtgatctacctatgtttcttaattcttatagtcttgtgtacattagtaacgactagtctttaagtagtttagtaacatatataccgcaaaaatcaagattttccgaatattctttttggaactgagtttgtagtatcacaatttgaatttaaatccgaaaatttgctagtaggtttagtctcaaatttttgtttaaaccaaaatgtgaaggcatttgattttctgcaaacatgaagaacatttactgcataatcaacaatgaaagttgccaataagctacttttctccaccattgatgagttctaattaaaaaccaccaacttaagttttcataataaattgaaaaatacttttcatgtagtaccataaagttgacccctcctctttaaaggatgttagaaaattatagccatctttcatctatcttaggtatatgtatattaaatagttgttcactcattcgttcacactataattttgtaatgaaaatatatatgacaacaactattgttaattcttacaaaatttgtctttgattataaccaacgaccaaagacagaaaactctctcatttctatgaaggttatagttgttaattaacgtgtgaggcgatatccctacttacacatgcaacgtgtgtgttacccaaaatcgaatttacaaatatacacttttcactaaaattagattagttctcgttagtcttttactaaaataaaacaagaaacatattactaactaaataaaaccatatagtctctctttcttcttccttgtctctctctcgctcattattgatctccattgtcgtaaggagatcgcaaaaaagccatgagcctaaattgtctatcatgtcaagcccttccacgaacagattccaacaaagatgttgatctctccggtcctggaccaccaagggtcgagattaacaatgttctaggtaaaacatgttgtgtaaatcctattggtgggagaaattggtcagggaatttgagtcctaggatctatgagaagattggacggccaggatcgtctttagcgcataagatgaagaaggtgaaaaagattcatcacgttaggctaagtggtcctgttggttctagccctagcaatgtaccaacccggccggaacaaccaaagctcgtaaggagcactggagtccgaaggaattggagttttgagaatttgagagatcaaggattaatagaagaaaaaaggaagattaacatatgaatatatgatcaatgattgatcatgattctgagattttatataaatgtgagaggataaagctgattacatatagtttcaaatccagattcgtgattatataatcgtgatagaatatgtgagatgtataatagtattatttggacgacaaaacgtttccattgatttattacttgtcacgttttgttctctttgaatatttgtttttatgtttcttttttgtctttgaatgaaaacgtaatttcattaaagtgttttgtttcttttctaaaatcgttttcatatctgttttcgagtttcttgcgtaacacgagagatcatccttattggtggtatactattccatctaaatagccaaattgcataagcagtaaagcttttgctatctttcagaaaattattagtaaccaacaaagcaacaaaaaatcaatcataagagaaacaagaaaacttatctctaattctctaagagtattatgactcgacttaaaagttaagtaaatcatcattacaattgggcctactttcgcactgcgtaatttcgaaataattaatacacaattgacatggcagattttgtttcgaatcgtcatgacatatacttttgtggtatagcttcgtttctttaatcgttatccatatcggcatatcgctatatagtacaaactataccattgcaatacaagatatacggttttaacaatcacaccaatcataaagtaatatcaacgttactaaaacaatattctcagctatttcacatcgctagtttaacgataagagatgtaacagttctacaatttttcgacgatctattagattatcaacacttgtataatcaactttagtctgatcaatcgtagtaaaaccatggtataaaaaatacgactcctaaataatcaactttagtctttagtcatattataaacactaatcctcaacttgtttacgtatgtatcctaaattcctaattttaatccacttgttggttgtatctagtaaaaaatcgaatagttatcagaaactagttttaaattaagatttaacaacttaatggagagaaaaagagagacaaaaagtcaaagtttcttttttaaagcctcttgttttgttcttcttctcttgtttcttcttttccaatcttcatttttccagtcaaattcagaaaacgcgtaagttctctttctcgttaaaagggtttgttataaaacccttgattttacttgttttagagaggttcttggtttaaatcttcttgtggtttaagtctttgtggtttctctaatattttcttcccaagatttggatttgctctgttttgtttgtttgtttcagttttaataatg

SEQ ID NO: 32948 - DNA, 3000 bp, Unknown; identical to SEQ ID NO: 1645
  misc_feature (1)..( 3000): 2750-1469P.txt file - cDNA_ID_3063513; gDNA_ID_1620430; Annot_ID_156830

SEQ ID NO: 32949 - DNA, 3003 bp, Unknown
  misc_feature (1)..( 3003): 2750-1469P.txt file - cDNA_ID_3063521; gDNA_ID_1620430; Annot_ID_156828
taatattagccaaagtctcatcaaccatatcaatgactcgagttattaagcaacaagctcttcaatatagctaagtttttgataatttatcagttactttgtttaattttagtcatttgattagagttttggtcagagtcttttaagaattaagggaccaaagtaacttcagacaaaatgaccaaagacaccacttttgaaaccactggtcccaaaaacgaagccatgttactcatgtgctgcttctgaacacagttaaaaagctaatctttgaactatgaacctactctctagaactttttactatttgggtttctttgtttttaacagaaaacagtaaagttttttttttttttttgcagaggactaaaagataagactgagtctagtctctcgacgtggacaaatctgacaagaacagttactgctcttcgtcctctttgttgttattgtcgtctctctctctcggactttgtaaaatgttacactgacttctcttaatctctctacgtaagtacaaagatctattgcatgttagagatgatgttttcagaatttttttagagacatgaacacgtgtttgtttgttgatgcaacgaatcagattagagtagacacgttttctaggtttaaaaacattcacaggaatctttttaagttaaattcttgataagaaatagagacgagtttgtccaaaaaaaaaaaaaaagagagatagagacgttggaacttggaagcaaaaggtttttgttgcttgtcaaagagattaagagaatatagttttgaattaaccaacaaatagagtctgattaatattaagtgtgtatactttacttagcataacaaatgtgaattgtatttagcaattataaatactgagatcatccaaaaaccctagtggtggaaacaaatcgaaccgataaaacaactctaaccctaaaggtcgtcacaaagaaatcttatatgaaaagactcaaaataaaccaaaaggttaattaagagaataaaaggagtctacatactagataccttaaaactaatactattgtagtattgtttgattttcgcttgctattgtcaaattcgtgaaagttaacattttccctttttgggtattagagcaacggccattgttgagtggtaaacgaataaacaaatttagtaattgtagtctaattataggtcgttaatttggttttgtacactttatcacttgtagaattttgcatggagtgttttgtttctgttaccgaaaatatttgattgattttgtgtccggagctgttgtctaattcgtgaaagttaacgttttttgtttttgtttttgagagatctgacaatttgtatcagaaaaaaacaaaaaagtgcagatagttaaaaagtaatttaaataaatagagaaatttgttttaaatcacgggttgtgttttttaccttcatagcttcttctggtccttctaatgtgcaaacaaaactgactgatgaaatggagacagtccttttttaattataagcatacaattgcaattaataattactcacttttcccaatattataaaaaaaaatcttatggatatatatatattcaagaggaaaataaatagcaattgtgagattttgctttcttccagcactcatttgtctctttacgtgtatgttattgtccggtccccacggtccaacattgctaaatacctaaccggtttggtcccatttgtttttcttcttgagtcgaatatttggaatttggtctccatttagatgattgagttttcttcctttttttttttttatcgaataccatatcacatatatacgctttgtttttgcatttgcattataaaagtcttcaaacatttttcggtaaaatgccaacgcatgatctcaaacgtaaaaatgagattcaactatgcaaacaattgcgttaacatttctgtatagaagtctgagttttgcaacgaacaagaattacatatggttccttttgggggttgcaaagagttgtttttaggttgaaacttgaaaaatgtaaaaagattaaaggtttttagagtagtgaaaagggtaattaagtgaaaaagaaagaatggtccacgatttcgagaaaagaacaagaccttagactctctctgacccctctcacgtgccaccagcactccattgctcttcttccttctctaatccttttctcatctatgaatatatatacatatgcattttatatttatttatacactatgagttaatcaaaaaacaaattgtacgttatgattttaggtaaacgattacaatttatacagcttgtgtcatttatttttgccaactccttaaacatatatcaaagcatggtaaacgtagtcttttcttcgaagtcgataacttcatcggttaaacctggctgaactattaacctatatcgagtacatgtggtttatgtttccattttccaaattcttatataaaataaaatatatgatcaaaatagatgactcgagaaaaagaaaaaaaaaaacatatattgagaaatcatatgatctttgtatctcttcttatcataatttaggtttgtgataataagttagtcaagtgtacgaattgcaactgataatatgtggaaacatgaaaatgaatatatatgtgattatgcatgtttttagcaatagtcaagcttttacaagatttaataagaaaaagtatggcattcagcaaagtccataattaagttttcttcagaagtacccttccatgatagtaccgatcacaatcaaataatgtctcacatgtacacacactcagagcaccatagcttcaacgtttgtcaagaaaaaaatttccttttaatcattgccttttattttttcgaaaatgtcgttttcgcccgcaaatatttataacctttatatatttttttcgaaaacaataaattaaagatttggaatgttgctatataaatcaatgatacttagtaattcaataaggaataaacttcgtgaagagaaatg

SEQ ID NO: 32950 - DNA, 3003 bp, Unknown
  misc_feature (1)..( 3003): 2750-1469P.txt file - cDNA_ID_3063533; gDNA_ID_1620430; Annot_ID_156820
aatgaggtgagtgttgagtttctttctgtgtgtatgtagatcggctaggttgtgcggtagtgatgatattttgcattctctcaaacgcaggtgtttctggatattgtggaaagtgtaaaccttctgatgtcctctaaaggtaaataattgccttttatgaagttttttgaagttgtctttcttgttgatttgctgtgtatgactggttttgcattttatggaaacggttaggcaatgttcttcggtgtgatgtgacggggaaggttttaatgaaatgtttcctttcgggaatgcctgatttgaagttggggttgaatgataaaattggtcttgagaaggaatcagaaatgaaatctcgcccagctaagaggtatacgttgttaatacattgaacatcagtagccactgacttttctttgtgctaactgactctcgttttgtgcagtggtaaaaccattgagcttgatgatgtcacatttcaccagtgtgtgaacctgaccagattcaactccgagaagactgttagttttgtaccaccggatggagagtttgaactgatgaagtaagttttcgaatgtccactgttgcaaattgttctggtaccaaatgtgtattaactttatgatgtctcaggtatcgaataacagagggtgtaaatctgcctttccgtgtattaccaacaatcaaagaacttggtcgtacacgtatggaagtaaatgtcaaggtacataacttttctcaaggattacaggatacaaaaaaattggcttgatctttgctctcttacaatcccttcccgtgttttgtctgttcaggtcaaaagtgtgtttggtgctaaaatgtttgcccttggggtcgtggttaaaattccagtgccaaaacaaacagccaagaccaatttccaagtgacaactggtcgcgctaaatacaatccatcaatcgattgcttggtttggaagtgagtttatataatttcccctcatattcatctctataattcttttgttggtgttttatcaatcattcggcatctttctctcttttactctttaggataagaaaattcccagggcaaacagagtccacgctaagtgcagaaattgagttgatctcaacaatgggagagaagaaatcttggacaaggccaccgatccaaatggaatttcaggtcagtctttgtctcttttaggcactgttaaatagaaccagatttgcttaaagcaattattaaccgtctcagctttgttcttttctaggtgccaatgttcacagcatctggtctgcgagttcgttttctcaaggtacgcattgttatctatgcttttgaaagtaccatccttccaaaaaatgcaatgctaagtagcagaatctctaagccattgtgtcattaaatccgttcaaatcttttatgtgatttgcgttttggttaatctgtctctggtctttcaaaaattgattgctatactacttttttggacctgactatccggaacgattggcaggtttgggagaagagcggttacaacacggtcgagtgggttcgatacataacgaaagcgggatcttacgagatcagatgctgaacattaaacacagttcaggttcagtgacatcagacttaaaagtttcatggcttctagttttttgttccttatgcaaaacaaaaacaaaagagttaaatatgttttataccttgttttatgtttgttttgtcgattagagatatctgtgttaatatgatttcttatgtcttaatttggtattgaattctgtttttctttctttctctgtttgtgaaattgtacgagatatagtttagattaattctggtgtaatcgaacgtgatagagtatttgtgaaagcagtcggattctttttagtagtagaatcgggtgtaatatgttaatgaaaacaaattttacttgagaatagttcgaacttcgaaggtttttacacataacatagatcgttaaaatcttttgtaagtctactaattcttcagaaacaaacgggaaattgtaaaagtaatagactatcaaagctacacccaagtacgtctttcactcgtggttggttatgcatgatcgaatttctataacttcgcttatggcaaatgtggtcatggtggttctttggactgtgtcatgtggctctctgcccacaagacaccagatatcatggatactttgctactcacatgcaactcaaatatggtctaagacaacaaacatgattctattgaactgcttctccatcgattgggatcacctcgtcggtattctgaaatccacaagctgggtgtcttgtttttgcatcacgttacttttcaaagttccctataatgtttgacgagaatgcaacaaccgacgacatggataccttccacaaatatcaataacgaattctgaagtttaaggatttttaacttcagaattcgttattaatcattcacaagttattgtgttattttttataatatatccaatgcaaatactcttttttctcatctccaaactgaagtatttttatttttataaactcttaataaaaacggatgaccacaaatatttctgctataatttggatgataatgaaaacaaaccaactacaatctactaaagattcaaaaatattttctcgaatgcttaaacctcacgtaagtaaataccaaatcaattcagataaaattaacaaaacaaactcaaataaaatctcctaaaaatcctataaataaaaagatgatttcattttttttcttcctattaaatttacattttccgccacacttcatctctcccactagtctctcctcgagactctctctgtatgtgtgcgagaagcgagaagcgagagagagagagagagagttgttagctcacacgctttctctattttctcggaattcacaaaacagaaagtttcatcctttacgagaattaagccgaaagaaacaatctttgagtttgatttcttcttccttccttctctctctctgctctaatg

SEQ ID NO: 32951 - DNA, 3000 bp, Unknown
  misc_feature (1)..( 3000): 2750-1469P.txt file - cDNA_ID_3063537; gDNA_ID_1620430; Annot_ID_156817
tggttttaccactgcacaaaacgagagtcagttagcacaaagaaaagtcagtggctactgatgttcaatgtattaacaacgtatacctcttagctgggcgagatttcatttctgattccttctcaagaccaattttatcattcaaccccaacttcaaatcaggcattcccgaaaggaaacatttcattaaaaccttccccgtcacatcacaccgaagaacattgcctaaccgtttccataaaatgcaaaaccagtcatacacagcaaatcaacaagaaagacaacttcaaaaaacttcataaaaggcaattatttacctttagaggacatcagaaggtttacactttccacaatatccagaaacacctgcgtttgagagaatgcaaaatatcatcactaccgcacaacctagccgatctacatacacacagaaagaaactcaacactcacctcattctttttgtaagcaaggccctctcttctccaaccaacagcacctgtaacttgtaatgttgcatttggaacaggtttgtcttttggctgtaatgaaaagaagcttatgaatgcaaacatatctagtgaagaagcaacataatctctatttattgcgggaaatactgcttaacttcgaagaaccacacaccaacacaattacaaaatctgttgtatacacaaacaaatagatgcctttaccttcgatgaaaatggtgaccgtacaccttcctgagtgatataaagttttaaaatttcaggtgagagattttgtggatagccaaagtccataatctctgcaattcaatacaaaatatcattcattggtgttaccacaaaatagaataacatataacgactaatgcaactttacaagtgataagaaagtgatttgatcatgaccctatcaggcttacttaccatccaacaattcataaatcagaacaaagttatttctaatagcgtcttcatcaaaagctccaccaaagtatgatttgaacaaagctacagcctgaaaatgtgaatcaaaagcagtatgtgtatagaatcaatctgactctcttgaaatttgaacaagaatcaaaacaattgtggaatattaaaatgaaacacaaaaacaagtttacctcaacaacaaatttgaatccacaagcaacattagcattgctactgacaacaatgacgatgtagacattgctgattcgcatataaacaaaggagcagccaccaatctgacgcacaggacaattccctaactctttcgtctgcattatatgcgtacgaaatgcatccaccatgtttcccctaagtatcaaaatcaaatcaaaattttaaaatctcaaatctcacagctaaaatcctacaaagtacgactacttagaagcgataagaacaaaacatggagctgaaaatgaagccgaattcaaaaaattaaagagatcgacggtgaagaaaaggagaagctctcttacccgacgtcatctcggtaggtgcgatttatgagtacatcgccacggagattcagaaaatagatggcggaagcagccaccggcatcttcgatctgagattcgaaacgcagatcggataattagacgatctggttacaggagatttgagatttgaggttcgacgagatctcgacgacggagcaaaggaagaagacgacgacgaagaagttgaacaactgaaatgcgatatttttttaatttcttttttatcaaaaaatagaaacaaaattgaattcagtcgtcattttggaatgggccggtcttattcgattctgggcctgtgcgtctcaattatgggcctgtagtacattatatccttcatcatttttaattgttgtttacatatgaagaatggttaggtaacaaacaatgtatagaagttcttaattttcaattattaacactaggtgatcacctgcgctacgccgcggtattttcggatttttttcgtattgtttaatttaaatataatttttatttatctaattattcacttatacaataaacaattccttttaattttaaaaatattttttctaacaacattctcaacaatgcatcatacacataattcataaataacgtttgtattaaaccaacttaagagagggtagttttggattctagaaacctaagaatttgatgatggagctccttacgtattcttcaacctcaatgatttattgtataaatataaatttaagagaatataatatcaatttaagaaaataacttactcaaatcattaaataatccacgactattatatactcatactttgagtttggattacaaaaaaaaatcttcgagtatgagaaaactattaaatggttttattgaaaaatcatgtaatattaaaataaatttagtaatactataattaaatatgtaaaattaaataataaatatatcattaacttataaattagaagttgaagagcttacattaattacttaatagacacatggcaaatgctaaaatgatgatgtgtcaatcatttggagagagttagccaactttcatatatatgattaacacgaaacttttcgaattttttttgttcaattctctctgatgtcagtgatgtgtaaaagtaaaactgtaaatgatcgcaatttttttttttgttcactcacgagagaaaaaaaaaatgtggaatatttatttagtatattaatagaaaccgcgccgttaatgataaaaagaagatcttgctcgatccgtctttgatccaaaaaaaaattcatctttctataatttgttgcagtgcataagaagattaacacagtgttcacgagagagagagattaaagacagagatttctgggttttaacagtaggaaatgaatattgttggattaagaagcgatcggagaaagtagcaaaaatcgggagaggaaagggatattcgaaaaccctaattttggaagatcattcatttgagagaaaagctgttaaatttgagggctttagatcgaatttgatatctggggttaatg

SEQ ID NO: 32952 - DNA, 3000 bp, Unknown; identical to SEQ ID NO: 1651
  misc_feature (1)..( 3000): 2750-1469P.txt file - cDNA_ID_3063547; gDNA_ID_1620431; Annot_ID_156859

SEQ ID NO: 32953 - DNA, 3003 bp, Unknown
  misc_feature (1)..( 3003): 2750-1469P.txt file - cDNA_ID_3063567; gDNA_ID_1620431; Annot_ID_156863
aaaattgttgttatccactggaaaaggtgcgtctgcttcttttccatctttataaactgccaaacccgtggctttctgtgcatctatgtcttccaagcaatctatataaattataaacgcatgacatcatggaactaagacgcaatatacatttcttgattggtttacataaatgtaaaatcaaagtaaagcggacacagaccttgaaggccaagtttagaaagcatgagtcgtccgccaggttgcataaactcacccatcattctttctggttctctcatgtccctctcgatcacatgtactcgacgcccatcctatagtcggatattagcataggaaaatgattgtgtataatatttgtattcaaagccgactctgccttaaggtattttttcctatattcattcggtccctttttgactaaaatgttctcgtagacttgtaatctagtgctagaggtattataacgtggacgaaaaaagttctagagttacacatctcctaactcaattctcattagttttccttttaaagattcctaattattgcgctttaatttgttcttatatccttaggcgtttttcaattcttagagccgattttgattgtgtcatgcaaaaacaaaatattgcaatatctatcttgccaaaaaaaaaacatacataatgtgtataggttttatcctattattaatacggagattttagtacaagaaagtagttaataaaagtgtgatgcagatttaatatttggacacaaagctatgacgccactttacataccttagcaagagcatatgcgagagccgaaccacctacaccagccccgacgataatgacgtcagcagcaccgtctttttgatcctcagccaccgtatcagccaaatccgtcgccttcttcttcatgttggtaaggtagaacaccgtccacgtcagcacgaaggcgactaacgtccataaacaaacgtgcgtaaaagccatatataaccaaatctatttgttctcaatatgatttatgagtttttaaaaaaaatggcttatgagatagttgtggaaagaggagtgacatatatatagttcaaagatatgtcagtttgaacgtcgcattattaccacatgctcgttatcataatctcggctgtcaaagtttgacataaaagaaacgataagtttatatcagataacaaacagaagatattgaccaccctaattaatgagtttttgttactatatagaacaagcaaacaaaatgcaccactcaaattattgacattttgactattttaattcatttaagagtttcaaaaatctcaataatttgctaattatataaaatgtcaagaagttaactagatgttttagaagagagatgcagattcggcaggcggttcttgggaggatcttggagagcaaatgtacagggtccaaaataattttacaaatttttcttcacactttagggtctttcgtttaaaatcatctttattgtaggcttaaatatataatagtacagaacccaatattctaatgagccggccctgagagattcgatacttggaccgattacgaacaatgggaagtgcataggcgagaggcgagccgccaacttcggctccaacgatgatgacgtcagtaccatggtcttttctcatctaccgcattatccacaagtctgttattatcttgctccagatggctactagggaaaatgtccaagtcaacacgatagtttagtagcatctatcactacaattaacggcaaatccatatctataagggtttagggtttaggatttagtatttgcctgttactttagtctttatatggcttttaagagaatttacaaaagcacaaacgtgacatcatcacatacatgattatatccaaacttctgataaatcaaaaagaaaatcatagtgaataaacacatttcacaatgaatgatgtcacttcttgtttcgtgttccgtttaatgttgtttctatttttgtcaaaggtcgacgtaaaatatcgtttcgccaaaaattgttggagactaattcattttttggctgctttccatgaacaagtcaatataatcctcaccacataactttatcaatgattgtgattcggtgtccatattttcttcatatatatcttatctacacataaattcactatcgtcttaaagttttcttcttcacatttactctgtcttggaaatatagagttattgggagggaagtcaaaacaggaaagatcaagaaactaaacactgctcctaagaaactaaaataaaataaaataaaaattcctacatgcaagataattttcatagcgttagacgccgtacggtggcagacttctagtcttgttacatcaccgtcaccctctgattttctcgtcgtccagtccaccgtcttcaaagaaattattatgacttcaagacaaaacttctagtttccaaaaaagaaaagaaaagataagagctataaacgagtcagtgtacttaaataaacgagtcagcgaaagaatgtagcgttccaatatattaaataaaacaaaattatattcatatacccttatgaaaaaagcataatacttcattatttgatgctcattgctcatctcatacacaaaatcagattcataagcaaaggcgacgacgatgaagaatgactaaataagttgaaggagtcgtctccatgataaaccgtaaccaaaccctgcgacattctattgtatgtgtatcttttttttctttttttttggtcataattgtatgttttttttgtttcttggcattgtcactgaaaattataccttttcatttttgccttctaaataacccaattgtgttactttacagaaaagcccatccaacgattatttttcttcagcccattagcccattaacttcaggataaagataagagctacgttcaactctatggtcagaaaaatcagagaaagaaagaaaacagagcaattacttgaagaatccataggaagctgaagatg

SEQ ID NO: 32954 - DNA, 3003 bp, Unknown
  misc_feature (1)..( 3003): 2750-1469P.txt file - cDNA_ID_3063577; gDNA_ID_1620432; Annot_ID_156884
atatttgttttaaattttaaaaggaatcatggaagcaaattgaagactcattataagattgttcgtcttgtttgagcggttgtagaaatagatttggggaacttgggtttcatttagaaaacaatcctgattttcttttgattatcctcaaaacaaagtcgttttagggatactaatagagtcgttaacaagtgataatgaatgttataagttcttttaatgaatgatgacaacatgtttattttggcttggtcaacgaacttctcatgttttaaatggtagtcaacgcttagttcatgtttaaaatggccacatataaagtcgatgtttaaaatagccacaatttaaaacttgactaataaagtcgttaacggatgataacggacgttagaagttccgttaatgattgataacggcatgtctattttggcctggtcaacgaataatcatgttttaaaagttagtcaacgtttagttcatgttttaaacggccgcatacgaagttgatgtataaaatggccatttttttaaagttggaggattaattgacattttgaaagttggaggatttgtgtgtgtgtttttaatccaagatctgcttgtttatctgaatcactacatttggtattttattcccatattttatagaaatgtattggaataaattcatattttttcctttaactataatctcataatatattagattatttaatttctttatttgtttttttcaaaaaaaattaatgaaggatccgaatcacagatattcatttaattgtaatatttgttaatttactaaattaccctcacaatgttgtagttcacaaaatgcttcccaatttataatatatatatatatatatatatatatatatatatgttttttagttattatagactacatcacaacttaagataaagactaagacttttgcatcaagcgaacaacaaaaccagaaattatgcttaattaagtgtcagtgatcgctatataaacaaaactttaaatctcttacgattcaataaaaataaggaaacttcatgatacatcacaaattcccctaactctaattataaaagaatatgagtaaagaacatattccaaaataaaaaatttaataataacaaaatatataaaagacatattatttatttttttctagttattatagaccacatcataacataagataatgacctctgcatccaaagcaattcacaacaagaaactatatcccattttgggatttacttaattaattatagttacatactttatctcgtatgcttacgagcccaaaagaccttcccgttgatccgcagctttactgaatcattttctgataaagaccacaattttaccgtttcccaatggttgagtacgcgattcatggtagcgaccgagtccaagaccagcttcgcaaatagtgcttgctcttgaccatcgtcatgttgcatgtcaatgccttgaacacaattttctccatattgttcggtgaaacattgcttgatcacctcttcttgcgacataggaaccccacgaggaaacgttatatacaaggtccgttcgttagcatccgcgatggagttatccccaacagagacatcatgcatcatgttgatactcacggaagtcggatatagggaatgatgggaggatggtagagtcttgtgacaggaggatgagagggtggtggagtctgttgatagaggttaatcaaatcacacatatatatgcaggaaaattgtaaaacaatttagtaaattatttgtactatattataactggagtaaattataatatattataactataatttggatactatgatttttttcttaattaaagtggtcaattagaaattgtcacacgtctctatgcatttgtatgcaatgtctttacatatgatatgggcatatttatgatgtgctttaaaaaaagaaaactatttatggtgtttctttttatcacatatcctctttattcatatctaattggattatttcatgtttttatttattctctaattttgtgattttgttataagaattgctaaatttatttttgaataacttgtagaatttttaaccaaatttggatgacacttatggttaaaaaaatatgatatttgatttttcttttgtttcttttgaatatcagttattaccattaatgtcatccaaatttatggaaaaaaaatctcaacaactatatttacaaaaaaaaaaattaactatgaaaaaacaattttcctaataaacaaattttgaatacattatcaataagaaattgtcacatcaatttcgccatttattaaaaataaagaatatgtttgcctaaaccaacatatatatatatatatatatatatcttattttattttcacatcaaaactaataaaagttggttttggcacttggttcgtcgagcttaatagataaataaaattgaataaattaatacttctttttatattctatttttttatagagtaaataatttttctagatatgactgagactacatcttatgatttatttgacacgtatcacgattctgtgagttagcaagttcggtaaccaaaatttatataataaaatgttaccatgaaacatgaaaatcaatataatcgcattaactaattatctaaatcaataaaaacattgtaccgaaccaatgatttaccaaattgaaatcaccgatttaaaccgataatcaaacaaacaaaaacatctttaaccgatccggttattgtttgttatcatcaatattgttcaaaggttaaagacgaagatatctaaagcccgtcgacatttcatttccgacagcaaatttgcgaagtcaaatcgcgtaatcaaacttcagttttgttccgttttcgaattctccatttcgtataggagatctccataaaccctaatcccctcagagtgcatctaacattcgattgtgtttttctctattcaaagaagaaattttcatggttttctaaagcgatg

SEQ ID NO: 32955 - DNA, 3003 bp, Unknown
  misc_feature (1)..( 3003): 2750-1469P.txt file - cDNA_ID_3063581; gDNA_ID_1620432; Annot_ID_156881
gaagtttggagaacggatcctgttgaaggagtctgatcttctaccaaagaaacttaagaagaaaacaagaagacgtgtcgcctcaagcactatgaacacaaataagcagttggtctgttctgcggactggcaaggtccaccgccatgggactcatctttaggcggtgatggctgccctaaatttctattggatgtgatggtatttgaatcaatttctgttttctgttgctcttttgtttcttggttttatttaattagaggacaagaatttgatttcacctatttagtatctttgtttttgaatctaaccattttcagtagaatccatgtggtatcataatcagtttcttgtaaaactactttataggttgaaggtttggcgaaacatctacgttgtgtggggattgatgctgcaatcccacactcaaagaagccggattcaaggtactttatcctaaagctgctattaaagtttttctgtgacatggggttttgatcacaatatctgtataggattgattttctaattgtgatgttgacacaaatgccagggagttgcttgatcaagcattcaaagagaacagagttctattaacaagagatacaaaattgttgagacaccaggatttggcaaagcatcaaatatatcgagtaaagagtcttcttaaaaatgagcagctacttgaggtacaaacaaagttaattttcaacgtataagctgttatgcaagatctgtgatgtggcatgatttggtttactagatttattaatcaaaaaggacacataccctggaaattttgctttaaagaataggatctctcaagacactagttaacaaatttatttttaaccttactttctgggtggaacattttctacactacctgtaattatggcatgcttggattcaccgagccaaaataacctcgtccactcactgtgcaaccacttttcttacattcagtagaatgattacggattttttgtgaattactgaaacaaataagcttcgcaggtgatagagactttccagctaaagatcagcggaaatcagctgatgtccagatgtacgaagtgcaatgggaaatttattcagaaacctctaagcattgaagaagctattgaagcagcaaagggtttccaaagaatacccaactgcttatttaacaaaaatttagagttttggcagtgcatgaactgccatcaactatactgggaggtaagtcacctaccccatcttttgccgttgtgcattatagttcttgaacgagtataccttgtgtcaaaaaatcatctggtccatctatgttagttgttttgctgattgaacagtcaaattttagttgcctaacgatatttatcaaatcagtgatccaattaatatttgtatgaagtcttagttggtgaattgaatcttgatttctttaaaacatcttcatgtgttcatgtcttagagcagaaatcatctccacaagattcataacttcctatatagctctgatctgttctgtctctaatagtcagtgtccgacatatttaatgtttgttatgtggtttcagggaactcagtatcataacgcagtccagaagttcatggaagtatgcaagttgagtgagtgattcactttttttttttttttttgggtttttacaattttggtgaagtgttcaatctctcgttacctcagttcctcaaatgtttttattttatatcaaacgtctctaagcaaacaagatgtgtttgtaacttgtgtcgtttgcacacatgtgttccagaggttattaaccgtgtacaaatgttttagtttgttttacaaagttgaacacattactatcttatgagaagaatagacttgtagtattttctatttaccagttaaattcttgcataattttcaaagtggaatattattttcaatatgctttcttgagatgatggcttttctagccgtagattcatgcattttaaatatgatgatataccaaatttaggtattgtggattggattggtctagttcattagttaggcaaaaaatttaacctcatcaaatcaacattacctctcttcctaattttctccattgaattcttgttcaaccattttttttctttcactagcaaatacggtgatgaactcgaaaatgatatctttgcgacagatgaattaaccggtataattggaaagcgtttcttgagcatcagtgttcctacttgaggaagagttgtcttgtagacctaaacaagagatcaattgccccaacacgaaactatgtagatcaaataagtatttagttcactcttctttgctcacttcaaatatgttttagacttattagaaaatccggtgagtcagatattcgacgggcacattcacatcggaattaatagtttcatagggtgttgtctcttaaatttggaccgaccggttggattgcctatctgccgtataaagaaaataagacaagagaacattaatttcatggttgaaccggacggttcttggctaaattgaaccgaaccgattgatttcagaaggtatgtataactttttttacggagtcgtcatcactttctctgctcgtcggcgaagttcacattcaccggtcgtatagtgtcttcgtctccttcctcgtgaaatttgttcatcacagtctctacagtcaccaccataggaggtcgtaccgccggatcttcgccacaccattaatttctgcgttctctcttctcaattcgccgccgatctctctgagcgtaattaccaaatcgtgcttaggtatgtcatcaaatcttgtctcacaccttccaattcatctccatgcactaattcattaagtaattagtcaagggtttaattcaaactttatggttaaatcgacgagagtgctgatgttttggggttagggtgtgaagaaaattatattgattctctctctctctctctcctgctaattagatctccttctcctagaaactgctgtgaggatcgatctcgattgatcatg

SEQ ID NO: 32956 - DNA, 3000 bp, Unknown; identical to SEQ ID NO: 1668
  misc_feature (1)..( 3000): 2750-1469P.txt file - cDNA_ID_3063599; gDNA_ID_1620433; Annot_ID_156913

SEQ ID NO: 32957 - DNA, 3003 bp, Unknown
  misc_feature (1)..( 3003): 2750-1469P.txt file - cDNA_ID_3063602; gDNA_ID_1620433; Annot_ID_156912
tcagttgttgatttctcgattccagatctattaactccttcatcgtcttctgctctccatcttcgatttcttcttcaacgagcttcttaccctcatcatcttcttcttcttcatcctctatcaaatccggtacaatggggaatcgaatcgagctctttagcagctcatcatcatcatcgtcgtcgtgattagacctaacatcacacgatctgcgtcgtggctggtccaaaacagaagcggatgcgtcacgaacagagtaggagcgaacacggcggagctcagtggaagctgagacagaggaagatagagcttcgatggtagagagacgttcacggagacaggtggcacagaaaccagtggtgggtttggaagaaggatgacggtgacagacggcggagtgacgacggcgacgacgctgatgggtttggtgggtcatagctcacagggggtggtttgagttcagtgaatggaagaagaagagagtgaagttgaagaatctgtcagtcacattttcaggatctcgagaagaagaagagaaagagagtcaagagtggcgttgtcaacactacactaaccctttccctttccttaaaccttttctctcgttttattatttcttcattttaatgcgtattatatttatttctgtactttcttatagttaatgaaaaatacagaaatgagttaatgaaaatagagagaaaataatgttatgttttttgtacaaaatatcaaagaaaaaatggtataattgtgtcacatgagagtggcagagagaatcaaaaggaagaagtgtacaacacatcccataatgggtctgacctctggtatttgtaggacgaacataaaagactcttaattagtgaaaatattaaaattaaatggatagacctaaaagattgaaaatggtgaaaacacgtgtgccccatttgttttcttttaccttgggtggtaatatttggctgcttccgtcatttctttggattcccttcgaatcgagaaatagcttcaatgtcaacttttatttattcttctttatttggtttggatatattagagttctgattagtggagtgatttttaccaagaggttgtttagtgcaacaagatgtaacatttgaacaacacgctttactttttgatgcaacgacataaactagtttttgaattaagtgggtttgttcaaatgttacatcatttgttacctgaagtgtgttatcattcaaaacaatatttcattgttatcgtgaaaacagagaaaccactctttacaatggttttaatagattttaactatgacatttacctaaaataaaggagatttattttctctaaacgtttgtggacagcaatggctgacgagtgacattgagattcggagttacgacaagttcccaaagagtatgtgttcttttattaaattgaaaagaaaaaaaaaaccatagcaggtcccaaaaatacacagtagtaattgtttttgtctcaatgtgattgtaccggttttgttttctttctggtaaacaagattggaattttccgacgactttgtccaccacagacagaagcaaagtttagttttacagtgctcaatcgaaacgttaaagaaagcaactgctggcaaataaaaattttaatatggtaaaaagtaattaattattttgggctcaagattgtaatttggagcccaataatgttagttgggcccaaaaggaaacaaataagccttttaggattttggccttttcttgtgcaactgtaataacgaatttgccactcggaactttgccgtcgtcatcgtcttcttcgttcatcttctaccggcgcaaagaatacaaattaaatatcgctgagaaatgtgtccgtgagccttgaattccatgggaattgagtatttcaggttattgaagctagcttccttgtcgaaataaagggcatgttccaagttttgtatatcgtatacatcctttctgctctctttatattgggagatcgatgagatcgaccctaaccgagtcgatttggtttgggtcgatctcagatatctcccaatactttacaacatacatacaactggagaaagaaatcaactttttgtttgtcatagcaggtcagtctcattgcttatgtagtttacttttcggtgtcttactattatgcaccgtttagatgattctgtggcaaagtagtttgtacaaaagactcatctttcatcttaaaaccgtttagacggacctcattttacttgttggtggagatcatgcatacaacttgcagctttaaatacaaccatcactgttccttgtcaagagaaaatcttgcgtttgtctcctctttctgattctctactggatagaataaaagaatcaattaaacatttccttgttcatgtatagaaggtgcaacctaaaggcttcttctacattagatcctctagcgcagaggtatggattccgctgctcatatcactccttgagttgtaactgctttctcgatgagtataggatttgcatatagttcgattaagttttagttttggattaattttgactctgttacttagagaagagaggagatttcaaagacatgttattagttctcttttcttattctccgtcatccttagactataaaggttttaacatcaatgagtcgttttctactctcgagtcttcttgtgtggaaaagtcaaaagtatacaaaatactcagaataccatcatttgttcattttcattgactatgaaaatagaataacagcaaaacttgcaagaccaatcaagctctttgaatcggtctacaacacattaaagaacatataatttatatttctattgtatgtacagataataatggatcattatgcttatattatatgcacaaatgtatctggcgtttaacaaaaggaataagaaacatacatgacttcaacaaactttatttcttggaatttggacatctgacataatattcacttctttcctataaccatgtctatagacacatg

SEQ ID NO: 32958 - DNA, 3000 bp, Unknown; identical to SEQ ID NO: 1669
  misc_feature (1)..( 3000): 2750-1469P.txt file - cDNA_ID_3063608; gDNA_ID_1620433; Annot_ID_156907

SEQ ID NO: 32959 - DNA, 3003 bp, Unknown
  misc_feature (1)..( 3003): 2750-1469P.txt file - cDNA_ID_3063620; gDNA_ID_1620433; Annot_ID_156901
taaatattcttcaagaggtcaccggagaaaggtgtggttttattaattcattctctaatctatgattggttataattagtttacgttatgaggattataaaagtgatatacacatatgtatactatagttccatagaaggtcgtttggtgagaagttacaagaggagtttcaacggtttctcggccctactcactgagtcagaacgagagggagtagccggttagtgttcttagatcgagacacattttatgttgaaatgtttttaaagatttaaccatttgaaactcttttgtgttgttagaaatggagggagttgtgtctgtgttccggagtaagaactacaaactccaaacgacggcgtcttgggacttcatgggaatgaaggaaggtaagaatacaaagagaaacttcgccgtagagagtgatactattatcggattcatcgacagtgggatttggccagaatccgagagcttttctgataaaggctttggtcctcctcctaagaaatggaaaggtgtttgtaaaggtggcaaaaactttacttgtaacaagtaagtcattaaaatttctctaatagaagattagtattgttttaggcagagattgatgtgttcacaatttcagcaagttgatcggagcaagagactacacaagcgaaggcactagggacctccaaggacatggtactcacacaacgtccacagcggctggaaacgcagttgcggatacaagcttctttggaataggcaatggaacagcgagaggcggtgttccagcctctagagtcgcagcttacaaagtctgcaccataacagggtgtagcgatgataacgtactgtctgcgtttgatgatgcgatcgcagacggtgttgacctcatcagcgtctctctcgggggagattacccttccttatatgcagaggacacaattgcgattggggcttttcacgctatggccaaagggattctcactgtgcactcagccggtaacgctggtccgaatccgaccacagttgtgagcgtagcgccgtggatgttaacggttgcagcaaccaccaccaaccgtaggtttttaaccaaagttgttcttggaaatggcaagacacttgttgtaagtatcaagtaacattctcattttcatcatcatagtatctttgtcccattaaattaccaattgggttttcttaacaggggaaatcagtgaatgcttttgatctgaaaggaaagaagtatcctcttgagtacggagattatttgaacgaatctctggtgaaaggaaagatcttggtttccagatacttaagtgggtcagaagtagctgtttcattcataactacagacaacaaagactatgcatctattagctctcggcccctctctgttttatcacaagatgactttgactctctcgtctcttacattaactccacaaggtacctagcagtcttctttctatttcattactcttaatattctccttctttgtcctctgatacccttgtgtttgctttctcaggtccccgcaagggtctgttcttaaaactgaggcaatctttaatcagttatctcctaaagttgcttctttctcttcccgcggtccaaacactattgcggttgatattcttaaggtatcatattatttatgctcttgattctttctttttttttcctggcctgagagacaatggttggtggatggattgcagccagatatatcagcaccaggagtggagattctcgctgcgtattcacctttgagtttaccatctgaggacaggcgcgataaaagacgtgtaaagtactctgtactgtccggaacttctatggcttgtccacacgttacaggcgtggctgcgtacatcaagacatttcatcctgattggtctccttccgtaatccaatctgccatcatgacaaccggtaaacaaaagtccaacttttactttcttgcatcgcaagtaacgtgtgttgacaactctgttcttatactgtctcttaatgaatctttgcagcttggcagatgaatgctactggaactggggctgaatcgaccgagtttgcttatggagctggccatgtcgacccaatagccgctataaatcctggacttgtctatgagttgaacaaaacagaccacatctcctttctctgcggcatgaactacacttcgaaaacccttaaactaatttcaggtgatgccgtcatttgcagtggaaaaacattacaaagaaacctcaactatccttcgatgtcagctaaactttcggaatctaatagctccttcaccgtgactttcaaaagaaccgtcaccaaccttggtaccgccaactctacatacaaatcaaagattgtcttaaatcatggatctaagctcaatgtcaaggtttcgcctagtgtcctttctatgaaatcgttgaaggaaaagcaatctttcacagtgactgtttcgggcagcaatatcgacccaaaactgccttcgtctgcaaatctaatatggtctgatggaacacataacgtgagaagccccattgttgtgtatattgatggttactgatgaggcattatcagttcaccatagttatcaatcatcataacattttgctatacatatatttcttcaaaaacatgtctactccatatacgttttctgattatgtcatcataatgcaaaatgaaaataaagtactaaacgatcgagaaaaaaacagttgtaaaaaaaaaaaagattttgattaaggagttgaagaaacaaaaacaaaattgagttctaaatagatgtgaccaaataaaaagtagatatctatttcctaaaaatgtatttggtcaacatacgatacttctagttaccaaaagagttttgctcaacatacaatcacagcatttgacagaaatatcattaaaattactaattttatactagtgtataaattatatcatgttgatctcgataaaaactgagaaattagacaacctttaattcattttataagaaaaagatg

SEQ ID NO: 32960 - DNA, 3003 bp, Unknown
  misc_feature (1)..( 3003): 2750-1469P.txt file - cDNA_ID_3063628; gDNA_ID_1620433; Annot_ID_156899
cacggtacacacacagcatccacagcggctggaaacgtagtcgagaacacaagcttctatgggattggtaatggaactgcgagaggcggcgttccagactcaagaatcgcagcttacaaagtttgtagcggagcaggttgtagctcggagtacatactatcggcgttcgatgatgcgatcgcagatggtgtcgacgtcatcagcgcctccctcgggggagacaccgcgtacatgtatgaaaaggacccgattgcgataggggcttttcacgctatggccaaagggattctcactgtgcagtcagctggtaacaatggtccgaatccaaccgtgagcgtagcaccgtggatcttaaccgttgcagccagcaccacaaaccgtaggattgtcactaaagtcgttctcggaaacggcaagacacttgtcgtaagtaccaagaaacgttctcatatctatgatcctagtctccttctcattaacgatgtctctttttttttataacaggggcaatcagtgaatgcttttgatctgaaaggaaaacagtatcctcttgtgtacgaaacatcggttgagaagtgtaataatgaatctctggtgaagggaaagattgttgtgtgaagttatgcgattggttcacaagtccctgttgcattcatatttagagacaaaaaagagttcgcctctgttcaaccttggcccgtctcttctctatcactagacgactttggctctctcatttcttacattaactccacaaagtaacgaacaaatcatctccatgtttcatactcttatcatgtggtctggattctcattctttgtcttgatatctttgtgtttatttatctcaggtccccgaaagcgactattctaaaaagtgaagcaatctttaaccagacagatcctaaagttgctggattctcttctcgcggtccaaacactatcgcggttgatattcttaaggtataacatttgtatgatgctacctaattctctttcgtttcccagcctaagagaaaatggttgattgaattgcagccggatataacagcaccaggagtggaaatcctcgctgcttattcacctttggtttcaccatctgcaacaacgttggacaataggcgtgtgaactacactattacctcaggaacttcgatggcttgtccacacgtttcaggtgtggctgcgtacatcaagacgtttcatcctgaatggtatccttccatgatccaatctgccatcatgacaaccggtaaacaaaagtcatatacatctgttactttcttgtagtacaagtaacagttttgttgattactctgttcttattatttactactctttgcagcttggccgatgaatccttctggaactgacgcagtatcaaccgagtttgcctatggatctggacatatcgacccaatagcagctataaatccaggactcgtgtatgaattaggcaaatcagaccacattgcctttctctgtggcttgaattacaatgcgactaccctaaaactcatcgccggtgaagctgtcacttgcactggcaagaccttaccaagaaacctaaactatccttcaatgtcagctaaattgtcgaaatctaaaagctccttcaccgtgactttcaacagaaccgtaaccaacgtaggtacctccaactcaacatacaaatcaaaagttgtgataaatcacggatctaagctcaaagtcaaggtctcgcctagtgttctatccatgaagtcagtgaacgagaagcagtctttcacggtgagtgtttcaggcaacgatctcaacccaaaattgccctcgtctgcaaacctaatctggtcagatggaacacataacgtgagaagtcccattgttgtttatactgattatgcatcatcagttgacatcttttaagtttaaaatcaaatttcccattgttttatttcatgacatctcgtttagtatacattaggtttaagatgaaagaatagtaagtactgtaactcattttgtcattgaattacaatattatgttattggtttattgattctacacaaaatctaatcatcaaattattgtatcttgaattcttgataaggtattctaaaagcctttgagaatctacaagcaaaactaatctacgagaatatgcaaaactctttggcaagcatcgatacataccatttggagagaacgcaatgagcgtaaacatggtacaagacccaacccatctagtcgtcttatcaaatggattgatagacacattcgcaatcaactttcggctctcaaaatcagtggcgatcagaaatacaacaatggactccaactttggtttgcatcaaggaggatacattgagaacagtacctaagagtttctttttaaaattttcaaaacttctttaaaaattgttgtacttgttgtaaaaacgttcagttctctttttgaatctaatttaacattaaattcaaaaaaaaaaaaaaaaactctttagcaaaactgttaccaagacgattgaaaagcgattccgctatatattacttgcgttaaaatataactagaaaagacataacatgattaatccacttaaactcacttttcagcgttttataaaaattctacgaatattttatccatttaagttcgttcgttaacaattattttgttattccactatttatctgacattaccactcaaactcaaagtaataatgtaataccaagtgttattgtaataacaagaatcaaattttggtcaatatacaacgatatataccaatttcctatatattgtttttggacaaagccaacgatatataccatttgatccagtcatccagttatcatcactaaaatctactatagttggtaatggttattcttatcgtaatttacaaataaagaaacagaatcacaaggatttcattggaggattttttccttgaggcatgagtcaaatatttatacataaacaaattgaaagtttgtttcattgtcttgaaagaaaaagatg

SEQ ID NO: 32961 - DNA, 3003 bp, Unknown
  misc_feature (1)..( 3003): 2750-1469P.txt file - cDNA_ID_3063665; gDNA_ID_1620434; Annot_ID_156954
ggggcctcgggatttttgttatccgcgatatacctaatggtttggtttgctattatcttgagactcctaatgaaagcatcactcatggttaaaatgtaaatctatctctcactatcttcacaggtcgacgtttatggatacaaacgagcaagccttgtgttagagtggatgggaatacatgccttaccgatttacgttctcattgcttgcaatcttgtctttctaatcattcatggattctactggaagaaccccattaacaatctcgtaagttttactttcgtttttttttttaccgttattaacgttttgtgttggagttcaaaaatgttattgttgtttgcagcttcatttaatcggaatcggaaagtaaagaagagaagagaagggaggtgaagaaataagtttcatcaaccaaaaccttaattgtttttgttagaaataaacaaatgccatcttcatcttcacatcccatatggaatccaatttatgctatacttttgtaaacatacggtatatcgtagaaaaattaaaacttcatggctatataagcaaagccttttgtcgaaaatacacatgttggcaagttgtgggagccaccaacataagcatattatattcaaacaaatgttcaatcgcacatgtgatggtttagcgatttagctaccgcacaactgaatcaaaagacttgttaaattgctctcttagtcttatcataccttcatctcatatccattataatcatctttagcaatactattttatttttaactacgaaaaataaaccttgttacgccgttattaacagtgatcatttttttcgttaaagaaatttaacattcaaaaaagataaagaatgatcaccaataagcgtcatgatcttccgtatggtgatgataaacatcgtttgcagttttgttgtatagtacaacgtatatgtagccgtaacgtgtgaatagtgtatggttagggtcattttatttgtgaactaccacaattttgatagcagtggagataagtcaaaggttcgtcttctaattaattaacagcgattattagactatctaacttttcttcttttcttattttgataataactatatatcttctttagccaccttactttctcatcgggttctatttaaatagggacaaagaaaacaaaccatcgatttgtactatgtgctcaattatatcatatgttttgtctccatctatgtatctatttctcttttccatttggtaaattatttaagacccttaaactgacttttctcgtgggcggcgtcgaagttttggttaacagacaaaacatctgttcatgatgcctgcataactctatgtttttatactactcatttgccctctatttcatgctactcttaaaaatagctaaataaaaatacttcaatattagaaaaaaaatcttcttgatgtcaaaaatacactttagatatcccctctagttcttgtgatgctaatatattacaaaattgtttatatatatagaaatattacctctagcaatacaaaaatcttgttatatcaattaaatataacactatccgactagtgtttactaaaataacacataatttttaattatgatctttgaattttagtttatgtattacgctttataattttgttatcaaaaactataaaagctcaaaagtgagcatctataccctaattccgtttttatgcatacacttaggtttatttttattacgagaatctgtgtttagtatatataaaatagagtttatgaatgactaagttaaatacttcaatactaattaaagtaagtcgtattgatgcagacaatataaactttagatatctccgctagtttgtataatgctaatagattcaaattgtctttatgtagaggaattacctcaaataacataaaattttcattttattaattaaatctcattttgtcatttcaaaagtcattttaattactgtgttatttgtctaaagtatactccaaacaagaaaccaaagtagaaggtcagtgcccaagagacaaataaacttaagcatgtccactctttttagcgatcggatcgcttatctgttcttatccattatggaacatgaacgatgttcctttaagactaccacattcaaacgaaaaataagtcatcgatgatagactggatagttatagtttgatgatctagctaattgactttcatatttacataaaacagaaatgtgtttttatcaaaaaagaaaaaagaaaaaacagaaaatgaacaatacatctcacatggagtttgtacaagaatccataataattttttgttcggtacagtaggttagatatacatttgaatacagtttacaagccaaatgttagaagcaacatatttatatagtatcatcaatatacgatccaaaatgaattatagattgacttatggaaaagttagatactatatgcatgattgccaaatacattgaaaaataacaatttaagttcttcaaacaaaagtttataaatgactcggtgtttgacataactcggggttgtttttctttgttaattcacacacggggttggtgtataaatgacttcggtgtttgaaatgtatgacacggtataaataaaaaaggtaaggaagaaatgaagaatagaagaagaacaaaaaaaaaaggaaattaaaaaaaagtcaaaataaatggtcagtaaaggattttgaccagaccggagcggtccatccatagtttcccactaccttccctgatttagcacagaagaatggcaatttgcatgccatttatttcatctattcctccttcactctataaatatattttaaacaaaatcaatttcttccatacacaaaaatcaaacaccttttgagagcggttattttttctctatcaactaatacagtaaccttacgggtgtttatttgtatagatctctgtggttttcttggccaaatctagtgagatctttttggtttctcgaattcgatgaaaatg

SEQ ID NO: 32962 - DNA, 3003 bp, Unknown
  misc_feature (1)..( 3003): 2750-1469P.txt file - cDNA_ID_3063669; gDNA_ID_1620434; Annot_ID_156953
tttttcaatgttccatatccgttttgtgatttatagggtttttgtttcgttgtttcagaacgtttgttgagaagaattacaaagatttgaagtctctaaaccctaaattaccaatcttgatccgtgaatgtagtggagtccagcctcagatgtgggcaagatatggtaaatttgctttatctcttatctctgtgaaggaaaattttgactcaaattgtttaatttttagagatatgaaaattaattgtgctcttttaaagatttgatatgaatgtagttacatatgtgacttcttctattgcttctgcattcatattttgtatggaggtgtctttataacatcttgtgttcacccattatacactcactatcgagccttgtacatcttgtgatgaaaatgtttcttgttgtgtttgatgtgaatgctgaaatttatggtttatgggattttctaatgtgggttgttctttttctttctcgcgattctgtttgttttgaattttctacagtgttaaattttggtttgtttgtttttaaaaaacttgacatgaatgtggtcattggtaataacagatgtggcttctttcttttgtttctgcattaagttttttagggaagagtcttttaacactatgagttaaccaattacacttaaagtagtacactcacactcacccttagagtcttggtcattgatgataaggaattgtgtataaccgctatgtatattggcttgtgctttataagatgaggattgttttcccttgtcccttgttgtgttttatgtgaatgccaaaatcttatggtttatgtgattgcctactgctgttgttcattttctctctctcgtttttgttttgttttgaactttatggttgtcgcatatcagccttaaattttgagtgagttttaacatcttgagttactcttaaagtacacactcacccttagactattggtcattaatgaaaatgcatattggcttgttcttttgaaatgagactggtttccctagttccttgttgtgtatttatgtgaatgccaaaatcttatggtttatgttatctcattagctgatccattttatatggtttccctgaccaaacatatcagtgtcttcagcaacttaaagtatttaagcatctgtgttgagtgaactttgaacatctttaaactatgttcccacactccgataatgtagtaaagtataatactgtaaatatgagagaacaagatgattctttttctttttggtgataaacttgttttacgcaacagtcatatgcgttaaaattgtcatcctcgattctacttcggaactagtatttataaatgtgtctgtttttgtattgcgttaattcgtgcttggcttgtgcagatatgggtgtggagaggtgtgtaaacttggatggtctgacagagccacagattctaaaggcccttgaaaaccttgtgaaatccggagctacaaaggcctaagtttgtttgtttgtttgtttttctctatatgatcccgaataagattaaaccgcaaaacaatcatttgacatttcctgtcattctactactttgtaactccgtggtgtcatatcgccttgcatttgagttggtttttttgtgtaatccttgaacttggaattaaaccattccgtataattgaaatcacagaaaggagaaaaataaaccatctctgtttaaactttttgttttaggggatgtgggcatgtcggtttttgaccgtgttttccgcaacaattcccggtccgatcagccggttcagtccggtttcaaaaacattgctaagagcgaatcaagttcgcaacctcaatagggtccaatcccaacacattcacgtgcgaagctcaagtgatctctctcaaccgttctcgttaacacgcatctgtttcttttccatattcacaattttacttacataatgtttttttaagtttttccgaatttatattccaaaataaatcagatttgatcttctctatgagattttataattacactacattttataacaaatttgaaaagttctttatttatatttatagtacagtaaaacctctataaattagtaatgttgggactgcgaaattttattaatttagagaggtattaatttatctataaattaatatttatcaatttataaaaagattttcctaatttggtaattttttgaaaatttctacaaaatttctttattatagaaaatatctttctagaaccagttacaagtaaaacataataataatgtctaaaaacagcaccaaaagtattgatacaataaaatatgaaaactatagtcaaacaaataacaaatatgaatttaagcaaaaaaattattataaatatattataaagaaatcttttacatataatatatatatatagttgatacatttatacaattattaatttatgatattgatggaccatatatttacataaaatttttttaaaaaattattatcttattaatttatcgatttgtgtcactttttacactggtcccaattcgggaccagaagaatttattaatttataaaagttattaatttatagactattaatttatagaggttatactgtaatttgaaaacatttttttatatattgaaaatgcaccataatactctttctatttatttaagcattttaaattttaaatatattatttttaattaaattcgtaaattatttattaataataaaaagttaagaaaattatttaatatgtttagattaatcattatctcaaattttgaatatatagaaatataaaatattactattgaaatattatttagatattaattcattaaaaagtaaggaattcaaaaaaaaaatgattatataataagatatgtctccaattctacaaaattataatacaaatttcaaatttctgattttaggtatatacaatctaattattcctcttccatgattcttttacaatcttaccttctcttccgattttagttcgaaatg

SEQ ID NO: 32963 - DNA, 3003 bp, Unknown
  misc_feature (1)..( 3003): 2750-1469P.txt file - cDNA_ID_3063676; gDNA_ID_1620434; Annot_ID_156947
ttcgttattaggcgtgtctaccgcatcaaggagaaccaccaggacgagcggcgggtgctgctgattgcttgttgtagctaacagatagctgatggctttttaggagtcagattgttcttttcatgttgatagaattgacatcttatacacatcactaaatgagctcatgaggaaataaacctcatcctcaagttgcagatatttgtatgaacaatacaggttttatttgttctttggtttgttgtaaatgataaaatatttgtttagtgtccacttttgttcaagtaccttaagactgagacaagaaaccagagcagaggcaaagcgcaaaaagatgcaaagtcttttctttaagcgttaattgataagcataagacacattacaagtaaaggttaagacaaatttgaagtgttgtatatctcccattccattcaaagatcaacaacatttagcaacaaaatattacagtgaaggcaatttgccgcagattctcatgtaatggccaacaaaatagcatccttgtattacatattgctacaccagtacgcatagtgttcatctctcctatggatgctcaccagaccaccgcattgcagacagataaaactgcttccgtcagcaaaggcatcgagcatgatctgtgacctcccacttttttccagaatagatatgccatgagcatctgctgtaactgtttgtttggtaccaaataagtcttttgacgttgtaggctcatcaagcgcaagaggctgtgcttctgtaatggcacactctgcaaatatagaagccagctgatccatactagctgtttcttgaattctacgcttgtatagttcacgggtacggttcagtatctgaagaaccgcctcatctcctccttggtttctcatcgccatcacgacctgttcagaacaagatagactgactcagagaagggttttataaagaaaaaagttcaatgcagtctatatacataaagtgaacgatcttgccatcatacatttccacaaatgcgacgaacactcaaaaactaatcccaattcaacaaggaagatacttttatcattctaaaagtctaaaagaagataaagaataaaattgcaatcttatgataaagaaagagatcattcttctaagatgttatatctgcttaatatgatataggcaatggatgaaggcgatgtgataggattcaaaccagtaaactacttctttattcacatccccaatgaagagacagatttgaccaagggatgtagttgatgctgctgtatctgttggcaactagacgaaggaaatgaatgtaacagatcaagcttatgatacagctataaaatctgtcgttataatggtaactaatgatcatagggatagaatcacgaaacaaaatctatctttgtgattcatcaagcaatacacaagcctccaaaaactagttgttcatccttatgcgagaaaataaatttaacttctaagtagtatttaatttcgattctgtgacttaagccacaaattccaacgaaccctaattctaaagtccaaagatagcaaaaagagcaccaaagcaaaaccgtatagatatagaacaattggaagaagaatgtttgaaatgcaaaaatagggaaaatttcggagatggaaaagaaacctagaagaaatcgaaaataccgcttggagagcttgagatggttctccttgatcgacgagcctacgagcggcggagaggaaatctctggcggtgctgggtttgtcgagcatgaacgtttcggtggagtcggcatccatcatctgcgtctcgggatcactgttcatggcgtaatgcatctgcgaatggagagaatccaaggaaaaaaaaagacaaggagagactagtagtgatgaaaacgccagaggattctagcaacttcttgtctcattccctaatttctccgacaaattatacctcttatgtaattcggaacactttcaatcaaaaaataaataattaaaaactaatctgaacattttcaagcaaaaaaaaagaagaaattcggaacattttcaagcaaaaaaaaaactaattacaaatatatttaacaaatcatggaacatagataatccttagaatacatattcaaaaaaattcacagcaatagggtaaagtgtaaatatatggtcttaattttgtagaacatatcaaattagaatttctgaaacttttagaacatgtcaattttaaaatgagtagaacatctacaatgtataaaaatacatgatctaaaatatttagaatttagacaaaaattagagaacatattctaaactttttagaacgaatttcaactattttttaaaaaaccagttttcgacaaaatcataaattttcttctctaacacttcttcatcattattggtcaacatatgttttctgatctgaacttggcataaatgttaccttctttttcggtgatatattgtgataacctggtattcactaaaaaatgatgaagcgtatagctctagacattgaagtctcaaaaatgggaaaggatcaacattgctttatcatcacaacgacaagatttttccactacttagcaggatttgcaggacaaaaccaatctctgttttcaagattctactttgattaatataaaaacatagctgttggttatttgttacttaacataaggcgttttactcatttttatatatatgagaatgtcaatgatctatccaaataatcaaacaaacaaaactctatttacatcatctagatgaattagcaaatgatcaaataaacaacattcacatgctggatgcaaataccaaatgcaaacgaataggcccttaaaacaattcaagtataccaaatgatcaaacaaatagacccttaaaataattaaagtgagtccatttaggtttgggccctccactaaattatcggaacagtgaagtcctctggtccctctgtattcaccaccacaggctcattgacagaaagagagtgggagagagacatg

SEQ ID NO: 32964 - DNA, 3000 bp, Unknown
  misc_feature (1)..( 3000): 2750-1469P.txt file - cDNA_ID_3063687; gDNA_ID_1620434; Annot_ID_156941
agtagacgaaatagcaagctgtgccatttcttcccagagatcttttctaagaccttcatcatttgatgcataaacaatagaaacaaccatccaggccgtagagccagggagcaagacttcacaagtaatcatttgaagtgatatcgcaataacaaccacctgcacactcggatcccaaacaacccaaatttttcccaaaacagagaattgataattctcagcaaaagaccagcccggcaaaagatcgttgatgaacttcttctcctttggctgtttaacatgagtctctataataccgccaaaaagtggtttatttacttggaaccaatttttaaaaccgcgtcggtgagaaaaaatattaaaaccgcggacattccaacaaaagagcttagtacacatacttaagctggggttttgaggctcttgcctcgaatgcttctacgttgtctctttgacaacacctttataaaaacctcttcttccggatcagatgaaacgacatcagaagaatcttcatccacttctgaattagaatcagaccgctgacccgaaaccttattaccagaatttgaaatgttaccatccagattgataatactaggttcacctacctgaagctttccaagaccaagattcagcccagaagactgagccaaaagtgaccctgaagtactcacgtcctttgtagacggctgagatgaaccattattcttaacagcccaaatcttgccagagacctctttacctttagtggaagcagaggtatcttgaacaaggactggagcagcatcttgcttcggaacagaggcctttttcggcgatctagaccgtcttctgctagaacttcttttctttttcgggccattagttttctgctttggacattgaagcgaagagtgagaagaggaaagacactcttggcaagtaataggggctgttttgcagtgcctcaagctatgcccaattgctttgcagaacccacaaacaggcggcatccatggacttgaaactaagatcctctgcaccgcacccgaatcgaattggacattcaccgcttcaggaagcggcttacgagggtcaatgagagtgaaaactctggccacttcaagattagttttattagcagtagccgggtgcaagaatttaggatcccctacaagacccgctatgcgctgaagcccttcttcatgaaaaacttgaagcggaacatttcttagttcaagccagatcggagctgacgtcaattctggttttgcaggtacaactcctggatcccattttgcaacgaacatagtttggccatctatctgccaaaggcgctgattcaaaactcgacttcgagttgaggagtttggaatgcgaaagagaaacgcatttcctgccatctttgacacaacaatatctctaaaattcttgctccaaataccattcacaatattgtggattgtgccctgagctgggggatcagaatagaactgacccagaacaaagcaatcccacgcttttttgtttcgctcaatgatatagtttggaatattgatgcaggcttcaccagaatcaagcgtgaaagttgtaccttgtttctgtaacggtttggaggatccttttacgagattaacccataagtcagatccatccttagtttcagtctttctggtctctgtgttcggcaaagacgcaacattcacaggaatggaatgattgattttaatcggttcatcatctttctggtttgcctcgtcaatggtcgcgactggctcagttggaattacaactttcacagtggcgtcaacatcttccggcgaaacaataataagctctgagtcgacaacagtggtatcaacaatcagatctgagtcagcaaccaagactatagaggggacagtcaattggttgtcgatggcgttcatcgaataaggagatggcaggacaatgcctgaattctcaactaaatttggcgaagtacttagcttggtcgaaagatccgaagccatgggaatagtagatctagagacagaacgaagagccagctttgaattcgacttcttcccttttgaaattgaggacggagacttcttcacagatttcttcttcgccatggagagagagagatatgaagatgactccgggacaggcaagcaacgccgcagcaaacgctgccgctgcagaacagaaaaagtaggcactttgaatcggagagaaacggaggaggtgagagttctcaccgacggcgtgaggccaaccggaggtggagataatgatacgaattatcgcctaaaaagcgccctcagatctgctcatgagcaaaagatcgttgatgaactttgcttgtttttgaaaaatgttggttttgtgattgagtgtttctgtatagtgctatcaaaatgtttgatgattttggtattattttgagttatatagtaagagataaatcgtttgtactaaacacgttatgtttgatcgtttataataatttcggcatatattaaacttgttaaagtgtatgtttaatctctgtaatttatgtttcttttggtgaaattatctttcccttgcgcgggtaaaaaactcatagctgtattaaataaaacaaactctagttgtattaaataaagcgactaggtgacgtgtcgaggcctgcgcgactgcgtttgccacgtctccgccgcctcctccgattcttttaccctaactaaatttgccgatgttgtcactcatcaccgaagaatggccgccgaaactagcatcaggaagctcccatctctctccggcctccgtcaccgacgtaatccactggaagataatccctacttccacccctccaatggcttctacatcactccttctgacgtcatcctcgcccaggtcgcctacgaccactccgcccactcccaatcacgcgtggcctaccacagggctgggcctcgccgtgagatcatgtacgagccatcagctgtcaaggcggcgatcgttacgtgcggtgggctgtgccctggcatg

SEQ ID NO: 32965 - DNA, 3003 bp, Unknown
  misc_feature (1)..( 3003): 2750-1469P.txt file - cDNA_ID_3063694; gDNA_ID_1620434; Annot_ID_156938
cttcttcttcttcttctgggaattgatcactctggtaaagcacaattggcacgtccaaaacgacaccgttccatcgaaagaggccacattgtgattggtgagcccaattaggaaggcctattttactaatgttgaagcacatgttgtactataaaaaaacagagtttattatctgtttctttggcttgacatgacaaatgtacaactgggagagaaagtcagtccgattgtgttggggatgacgatggcaaaagtagtaaataaggaagaaacaggaggggcgttttcgggagaagaaggaggaatatgagtgtgagttgttgttgtaggaatctgggcaagacaataaaaaaggcaataccttcacatcatttgcatctgagaagtcttggtgggagtctctatcgtcgtcgtatccaaagctcttcaatggagaccgatctcaagtcaacctttctcaacgtttattctgttctcaagtctgaccttcttcatgacccttccttcgaattcaccaatgaatctcgtctctgggttgatcgggtatctctctctcatcagtcagatcccacatatatatccttcgaatgctggctgattctctctttctttgcagatgctggactacaatgtacgtggaggtcagacttgtctacaacagcctctttctctctctctctctcgcttttcatcgatctcctttttttttctcacacttacttcttcttctccagggaaactcaatcggggtctctctgttgttgacagtttcaaacttttgaagcaaggcaatgatttgactgagcaagaggttttcctctcttgtgctctcggttggtgcattgaatgggtataccaatgataaagacttatcctttcaatctctattagtaatagatactctcctctctctctctttatgtcgctatcactcatcatattcattatctttgcagctccaagcttatttccttgtgcttgatgatattatggataactctgtcactcgccgtggtcaaccttgctggttcagagttcctcaggtaaagttttcatattttttgtcacgctgcagtccactagactattctaacacaatgttacaggttggtatggttgccatcaatgatgggattctacttcgcaatcacatccacaggattctcaaaaagcatttccgtgataagccttactatgttgaccttgttgatttgtttaatgaggtaatctgttttggcagatctactattctcttttccacttttgatattttatcctcagtctattattccatttgctgtctaggttgagttgcaaacagcttgtggccagatgatagatttgatcaccacctttgaaggagaaaaggatttggccaagtactcattgtcaatgtgagtcaactgtgggcattgtctaaattttagatacggtttcttctgatggttgattagatgaaaggcagtattctgacctgatgcaatggttttcaacttgcagccaccgtcgtattgtccagtacaaaacggcttattactcattttatctccctgtgagtatggattctcttcttccctagtcatatttggggtcaaaaacaatcatgttattccttttgtctccatcattgcaattgtagatcccgtgacaagctgtgtttttctattcaggttgcttgtgcgttgcttatggccggcgaaaatttggaaaaccatattgatgtgaagaatgttcttgttgacatgggaatctacttccaagtgcaggtagattgctgttaagtattcatgagagctatatgataggtagtgttgggatgttgataaccattcttttgtgtaggatgattatctggattgttttgctgatcccgagacgcttggcaaggtttcactcgtgctaacacttggtttctcaggctgatgtgaatgtattcacttggttcagcatattggttttttataatgcagataggaacagatatagaagatttcaaatgctcgtggttggtggttaaggcattagagcgctgcagcgaagaacaaactaagatattatatgtaagaaccatatcatcttgatcaaaaaggtttgtatcctgtttggaacctgaaacatgttttgttctgatttactaggagaactatggtaaacccgacccatcgaacgttgctaaagtgaaggatctctacaaagagctggatcttgaggtttgtagcgaacctcagagatatgatgttgtaatacacaactaacatttttgctaattggacatggtttgatctgaacatgatagggagttttcatggagtatgagagcaaaagctacgagaagctgactggagcgattgagggacaccaaagtaaagcaatccaagcagtgctaaaatccttcttggctaagatctacaagaggcagaagtagtagagacagacaaacataagtctcagccctcaaaaatttcctgttatgtctttgattcttggttggtgatttgtgtaattctgttaagtgctctgattttcagggggaataataaacctgcctcacttttattcttgtgttacaattgtatttgtttcatgactatgatcttcttctttcatcagttatatgaatttgagattcttgttggttgatgcctgtgactacatacataatattgaccaacagaagaagataactcgatacatacattgattttataacactgagatttaagcaactcttcttcttctctaatgcctacattccattccaaaggcaagaaaataaagcttcaagcgcaggcctcgacacgtcaccttgtcgcttaatttaatacaacaactagagtttatttataaataatggctgtgaagggtaaaagcgtcttatcctcaacgaccaccatcatcatccagctagcagcaattggtttttcactcacacactagaaacaagaaaaagaaagatgggagatttaatggctcggtctctctcttgatctgacgacgacgatg

SEQ ID NO: 32966 - DNA, 3003 bp, Unknown
  misc_feature (1)..( 3003): 2750-1469P.txt file - cDNA_ID_3063698; gDNA_ID_1620434; Annot_ID_156937
aaaaagtgagaaagaatagttaattcctgaatttcttagaaaagacaaatgttatgcaaatgatgatagattatgttttaatttcacggtgcagacaaactagacatctgtgttagtaaagcatcaatggctttgagaagaaagagagaacaaggcatgctaaaagcaaatattaggacaagtatttgatttgtactctcttccctcattatgttcctttgcaaagacacagcagaaacatccaaagtgaagatgagtttcatcatcacttgcaggggagcggaatattcgctgacaatcacatcacatgccgtttggattggaacctttttttattaacttaagtcgagagctctgtgttcctcgatttacatttttggtttctattatcaatacgcatcacatgtttctggactaagcagggctataaaggctaatactagtaataaacaatggaaccagcctgtgcttttggactttccccatgataatcttactatttgcttattaccattctttcaactcttcatcgacttctcaaatcctttattcagcaacataacaaaatgaaatcatgttttctgatgcttcatcagattactaaccaagacaaagaatcagaaaaatttcatcttgcaacaggacgtaaatcactgttccaaagtgtaaagcaagatgatgaatgatgatgcccttacttactagggggactccatcagttttatgatatcagagactgtgcttgtgtaatagtctggttctatcttgttgcccttatctagtagattagattcacttgtcacccctgttttgacatacccaatcactgtcagttcaccccaacactgtccagatatcgacttgtattggcttgcaaaaactcaaaagagtatcaaacagttaatgataatgacctgttaggacgaggagagttttgcagccagcattctgcccaaacaagatatcagtatctagcctatcacctaccatgcacattcttgacgtttccgtcccaaatctgcaacacaagaaatacacctctttatcactctatcctgtataatgcacactatgaactgagacaggctttcatgtgcacatacttttgtagcagaaagtccatcatgaaagtagatggtttcccaacaactattggttctctttcagtcgatccacacatggcagcaaccatacacccagcacctagaattacgagtaagaatttgatgctgtgacaaccaagctgctattctgggcaatgaggcctaagagtctagtgaccataccaggccactcttgcagatccgtcatatgtcctactgcatcacggttggtcgcaatgaagagacatcccggattctcgcgtacacagagagtcccgtacctgccatttccgttattgtgttagccaaaactctcagaaactcaattaaggcaaccgacttgcatgcaatagtaatccatcttactgaagcttatagtagttaatgttggggtctagtccaactacaactgctcccacctgtcacaggaagtcatgaagaaatatacaacattagaacctagagcaaaagagaataagaaaaacgcaagattggagaaggaatcaaagtcttatggcccattacacttttatcatgttcaaagagagagtttgatttccattgtgccttcttttcaccatcttcctgcatggaagcaaatactgcttcagatagacagaggaattcaaattatacaattttggttggtttaaaaacacaggagcagtaagtatcaaacatcttgtacaatgatatgagtcctcagagtgaccaaaacatgacctgatcaaaacatataacaaaaggaagactacttacaggaccaccaagacctgtaaaaccggcaatctgcagctcctcaagaacaccctctccaccaatcacataaacctacaaaagcaaacacgaaaggaaaaaaaagtgagaaaaagatgacgatagagagacataagccaatgtgtcagtcgaagtagaaccttcttgtccttaggaaagttattgactttgagatacatagctgccgcaaatgacgaagagaagatctcatccttccaaagtaatcacatttttttgttttagttttaatggtaatcacaagtaatacgaagaaggagaactcaaagtttacctgagtaatagaagtgacacccaaagatcggaacttttcagcgtattgcctcctcgattttacggaattgttggtcacaaagacaacatttttaccctgaaaatcgcaaaagatcagagagagagagactgaaaaggaatagagagtggggaaaagggaaagcaccttagaacggataaggtcgagagtttgggagacgccatcgatgagcgtttcacccttccatataacacctgaatcgaatcatcatccatcatcagagtagtaactaaagaggataacaatcgaatggaagaaagtagaatctaccatcgcagtcgaagaggaacgtatcgacagagtcaaagagagatttgaagttactggaggagagaagctgaggcgccattggaggagtgtcttcttcttcttcttctgggaattgatcactctggtaaagcacaattggcacgtccaaaacgacaccgttccatcgaaagaggccacattgtgattggtgagcccaattaggaaggcctattttactaatgttgaagcacatgttgtactataaaaaaacagagtttattatctgtttctttggcttgacatgacaaatgtacaactgggagagaaagtcagtccgattgtgttggggatgacgatggcaaaagtagtaaataaggaagaaacaggaggggcgttttcgggagaagaaggaggaatatgagtgtgagttgttgttgtaggaatctgggcaagacaataaaaaaggcaataccttcacatcatttgcatctgagaagtcttggtgggagtctctatcgtcgtcgtatccaaagctcttcaatg

SEQ ID NO: 32967 - DNA, 3000 bp, Unknown; identical to SEQ ID NO: 1683
  misc_feature (1)..( 3000): 2750-1469P.txt file - cDNA_ID_3063702; gDNA_ID_1620434; Annot_ID_156936

SEQ ID NO: 32968 - DNA, 3003 bp, Unknown
  misc_feature (1)..( 3003): 2750-1469P.txt file - cDNA_ID_3063712; gDNA_ID_1620434; Annot_ID_156930
tattcacagatcaaaacaacactgaaaatttaatgggagaataatcggaaggaatatatctgcttgtaaaattcgaaagaaagaaatgaagaatcatcgatagagtaccttagactacgattgaaatgctttcgcaacgcggctccggctcgagagatgaagtatcgctagggtttttgattcagtgatgtgacgcagcgtttataaagaaagctttgtatcaaagcttcattagggctttcaaaatatatatattcattaggcccatttaaagatcttctggacattttcagatttattgggctttgagtatgtattgggcatgtctatttggtgtggtcaacgaattcttgtatttcaaatgttaatgtttatgttttaaataaaatgaacacattttgaaagttaagggattaaaataacatttttaccgtttaacattatgctgcataaaaagtgtgagatgtttattacacaaattcgcatggtcctatattggagctttaatggttagaccgagtcaaagcgtgtcagaggccacctctgatttcaagcatataaacaatttttaaagtttttttttttctttttcgtgtggtaaagggtcacacaaaagtatttgattcactaatttattataaccaggattaggtttacctaacttttgtagtaattaattcattaccgttactgctacgttgttcaagaatcaaaggagtattcgataacttgtagaatatgatttggataattttactgttttcattagttagataccactaaattactattacggtcaaaacgcatgttaagactttgtttggtcaaataaaattctttatagcaacctcgagagtcgagtcgagaccatggaatttgtctttaagacaacatttgtataaaaatgtttttcaactaaaaacaaaaaattctgatgagaatgatagtcctcgcctcctctacaaaggtgtaagtaagtagctgctgcgttaatctcaaagaagacgaatacaagtctttctgttttgctcaattcatcacaaccacaagaagacgattttttattcttgtttccaaactggtaaagttgttcagtaattttctgtttcttatttattagtttttttcttctaaagtttgcaaatttctcagtgaaacactgaaacttccttttcagttcgtaccgttcttcgctactttactcattctttagggtttcaaggttttctattggtcttgttgtagactcgagtagcttctgggttcaacccacaaagtttgagccttttttgatttgcagagtcctctgtgtttcttggtttgtctcttgatcaaggtctgcttgcgatttttgtttctttctctaccttactcgctagatagatgtttctgtagattggcagcatttggtctctctgtgtggttttattatttactgatataagtgtgaatctttcccagaatttcgttttctatatcaagaagctctcagaaaattttgggcttggcgtagttgtttagatatatcctagcttcctagagattgaatgttgaatgttgaatgactagtacttccttctctttctctgtgtcttggttgtcatattcaactgattgtctaataaagacagttgctttagctctgttattcacgaggattgtctcaagaagtttctaaagttggtagcatgtgtttgtagaatctgagatgggcgagccactaggactgctccaggtgactgttattcaaggaaagaaactggtgatccgagatttcaagtcaagtgatccttatgtgattgtcaaattaggaaatgaggtatgtttggtcagtgtttttcattgttcttggcaactagaaccagtgtttgtgtttctaccaaggaaacaagtatctcgttgtgtttatttgtctgttgatgtgatgttttactgttttgaaaaccagtcagcgaagaccaaagtgatcaacaattgcctgaatccagtgtggaatgaggaactgaactttactctgaaagatcctgcagcagttctcgcattggtatgtctacatcttcatgaatctttccttttgtgaccatcatgatcatgatgctgagattgttaatggggtggtgcaggaagtgtttgataaagataggttcaaggcagatgacaagatgggccatgcctctctcagccttcaaccgcttatctcagttgccagactaagacacgtagtccgcgtgtcctctggtgagacaacgcttaggaaagtattaccggatccagagaactgcgtatctcgagagagcacaatcagttgcatagacggagaggtggtgcagagtgtgtggctgaggctgtgtgctgttgaatcgggtgagattgagttgaagataaagttgattgatcctcctggaacaaacaagtagcaatagggtattttatgttagtttgtaacacgagacccgtttgtgactagtataattgcaacatcagtatggtcttgtcttgtttccaagtgtgcctttgtgactactcaccaatttattaggaatctttgagatacattgttctgctctcatcacttagctcttccttatttttcttcttgtgtgtacattttgatggaaactccaggtaaactaccatcaatggcagattctcataactctctaccttcttaataataaaacacctggaagaaattatctggcaacaaagctatcacgcataccaaggtggtggtggaaccgacactgatattggtatcttacgtcacacacacactttgttgttatctctatatccacctttttctttttggctcaattatgatctctctctttctcgtttcctcgtaatcttaacacaagcttgatcgtcctcatctgccaccaaaccaaaggtgatgcgttttcttagccaagaactcaaacttgtgatatttcttttgattctcatcatctctgcattttctgaattggctcagacataatttcttcggtgacttccatg

SEQ ID NO: 32969 - DNA, 1671 bp, Unknown; identical to SEQ ID NO: 1689
  misc_feature (1)..( 1671): 2750-1469P.txt file - cDNA_ID_3063736; gDNA_ID_1620435; Annot_ID_157005

SEQ ID NO: 32970 - DNA, 3003 bp, Unknown
  misc_feature (1)..( 3003): 2750-1469P.txt file - cDNA_ID_3063740; gDNA_ID_1620435; Annot_ID_157004
caattatttttaatttatacgtttaatattcaattattttttgttgaaagattaatacataaagtaataaaactgtgtaatttaatatccaaaccattaactgttgttattttcattctcacgatcttacaacaaaaataaaatttcaattttacctttaccatctcaattttttctagaggtggatctatcagtccaaccgtctatgtctctccagggaattcacgaatcgatcgatccagaggtggatcgatcgatcccaccgtatatgtctgaaacgttgaagtacggaccgatcggtccaaccgtctatggccgatttgttgtagcctggaccaatcggtttaccccgtcttctctccgcttcagcttttctcgttctttctcgacccgaataaactcaaaactatctaatccattcacaagtacctaaaacctgcaaaagactcaagacttgatcaaaaagacgtaaaaacggactacgacatgataaatgactcaaaacgaaggttagacaagagatctaagacaccaaaaacgcaacatatcaatagtcttatcacttatgttaccatgaaataaacatataatgtagttacaaacttacaatgttttttagatgattactaatgtactggaatttgtatatcacaattcttttaagttattcaaggcactagtggagaaagattcaaggcactattggagaatgcttttctctcaaatttggctcattttatattgacaatggaggcaagtatctagcactggcaaacttccttgcatatcacggcatcaaccattacaaaacaccaccacacactccgaagcataatggtttttctgaaagaaagcatcgtcatatcctagagacatgcttgtctttacttattcacgcttccatgcccgtcaaagacgatgcttaaacaagttctgcaagcatgtatcgacgagctggggcagtttcttctcagtgttgggtttagtcttatctccgcaaggttcagatttaaagatgttcttaccaaggctttaccacggacgcagtttcatcttctctttgacaagattagactcacaaatggtggttcatcttgagggggcatataatgatatattatatatcttcatcttactattcctgtgtacattttcctttcctctagatataccctatgcacacctcaccaaaaaaattataaccacttatattatacgaatgccaaatctcgatataacaatttaattaaagtaataaatgttaatgaatttaggacatttcaaccatatatttactctatcaccaatatctacatcttacttgccccatactcacccttaattagtacgaacagaaatttcaagtaactacgagactctcacacatctgacatcttaattctcaaaatattcagacaaacaacaccttttgaactttaaacgatccacaacaaaaacagaacaattgttatatatatatatatatatatatatataaaagaaccaaaaacaatataagaaaaccaaagtgaaacaatttgtttcggaaagacattagacaatatgcaaatgattaatgccaaatgaagacattatactcgaccacggcatctagaccaacaatcttataagtcttgggcagtgcatagcctctagcaaacctgaaagcaccagttcctccaataatcggcaactctctcaccttcgaaaatatatcattccgtccatacaccgcgatggtgcttccattaaactctcctgccgtgaaaacatagttaaagaccattgtgaagactatgtccttcatggctgttgatgcgtacatcccctgagctcttcccacttcctttgagctcgggtctggtccttcggtcaacggatcatcagcgatcataatcacgccaaacttgacgttgagggtggttgttgggcgggcttcggcaactttgacggcggtaggtttgtcaccggagatgacgtcatggaagtagaagtggaggtgggtgaatttctccggcttgtagccttgatacggcgttgttgtggagtaagctgtgacggacacggcaagaagaagaatagatgacaaaagaggaagaagaagcagaaaacgtttagccatgttcgttgtttgtagctatggaaatgtgaaaatgtgatttatatatatacacaaaacatgatcgttacgcaattgttggctcataaaacatttgaatatgtcgtttctcgattggtgacaacaacatgtccgttgacgtggaagtaaactaggtggttcgatttataaacaactagatatttccacttgtacgaatcatgatataaactggcaaatatataaggatgcacgacgaaagaaaaacaaaacaaataagaataaaacaagattctgcattgtgatacactacatataaatatataaagaaagatatatagtagatgcatataattgaaattaagatcaaagatgtacatagacattgatgtttaaatttaggattgtcaatctgtatatatgtacctaagatatatattaatatatacatatggttccaaactcaataccagtgttctctaattaatgatcttatattttgtacactgaattaatcatccactgagtcccaaaagaggagggcataggtgcgacgggctagagttaaatcataaaatagattaaaaacaatacatgatatttgaaacaatgatcaatgacaagactttagttttcttgcaaaaagtatataacttattttagaaactccttgaattttgttataaaacaaaattggtagttgcataatttttttttttcaaaaaataaaacaacgatcaagaattttggtagttgcataattttgaagtacagttgtgctagttactcaattaaacttaaaatatattatatcaattgtttggaataacattcatctttcgtcttctcagtttacttggaatgcacgagagctttctcgttgtgagaataactcttgggtcatg

SEQ ID NO: 32971 - DNA, 3003 bp, Unknown
  misc_feature (1)..( 3003): 2750-1469P.txt file - cDNA_ID_3063751; gDNA_ID_1620435; Annot_ID_156992
catatgtatctaatatcttacatattaggaatcaaatggttgatgtaagcagaaatacaccagtatatatgtaaatccaaaccaaactataactaagatcattcggttctatttttttctttaactatatcataaaattaaacacatgtttggcctcgaacgacatttgttttcttcttgaacaatgatgatgcttgaaggctctagatgatgcttgaaacgttcattaaaattatttcatggtgatgataatcgattggcagtttgtagggcacggattgagaacgtgtcataaacctatttcacatgtacatttcaaagttttgactatcttcttaacataaggtatgctttatgagttttgagcctttgagatattattaaaaacaaagactaaaggcaaattactttgtgagtgttaaaatggagtcgtttttaagaaaatgaagaagaacaatgtatattcattaatagcactaatgatcaaccaaacatttccaaggttaaataaaagtttgcgtggatcaagacatcatgttcacattttggtcaattaataaacctggcatataacactaagtggttcaaagctggaaaatggtacaagatcatatacaattattttttgtttaaactctcaaaagccattatgttgaggtttgttgagtctagttaaatctgtcaaacccttaagagttatcaagtgtctcgagtcattctaattcatgttggaacttgttttaacaaagaggctccaacaacttttagctgggtggttttttggtgagaagttcgtcgtcgtattcgagcggctaaaatgattattcttaaataattattgattaaatgtataaatatagatggcttcaatatttgtttataacagaagacctaatgctaatagaagattcagatgccacacttgtaacatgaatgctaagaacgtccatcaccatgtatgtctgcgtaccaaaacgatgtctattctctttcaaatattgaaaacattcaaattggaatgatttttcatctctattatatttaggttttccaaatacatatctcacgttgacctgccttctttaacttctttaacagcatctaaatcaaacatatcatatgaaacttagcaggttacaatctaaaaataataataagagacaaataattaatcaaaagattacatgcccaagttcttacttcctctttctaaaacacaaggcctcttagagtactcacaacaaaagtcgaagataatgttttcttatgttcaccaaaaaacttacaaaactaactctcgagaaaatctaaattttcttttgaagtgtggtttatatatgtatatatatttttatatttttttggaaaagattaataatatttaatcagtatagaagttctgcttagactcattaatatttaatatgttaactcattataagtttacaactcaactcattgaattgatgaaaccatttgatctaataactcatttggttgtaagcttctatagttattcttatataagtctgaaaaaatattatagttgtatttttggatatctaaggaattaagaaaattgataatgtctcacctctacgataattccttttcatctttccgttttgtttttgtattatcgatttatgttctttaattattattattttaaaaaaacttctccagtcatctttttatttatcagttacattatcgtaaatattcatgcttcttacatgaaaaaacgaaatattttaatgtgatctccactagttcatgaagaaaatgcaaagttatgacttacttttatggattggctgcttaaacaaaaagttaccaacagactttgactttgactttgcgtaatgcaaaaataacggcagcatgaaaagaggttcccttcgcctcataatctgcctaagttactggtcaacaagcactactatatatttgtgtcattttcttttatttgtgttgttttttatatatagtaaattataaacatattaattattcctactttccttagaaatgatgcatggtgaaaaatttaaaaatattcatatacaaaaaagagagggaaaataatattatcagttcgataaatatgtattggtttttatgaaaataatagttttattcaaaatattagctaaaaagtactctcacacagttggtttgtttcatagttatagaatttattatgtgacacaaaaagttcaaagaatattaaaaatatttggaaattatgcaaataaacaaatatttgtaattatattatttacataacacaatcttatgatatttattttagaatatgtttacattattttatccatatatatgtgtcaaatacgatatcatttttggacatttacatttgttgtaaattaaattgtatagagttaataaaaaaaatcaacagataattttgattaaggtttgtgaataatttagtcaattcaatgcaaaattcaagatttatttgtctaatccactaattgagagtttctttagtcataaataaataaattgaaaatcttcaaatcacgaaatattttttaaagatttaatttacagaaaatctcaaatctcattacaaaaaatcgttaaaatcaaaatttgcaacaactaaaaaaattcgattatcaattttgtcataatactcatctacaacttttgtcactacataatcaattattttcttgtccaaaaaaaaaacataatcaatgattttcttaatgtaattgtaatgatgaattttgatgcgggtaaagtaaaaactaaatctacttacacaacttcctttttaaaagtatttatttcagatttgagatttgtcagatatttttctcaacgtgaaagagagaaaagagaatctctcagaaggtgagcctccaacaaagcgtgaatctctctttctctctctatctctctatctccgagatcgcatcaccggaaatctccttctacggtggtggtggtgacagttgaccagagatg

SEQ ID NO: 32972 - DNA, 3000 bp, Unknown; identical to SEQ ID NO: 1686
  misc_feature (1)..( 3000): 2750-1469P.txt file - cDNA_ID_3063758; gDNA_ID_1620435; Annot_ID_156988

SEQ ID NO: 32973 - DNA, 3000 bp, Unknown; identical to SEQ ID NO: 1699
  misc_feature (1)..( 3000): 2750-1469P.txt file - cDNA_ID_3063762; gDNA_ID_1620436; Annot_ID_157037

SEQ ID NO: 32974 - DNA, 3003 bp, Unknown
  misc_feature (1)..( 3003): 2750-1469P.txt file - cDNA_ID_3063788; gDNA_ID_1620436; Annot_ID_157023
cttagtatcacatttaaatgaaaaagaacctattgctaatttttttttttaactcgatgagtcttgatctaatttttatgtattgatcgtaacacgttagtcaacttaactagatagattatatgtgttttttcactctggacttgaatgagttatggcatggtcaggacactaatacaaatcactagataatttccttatacatgtatgcactaatacaaatcactaaattctacagtaaaaagctagaaggcaaagtagctctcataactggtggtgctagcgggctcggtaaggccacggccagcgagtttctccgccatggtgcccgagtcgtgatcgccgacttagacgcggaaaccgggacaaaaaccgctaaagaactaggctcggaggcagagtttgtgcggtgtgatgtcacggtggaggctgatatcgctggagccgtggaaatgacggtggagcggtatgggaagctagacgtgatgtacaataacgctgggattgttggacctatgactccagcgagcatatcgcagcttgatatgacagaattcgagagagtaatgaggattaatgtttttggtgttgtctccggcatcaaacacgccgctaagtttatgattccggctaggtctggatgcattttgtgcacatcaagcgttgcaggtattaacataaaatcaaagtcttagattagatagaaaccttactatatcaaaccaaaagatggttacttagtagttagtacttagtacttagtacttagttaagaatgtataatatcatatcgtattaatcaaagcttggttagtacttagtacttagttaataatgtataatatcatatcgtattaatcaaagcttggttaaacaaaaacttaaatgaagcttaatagttttcaatttgtggtcaacactcaaatttgacttttggtatggacaaaacaatgtaggcgtgactggagggttggctccacattcatacacaatctcaaagttcacaactcccggaatagtcaagtcggcagcaagcgagctctgcgaacacggcgtgcgtataaactgtatctcaccgggtacggtggctacaccgctcactctcagttaccttcagaaagtgtttccgaaggtatcggaggagaagctacgcgaaacagtgaaaggaatgggtgagttaaaaggagctgagtgtgaagaagctgacgtggctaaggctgctttgtatttggcttccaacgacggtaaatacgttactggccataacttggtcgtggatggtggcatgactgctttcaaaatagctggttttccttttccttcggattcatgatcaatcattttgtatcgtctataaataactttgtactgtattcaagattttatatcaaagttggatcttaaaacatttaataaattttcaaagcaaccaactaaatataaaagtttctatagtaagagttaactttgataacatatgactttcatttgaatacaagctggcatgaacttgaagctttgatcacagtttccaactcctcgaccatctcaactctctctttcgaggtaaggcgttttgtgaggaaagttgctttatccaaacgacttgcgttactaaggatatatttcgtcacctctttttcatcttctcgccattcgtagtcttcccatacaaatgtctccagatggagtaacatacatttaggaatattctttggctgaatccatttccacaagggtacgccatctaaacttttctgccatggctgtggttatgagatcaatggcgagttaacacaaagtaaattacatgtatattagatcatcaaaccctaagttgaggtggaaatttgctaaaagatgaattttcaatgcttacaccgatgagcttgaggacttgtaaattaggagaatgatcgagcatgagcattagtagattccaacaatcagctctatatatacacagctccaaatataccaactgataaaatataggaaatggaatctatacatgaaggcaatattattagtagagtaacaatgcaataataaggaaactaactaattacaagaaaaccttaccttcaaggctgatatctccaaggagagacgtttgactgaagtcagtgatctcaagatgaaacttttattattgttgacaatatttgcctccaacagcataggtgcattctcaataagacaagatccacgaccaccaatccatatacttcaagtattttaaagaaggagcatttatcacaaagcccacatgttctttatcatttctattacaaatcgatagtctttgtaaggaaggaactgcaatagttaaaggcttcacattggagtatagagttccatgcacatccaagttttcaagattaggacaaccagataaaaggttaagaactgatgtattgtttatgaagttcacatagtgaaggtgcagagttctaagagatttcagacaaactgaagaagggacaaccatacgaaccaaaaacttgacttccaaggtatctagtgtttcacaattgcacaagctttcaggaaatatgaaccgtcctctaggtgcaatctgatccagtatgaaaattaatggaagatatctaaagttatttaatccaaatctatttttctaaataattttgataatatatatatatatatatgtatctatttttattaatagtttttattttacaatttaatttaataagtttatgcaattatttttgtatttttgtttagctacattggtggatatagcggcgttggtgaataaaattccagcgtatacaaggccagacgttttatcctataacgggccgggcccaatatttaaaccttctagctcacacagaggtcaaagtttttgctctcgtctctagatctgtagaagtagaatggtggagccatcgagccatgtgatgtgatcgaaacaaaaagctctttgcttcttcttcgtccatttctcgtagcacacttttcacaaagaagatg

SEQ ID NO: 32975 - DNA, 3003 bp, Unknown
  misc_feature (1)..( 3003): 2750-1469P.txt file - cDNA_ID_3063794; gDNA_ID_1620436; Annot_ID_157021
agaagtaaagcctgtaaaacggtgtgttattgtctttattgtctctagaaatgtagacaaaactctctatttttataacatgattaaacctactcaacaaaagttagtggccactaacatgaattctttttcttactataatccttttctatctttcggttttaggtcaaccacttttcagtggattttagctttttgagaatctctgtcttatccaagattctcttcttcttcttcatttttcaattctttctttttaaaattcttatccgctggatgactacattggttgaatgaattaatggagactcagtatcgttttttgcgtttaaattagtctaaagctttgttgtattatattaaagcactagaatgaaaagactatgtgtactaactaactaatcaagtatatatataatgcaaaagtataactacatttttctttttagaagaatgtggaattttaacattgcattacacacgtatcttatgtacattcgatatttcgatccttaccaaaattcagtaaaacgaaacaacaacaaaaatctaactttaagtttaaacgacatattaaaaaggtttatatatttcaattcgtttaaatataagtaacctgctgttttaaaaaaaaaagtaacctaaaatgtgttttgatgtaaaattaaagtttttaaacaaaacacaaaaaatctgaatgacataaaaaaataatccaccaaaacagttatgagtaagttaaatgatataacaccattctttctgtcatttctattttatttgagttaccatgcaaagccttacattgagaaagagatatagaatgatcaagtacatttctcattgtcatttgattgaaaatataaaattcaaaaaaccttacatcaaaacaatagaaagtggaatgtatagctatctatgtggaaagtggaatgaaactttgaagattaaagaatgtaaaagaatcatagaaagaaataaaaaatagtttatcaaatgggatctcgatagatataatctaaacttcttctcccaactttttctctcgttgtttcccatgataaaaagctttaagacatttgcaccaaaaagatctcaaattcacgttcacatagaaaaattaacaagaggcagaaggaaaaaaaatgtggaggtcattcgcaaggtaaacacactcgcaagacatacgtctaatctcttctttattatctaattatagaattagtctccatctcaatttcttctccgtggcttttctctgcagaagcttcaaactcattaatgtaccaaatggtttgatatccaagccaattcgctctactctcctctattcaacttcttcaaggtcgatcctacatatataaatactataacgagattcgatcttttaatcttaattaaaactcacaaaaaccctcttaacattttttgcttcgactatatgtatagaaagttagaaggaaaagtagcggtcataaccggcggggcaagcggaatagggaaggccacagcggaggaatttgtgagccaaggtgcgcaagtgattatcgtagatatagatgaagaggctggtcatatggtcgcgaccgaacttggctcagccgcacatttcttaagatgtgatgtcactgaggaggaacaaatcgctaaggccgtggagaccgccgtgactcgtcatgggaagctcgacgtaatgctcaatagtgcgggaatatcatgtaagaacatattaaacaattataatgaatttattttaaactaaatatatgtatactaatacatcatatataagatttaaaaaataaaacattacttctataattctacatatacatatctttatataaataaattgcttatgtatacaatgcaggctccatatcaccaccaagcatagcggacctagacatggacacttacgacaaagtgatgcgtctcaacgtgcgaggtactgtcttagggataaagcacgcggctcgagccatgatccccgctggctcgggctccatcctctgcctctctagcatcagcggcttgatgggtggtctaggcccacacgcatactcaatctctaaattcacaatcccgggtgtggtcaagacggttgcgagcgagctgtgtaagcacggactaagaatcaattgtatatcgcccgcaggcatcccgacgcctctaactttgaggatgtttcgagaggcgtttgcgggtcatagcattcgggaggaacaacttttggcgattgtgaacgcgacgggagaactaaagggagagaagtgtgaggagatagatgtggctaaagcggctttgtatttggcatcggatgatgctaagtttgtgacggggcataaccttgttgttgatggtggatttacttgtttcaagtctcttaatctcccttctgcttaattaatttatcaagttagttaaagttttttttttttttttagttttctgatgtggttattacgagtgttttggccttttgggtcattgctgatgtgatcgtttgtaatctatgggacattatatggttggaatttggaattataaatttagcctctctgtggagtttcgacatttcactagtatagttgattatatcagtcaacttagtattagataatcattatgtgtattgtgtaattctaagtgattcattgtttctgatgatttacgtaaagcttatcagaggtttcaaaacatattgcaagcagagttatctatcgtggcctcaggtgttgtaagaatagcttgtccatcagataacatgtatgtagaaccgttagttgtggtctatttaaaactttttaaatactttctttgagatagatgtatttctcctaaatcacatatgtttcttagttatggtcaaatatagaatattaaaatattgtacctaatagtgacactagtcactagagttaggtgccactacaccaagctcttctgactttgtatccatcaatactagaaactcttttgatctcaacaagcagtcttatg

SEQ ID NO: 32976 - DNA, 3003 bp, Unknown
  misc_feature (1)..( 3003): 2750-1469P.txt file - cDNA_ID_3063822; gDNA_ID_1620437; Annot_ID_157068
agtcatatgtaattatgtaaacaatagtatcagttttcagaatgtacaaagaccaatacgtcaatatatatacagctatactgttaaaaaatatatattcatttatctgcagttaattaaacttgtttttttaattagcatgtttagagcgatgttatactgtagtagacaagagaaaatcgtttaaaaatttgtatcttcgttgtagatgaaatgtcagctattatgtgtactatatatgtaataccgtccaattaaatgcgatgtgcagctgatagacacgtgtatccaacactaaacatcacaattctcccatcacgtttactaattatggccattataattagcaaagttcacattttatgacttactacataattgaatgatagaggtgctatatggagtttttctcgatatttcgtataatcattaacataaatgcgtttgtcaacaacaaaaaagatttaataaataatctgaataataacaaaatttattataatcgtacgccaaaaatacgttttatagccctgcaggaagatttttacgtgaatgccacatcaattcaatgcataattttgtatacgaaccataataggacgaaaaaaacagtctttttctaactatacttgaaaccaattctagactcaagcgggaataaatacacgaaaccgaattcgtcttatgcagtacatagcatgaatgcaatataatctccataacactatcgctctataagccatatataactcatagtcacatgcagtctcatatatgtctcatagttacacatattacaaaatgtctttaacttttgtgtttcctttctacgtacgcatgtgatgatgcttctccgatgtcttagagagcttgggacgtgaaaggttgatgtatggtgttggatactatcagccaaaaaccgtcaagcaacatcgtacaagattgataaatgtctcacatgtgtagtacttaatagtcacaatttgactacacaaacctctaccgacactaatgtagcaattatatcatgttatatgctcttaaggtatagtatgtataacaacatttcattctgtaaaatatcatcatttatatcaaatttatgatatataaaatatcattatcattttaaaataacactaaaataatcagtgcaattccgtataatcttcatatgaaactgcaagaatccttggtgttccaaagattatgatgattattgtgagctttgatttatggtttccatcttgtcaaaaaatggcttttataaatggtagagctttcttagttttccttaagatatacacaacaggttacaaatataatttatttttgctaaaagaaatagttatagtaaacttgtaaaaactactacaactattttatggaaaatgtcttaaagctgtttcaacttttatacacattactgcatttactattctgaaatcaatttttaattaaggtccttgtactataaggaatcctttaaataaatataaatattaacaataaaaaaatccaaaatttcagaatgcaatggtcttacaattacaataataatgtatttgattgtactaaaaatataccttaaatactcaccaattatcttttataatataatccacaaatttctggaagaggaaaaacaagtaaatgcaagtcacatttcacatttcaaattaccaactaccaactacaaactacttccgcgtctcaaattgaaccactaattaatcactactttatatgctcatcattctttttctttcattacaattctagaataatgacttaaccaaaattcatacaaataaaacaatattttggcttccttcaccaggctaagaattttggtattgaaaatctaagtacttcataagaaactgttggaatcatttaaaatttgtgatcatatataaaaaaatttattcatctttatatttaagagtttaaaaactgcaacttttgtttttctttcactaagtcttatggccacagttaattaaaagcagatgaaaggtggtccaatggaaaaggagaatgtgattgggctagttgggagagttctgatgtctagtgttgggtacacgtgtccgtcagttacacatagcattaaatcagacggcatgtcattattcaaatctagttcacatagtacgactaatagctgataaattaatgattatacagcatatgaattatgaattcaaaaaaaaaaaaaaattgaaaatgttaaggagatgctatattttacaaaattcatcgcaatgctttctactaatttgctaagtggtcttctccagttagtcttgtcgattccaagcgatattattaaatcttgaagcatcgctcaaagcattatagcttaagataaccaaattgttattaaaaacacctagtgaaatttttaaattaaaacaattttgatatctttgtaatatctaatactactctttctgtgtctaaaaggattaattttcaaaaatttcacacatattaaaaaaaaaaaaaaattactagctaaacaattttcaataatcataaaacaatagtaacttaataatttttttttattttcaaaatagtccttcaagtttacaattcattttagtattataatcaacaaaatttgtattaaaaagttggaaaattaatctttgtggaacaaaaaaatctagaaatcattttttagaattagagagaggtttgataaaaaaaaataaaaaaaaatagagagaggtagtacatactaaacgatgtgatactactattgacaaaatcttaattctcagtttagtagaataaactagaaggaatgaatgaagtaaatgcgaatccaactactaacaaaccctacttagtcatcatattttcccatatgaaatccctatataaacccatcatcatctcccacttttttcatatccaacaacaaaaacataagctaagaaaacgaaactcaactaattttgttatcacccaaaaagaagttcaaacacaatg

SEQ ID NO: 32977 - DNA, 3000 bp, Unknown; identical to SEQ ID NO: 1708
  misc_feature (1)..( 3000): 2750-1469P.txt file - cDNA_ID_3063824; gDNA_ID_1620437; Annot_ID_157066

SEQ ID NO: 32978 - DNA, 3000 bp, Unknown; identical to SEQ ID NO: 1706
  misc_feature (1)..( 3000): 2750-1469P.txt file - cDNA_ID_3063827; gDNA_ID_1620437; Annot_ID_157064

SEQ ID NO: 32979 - DNA, 3000 bp, Unknown; identical to SEQ ID NO: 1710
  misc_feature (1)..( 3000): 2750-1469P.txt file - cDNA_ID_3063847; gDNA_ID_1620437; Annot_ID_157053

SEQ ID NO: 32980 - DNA, 3003 bp, Unknown
  misc_feature (1)..( 3003): 2750-1469P.txt file - cDNA_ID_3063859; gDNA_ID_1620437; Annot_ID_157047
ataatcatatacaacgggagaattttattttttttcgatgtggtaagtcaccatatttttggaatctataacgatagtaacatgttgtcagttccaataaaaaatatctcaaagagtacaacaaaccgacactaatgtgtgacttaggattggtatttgtggcatgggaagggtcgtcaggattgagagaggagtggtccaatagtttggggcctaaacgtgcttacgacttttggaacaatttggaggcagaagcaaccaacagcttcgtcttggataatgtgcctagacgatcttggtttagagaatgtgattgatatttgagagtgatgcaagtgttctgtttcgggcagttaatgatgaagcaagcctggcccatctctgcagagcctttacacgagatatcataggaaaagacaaagacaacgaaccagcacatgtgtgctgatttcattgcgaaaatagcactttcttttgtgtattatgccgttttagataagtgtatttccgatttgcttccaccaattattgagatgaatagtcacacacttttgtattctgtctaataaagtagagaaattttcaagggattcggcaccaaaccaaatcattattagaatagaatgttacaaagctttgataagttctttgcatataagtaactagtaacgcggacgccacaagaactttgatgttgcagttaaaaactaacagctagtaaagaagtacatgacttttccttagagctattcaatagttcttcttgaacccaatgcagatttatccttttgattcacacaagtcgaataagattcaacagcgttatccttttcattcttcaagtgtgaagatagttagcagccatcatcagctctagagtcagttcaggctcaatatgaaactctgtctctttgcctctgtcaaaagatggaacatatgcataacagtagttaaagactatacaactataaaaagagagaaagataggagtggaggagcggtaaaagaagaatccaattctagaaaacagtaacactttcaatacattggttcatagagataaactaatgagactaaacgcaggacagtgcaatgaggtaaagagttgcaatgtaactatatccccaaaggatgcgtatgcgttcattcttatcgactgatccactaaagtgaaacttggatagttacaaacagcgatgcgattctgaagaaaactaacagagactactacaatgccatgttctagagatcaatgtagagcaagaggtgaaaagcgagttagataatggaacctggagtattgaagagaccagtagaagtactggcaaatcttctctagtattgtggtgcttatatcagggaaagtcactacgccatctttcgattccgagaaaccacctaccataccaaataacaacagaattactaaatttagcatctacataatgaaattgagaatgatcttatgaatttggacttgcttctttattcaaattacgtaattgaatttccgattgagcataatctctcgctaaatttctctcaaattgaggccaattcacaactaaatcagattaagtatcacagaatccatcaaatccaagtaagatgactagatcagaatcttgattacgatcaccaactctacaacaaaagaggagaagaaacctggagaagtgagcatgcttcggatagtctgagaaaccatagcggcttctctgtcgatgacgaactcgaaaccttccatgcttatcaacttcaccgtctctctcatcttcgtcgtcgtcgtcggcttaagctttcctctctttctctctaccgcggcgtggtttcttaactcgcaaagaccgactaagttattggttgatcccaaactattatgggctcaatttcaaacgaggcccattatgaattatgatgtctacataatcttgttattagcccactaaaatcaccctattcggtcctttttagctgaaatttattccaatccttttttttatccgtttttaattgaaattcaaaagaactattttgagaaatgactaatttgtaaataatgcggttcagtataaattatgaaatttttgataattcaaaagaaccaaattctgacattttcaaagttatagaaaacaaacttaaagacgaaagaaaccttggaacatttatcaaaatcataaccagagctttacgggttggcgaaagatgtgattcacctaggaatcatacaaaatctttttgatcacaagtaaaacgagagatatgtattttactatttttctctaatcccaatcagttacacataaaccaaaaacttaataaggtttgagttactctttttcaaacttatcaccaaaaaagtgacgttgaaatctttagtctactagtataaatgtataatgatcaatcaaccaacagaaaacagatcatcaccaacacataattatttgatgacttggctctttataattggctggttacaatgttaacatgagagtcattaccgtatccgataataacttaagtcattatttcccataatacccttgaaacagccacttactttttgtcagctgcctaccatttacctgccacctcagcccccttttgtcattttctttaatgcggcgtcgttttattttccgtatcaacttgaaaagccagttatacaatacgaccatcatcttcatacgtataaacgtatttataagtaagaaataagaacattcaataacctctgacatttcctcaattccctgaaaaaatttcataattcaaagagtgttccttggagagaaaagtttcatcctttcaacagatctgaagagggtcaattgaaattcgttttcacgattcatccgccatttttccggggaaaaaacaaaaggtatgtactttgggactggggctaatttctttggatctgtctactttatgaagatcgcttgttgatttctgggggatatgtgtgtttataggtgagatcaaagaggaaaaatg

SEQ ID NO: 32981 - DNA, 1418 bp, Unknown; identical to SEQ ID NO: 1714
  misc_feature (1)..( 1418): 2750-1469P.txt file - cDNA_ID_3063866; gDNA_ID_1620438; Annot_ID_157099

SEQ ID NO: 32982 - DNA, 3003 bp, Unknown
  misc_feature (1)..( 3003): 2750-1469P.txt file - cDNA_ID_3063882; gDNA_ID_1620438; Annot_ID_157088
gtaaacacactcaaaagtgttgaaattataatattacatattttgctcaaaaagagctaaggctttttaaatgtacaaacaaattctcttttgttatatatttctagatttgtctactttaaacgtatgatgtgtttaacacttctttcaacaatatacgtgtatgaataaacatgttttcgacattccacttatgtcaatatcaacacataattttatggctaagcagtaaccaccagctgctgtgtaaaatcacactttaaaaaagtttctttagcctacatctctacgatcatgatgcattggcaataacaagatgacaacaaattttacaaaacaattctcataccatgtggcttaagagaaaaggccagcgaatttattcgaacccaacatatatagtgaagatgtctttttcaatctctttttttaacaagtatactttttttttttggtaaatttcttttagtgaatttactttcatcttgaatcattctttttattttcaattcagttttgttgataatagattttcatgaacgaacaaggttctaagagataataataataaagggggaaacaaaacacatgataataagaatctaataaacaagagaaaaaagagaggtgatgaataaatgtagaagtcgaatcatacaagaggtgcttgttggaaggtcgttggaccaacgcttattgtgatattcatgttcgtattctctatgtaggtttttctttatatcttcccagcatatacgtagttatttaagtttcttagaaaattactatacattgaatatctgaaacaattaatcatgatattatggaattttttttctttcaaaatttgtataaagaaaaaggaattttatagtgggggcattttagcatctcgtcgaagatatgaatgaatagagaattttgcaaagtgtaaagaaaacaaccgaccaaacccacttgttctctcacgtcctttttatgtgttaaattgtcatacacaaaaaaaatatttacaattataatttttctaaagtctttaatgtcaaaattatatgatctatttatatcagtaatacaaatgtaaatcgctatattttatatttttgttaaaaactaaataccataatttaaaagaaatattttctttttctttttatttgcgaagatattgtttagtcgtatggcattgtattagttacttacttagtagttttacagaacgaggtgaagaatgtcggaaaaaagaaagaggtgacgaagaattttgaccaatttgctactttgtaagggaaatataatacaaaaaaattgtatttagcatcattacaaacaatttctccattttgttttaacttttactatcaattttattatttttatacgaaacttataattaataacacgaggtaagcctgttttgttaaattgagtatgtcaattcatttcatgagataataaccttcaaataaagttcataagatagttgccccatatcggtaacttaggcttataaaacagtcttattattggtgatataaaacagtacttaactacttatatataagtacttacaacttattcttattattgttgatataaaacactaaagttgggttaaatcttaattccaattcagctgtttgatgttggtttaaaagtctgtttgcacctatgattctatgatataccgaaccgattcgattaaccagtagttacgagaagttatttgtttcaactaactatctattgatttgatgtaactagtttggtcctctgcgtataaaaggaacattacagaagagattaaatgataggcaattgataattgagacggttcaagaaaagatttagcaaccaacaaccttaacaaattttcatttacgtaactataattatagatcttgctatttttccattttatggcgtcttcttattacgaaactcatactattcagtcacataatctcatttactggactataatgggctttattgtaatgggctttattgtaagacatgagcccacaaatttggaaagtaataagcttcagctcagctaaagagagtctaaaaaccaaagggaaaaatgtcattaaaatccccaacttattgaaaaagttgatttaaatcctcaacttccaacgaaacgaaataaatatcaaacttttgttgattttccaaataaataccaaattttggttgactttccaaataaatatcaaacttttgttcgagtagccatattaagtatgacattaacagaccctgttattagagtccattttttgttaacagactcgttaattgaaaacgacaatattccctataacaataaaacaacgtcgttatgtcataaatgctcaattaaatcccaatttcaaatcatatgaagatttagggttagaattttgcttgatttggagatttaagattggatttgggaatttaattcggtcgttataataaaacgaggtcgctttcttgttataggaaacaataacgttttaaattaacggatctgttaacagaaaattaactccgtgaacgcaatatgttaatctacttaatattatacctaatatgaccatatatacgaaagtttggtatttatttggaaagtcaacaaaaatttgatatttatttcgtttagttggaagttgataatttaaatcaactttttcaataagttggagattttaatgacatttttcccaaaaatcaaggggagttttatggttttatctacttgacccgacagagaaatccggacccggataaaatccgacccgttcgaatgaactcatacggccgagatttttccaccaaactcgacggttaccactcgtttctttgtccaccatcttctctctctctctctctcaacccccgaaaatctccttttcccaaaattttccgattatctcacgccggattgtttttcaatcgccgtcttcataatctccggcgactgaaatcagtctggtaactatttgaattttcatg

SEQ ID NO: 32983 - DNA, 3003 bp, Unknown
  misc_feature (1)..( 3003): 2750-1469P.txt file - cDNA_ID_3063929; gDNA_ID_1620440; Annot_ID_157141
ggttttggagggaacgtggcagggaaaataaggaacatatggtagcgccattatgcggccaaattcgagtattggtggttggtgattcaggtaatattaacaaattctcgtttccatagatttggtaatggttctagctttttaagtagccatttaatggaactaaagaaagtttgtcgtagtgcacaaactcatccttaaagaaggagctaatgagaagatttctcatgatgattggatatgagtttctacttgtggaacctaataagagtcaagtttcgtaagtctactacatcttctccactattgagcaaagttttatctctggatatcaaattaggtgtgggaaaatcatctcttgtgcatctcattgtcaaaggctcctctattgttcgcccatctcaaactattggatgtacagttggtgtcaaggtaacttaagctgttctataaaaaaaattctcgatatggttaaagagagcatgggataagtttccctacttagtttctggaactctctttggtgcagcacttaacttacgcaagtcctgctagttcttcaagtatcattaaaggtgactcagagagagatttcttcgtcgaactttgggatgtttcaggtcatgaacgatacaaagattgccgctcactgttctattcacaaatcaatggtctgtctcaacaaatgtcatctctgtccctgttttgtcactgatgcgactgtttgattatgcaggagttatttttgttcatgatctttcgcaaaggactacaaaaactaatttgcagaaatgggcgggtgaagtttcagtaactggggagttttcagctcccctttcttctggtgggcctggtggtcttcccgtcccatacatcgttattggaaacaaagctgatattgctgccaaaggaggaacaaatggaagcagtggcaatcttgttgatgcagctcgtcattgggttgagaagcagggtctgcttccccatagtgatgaacttcctctctctgagagcttccctagcaatgttggtctcataatggtaaccacagactaaattacttgctttatttgaatttagtgttatgcggtatgtcatataattttggtaaaattatgcacaggctgccaaggaagctagatatgacaaagaagctctgaccaaaattttccatatggttggtgtcatttctgaccttgccatgttttacaatagctctctccctctctctctttctcttcaacctaatgaacgtttttcgttttcagttgataagaagaagatatttctcagacgaactaccgtcgccttcttcagcatggtctctttcccatgcaccttcccagcggttagatgagggcacaagtgatgaagatcagttctataaaagaacaaggtatatatatttatcatcctaaaaaaaatcggatttcttttctttatcgggttttggtcttttgaattttgcagcctaagggaaggagatgcttacaaatataacacattaccgcaacacaatctcatgcagtctcctacactctatccgcagcaaccacctgaccgttacaattacgctattccgagattctctctttccagtgtagaggaaaccagcaatggtaatggcaggtctaagcggatggatattaacgtctgaaagtaaaacacagatcaaatctcacattattttcctgtaatcttccaaacattatcttcttttatttgtcaacactccaaacataatctaagtattctttttttctaaataatacatgattcgtgtgataattatcttaatcatgtgaaaaaaacttgataagttttttttttttttttttttaagttggtaagtataagcttgatcagttagaatttagaatcccaaactaaatcggattgtaaacaactcagttccttataaatacactcgaatcataattgtaagacaaagaagaagaaaaaaaacaaagtgttgtatccaaacgatgaagacaacaaagattgagagtgaagccgtatgtaagcattggtttttgtatatagcggagttcatcaaagaaagactaagtgaagcgaaactcaaggaatacatggggttgatgaaacaatttaggtcccggcatatacaaggagatgaactcataaagtctcttcaaaatctgtttcaaggagacgtggttctttctcaaatgttcaacgcacttatgaaaacagagatccaagaactgcaaggtaacgaaaatccggaaacagtcgcaagaaaaagaacaaggagtgaagcagagaatgatgatgggattgaagaaggtgaaattcgagaggggcattgcgattgtcctcgttgcaagattggtcgggaagaagcagaaaggcgtagtatacccattaagaaaagaatttgtcgtgggttttagaagattttgttttgttcttaatatcacatgttattcagtttgtgcttttcaaatatttttccaaattctatgttactactcaatttatgttaaatcataaaataacttgggttttttttaatcaaattatattatgataaattttgttgttcttctctatttatcatcaattataaatatatttctaattaatcctgttatgatgatattcaatttcttgcagaatatatgattgtagtaaacaattttgatctttttttgctattaaatcaaaaatttataccaactttatcaaaatcattgcctattcaaacttgatgattattattcggtttatttcaatttttctctattactaacatagtaacatttatctaattaacctctcttccccaaaaaaaatctaattaacctccttggattttccttttttaattatagagtttgcttctttttttttatatataaccggtcaaagcttttgttttgtctcatattcatcactttcgttgttaagacggaaaaaaaaaaaaaagaggcagaaccaaaaaactttagggttcgatttcgctccttggtaatcaccatg

SEQ ID NO: 32984 - DNA, 3000 bp, Unknown
  misc_feature (1)..( 3000): 2750-1469P.txt file - cDNA_ID_3063933; gDNA_ID_1620440; Annot_ID_157137
tttgatagattcactgttgactcaaatattaaagctaaattgggtcattgcagatagtgatgtttgtatttagttcagtttattacttaacttagtttgattttcagtgtttcgttggttttacttttgctttgcgtgttttcttggtctagttacttcagacagaattagcttcacctttccatgtacaaaattatagttaaaagtaaggatacaaagtgataagtcaacatcactgattttttttttgtgaacttctccacttgcaggctgtgcaatccatggtgcagcaagcaatgcagtatatcgatcagacaccagacattgaaactcggatagagcttatcaagacgctgaacaatgtatctgctggaaaggtgcgaaactatgaaactgatggtgtattctttataataacttcatcattctgtgtaattgtttaccattgcattttacatgtatagatatatgttgaaatcgagagggcacgtctcaccaagaaacttgctaagattaaggaagaacagggtcagatagctgaagctgcagatcttatgcaagaagttgctgtaagattttgtgcatttggctattaaatctcctggaaattttcttcccttgttaacccctgcaatttgataaataattaacaggtggagacatttggtgctatggcaaaaactgagaaaattgcatttatccttgaacaagtaaggacttgtgtagttacgttgcaattaataatttgctggtgttttctttcattgtgataactatcaaactattgtggtcaaactttaaaggttcgcttgtgcttggatcgtcaagattttgttcgtgcacaaatcttatctaggaagatcaatcctagagtttttgacgcagatacaaaaaaagataagaagaaacctaaggaaggtgataacatggtagaagaggctcctgctgatataccaacccttttggagcttaagcgaatttactacgagcttatgattcggtacggccttcttgagcttctctatcacattgttcgtgatttgtatttccatcatttatcatggcattttaaattcttatatgactgtttaattatggacctctctctctgtctcttaaattctatcaatctgtgtggcttttgcttgctatggttttctcagagatgcatattacaactttttcctggaggacagtatcgaaatttggatgaatctccttttgtgtcaaatttatgactctcttttcatggccaacgattttggacatcaattgcattatgttatccactgaattctgacgtaccatgattgatttctgtggcattctcatcttttttattattaaccataaaaaatttcaactatgtaggtactattctcataacaatgagtacattgaaatctgccgtagctacaaggcgatatatgatatcccttcagtaaaagaaactccggagcagtggattccggtaagctcatgccgttgattggatgtatagttagtatacattctatagggttagtgtaataactttctttgatcttcaaaacattaggtcctgaggaagatctgctggttcttggtcttggcacctcatgacccaatgcaatcaagcttgctcaatgcaactctggaagacaagaatttatcagaaatccctgatttcaagtatattttattttctgataaattttgttatttcaataactgattcttttgtactcaaatgggttctcagtctttttttctttgtttgatatcacccgtttcaggatgcttctaaaacaggtagtgacaatggaggttattcaatggacatctctgtggaacaaatacaaggatgagttcgagaaagagaaaagcatgattggaggttctttgggtgacaaagctggtgaagatctgaaactgagaatcatcgaacatgtaagtctctcaatttgtctttaagcttgtttacataagttgattgatgctttaaagttattaatttattctgcagaatatcctcgttgtctcaaagtactacgcaaggataaccttaaagagacttgccgagcttttatgcctgagcatggaggtatgtttgatctaatctcactggctatatcaactatgcttctgcttgttataattgttggaaattgtgatttcaggaggcggagaagcatctatcggagatggtagtgtcaaaagcactgattgcaaaaatagacagaccatctggaattgtgtgcttccagatcgcaaaggacagcaacgagattctaaactcgtgggcagggaatttggagaagcttctagatcttgtggaaaagagttgccaccaaattcacaaggaaaccatggttcacaaagccgctctcagaccttgaaaacatgcggtcttcttcatgaaaacttttcaggatcttcttcgttgagttattagcatctttatgtggtaaaaactcgaatcagtgtttccttttaaaaattgtactatggatctgtacactaacgaagtgttttgccacttattggttatttcaagtgttggtggattagtttttggttaaattgttagaaaatttacatgaatttactgaacgagaagaataatctcgtgtgtgccccaggagatagatccaaaccttgcgctgacaaaaagtcagacgataaaaaattgcttcatcaaagattgcaagttaataataaaaactaaaattatgatggcactggcacatgtatagtcttccatactctaaaaaaaactaataaaatttgtttattgttgttaattaatgtgattaaatttaatagagaggagacagctttgccagttcatctctggtaaatagtccacgttctggcgtctttgggatttcaccaacaccgtgacagctccttagatctctcctcgattacttcctttttaatttccatggctctctaaaaatctctctctctttctctctctcttacttgtattgttacgatctctgcttgaagattatg

SEQ ID NO: 32985 - DNA, 3000 bp, Unknown; identical to SEQ ID NO: 1726
  misc_feature (1)..( 3000): 2750-1469P.txt file - cDNA_ID_3063937; gDNA_ID_1620440; Annot_ID_157136

SEQ ID NO: 32986 - DNA, 3000 bp, Unknown; identical to SEQ ID NO: 1727
  misc_feature (1)..( 3000): 2750-1469P.txt file - cDNA_ID_3063945; gDNA_ID_1620440; Annot_ID_157132

SEQ ID NO: 32987 - DNA, 3000 bp, Unknown
  misc_feature (1)..( 3000): 2750-1469P.txt file - cDNA_ID_3063949; gDNA_ID_1620440; Annot_ID_157130
tgaaccagaatcttcttcatcctctgagagtgatggttcatatactggaagctttttggtcgtcgggtgggtagttgttgtatcagaaactggaccaagttctgcgaatgccaagtccgaatcatcttcttttgacttggcatttggtgaaggagttgaaggaaagatgtatccagatgctattctcactccatgcatgactcgaatcagagactgcaggttgtcgtaaccgagcttgtcaaccgctaaatggtacccatactcctctaagaagtctttcctgaaacgaatcaggctatacccttcagggtgttcctctgttatcttctttatcatcttctgacaatccgctattgcattacttttgtatctttccagctctttccggtccacagaaccaacagaaactccagcatgagcaacgttcttgccgcttttctcaccattttgtttctgccactgtgattttgaagaatccgagaagattgagctcaaaccgtttgaagcatgacggtggccagggctagatcctttgatgattctgaatggtaaagaagaagatggggtttcttcaatccatttcttttctgatattagcaaagtaactaaatgaagcatgcttgattcatcgagcagtctgagacacgaaggcccttcctcctgcacatttttagccatcacctccctgaccaggttaagacggaacagcattagctgaatactcgtcccaaaaaagacaacaaatggctaatgcaagaaccaattgtaatagttctgaacctaagatagatttacatattaatcaatatctaatcaaagtcctgccaaatcaggagggaagagaatgtacgcaccttgtcctcgagtgagatactatagcaaagcctcttggagaattaatgaaagattcaatatcactccaaaaatactcttttgcaaatatgtcttgtacttgagaatcaacattgacaagctcctgattcccactagagtctttgctagactttgtattctttccccagaacttgaaactcttcaaaaggcgacctaaaaagcctggacttgcatctttatctttactgtctacgtcatcagctccaacttttacctcatcgaccgactcagcaacgaaagaaggtgagatttgagacatgggcacagttccctgactcgatgactttaagtccttatcctctttatgtttgtttccacttccctgacttgatgactttaagtcattatcctctctatgtgtgtctccacttccagaaacgctcttcatttctgggagatgctctaattccatctcaggtgaaccataccacagtctttttagcttttgaaaaaagccatcttccatggacgaatcactccacgcaacaagagcgacttgattcgtctcgacgggtttaacatttgccttaacatccttctggccgaccagaattgggtcttgagaactctctgatgattcttctttaacaattttatcactctccaataccttttcctgcttctttccaagtaagccatctcttcttctttcagcagcaagctctacatcgctaattagctttggtgatggagcattaacagtttccttatctttaatcttctgatcaacagcagtagacaaacgaggactagaatcaagccgcatcggaggcttcttttcggtaacagcccgaatcataaacaagccttcacttactgtagtaacctgtaagatatctggcatggataaaagaaacttcgaaaacttcttatgtccatagaaatctttatcaatagccaagttgctcttactcagctcagcacgtagttctgtaatggcagcccccttgggatataaactcactatcgaacgaatcttatcaacaacttcttttggaataggacgaaggttaacaacagcattcgaattcacagactcggatagttcttcgattttcacactagacgaagattgctcagtagtggtagcaatagcaaatggatcaagaagaggaatcctatagtgaccataccaagagttataaggaccatcaggaggctgattaaaatgcttaccagtaacacactctcctttaatcaaagcatcccaatcccacataatagaagcagcactacacaaaacaccaggagctgatgatttactcgcaagcaaaatgttgtaattgttcatcctcaatctatgtaacacacttgcaaactccttatcactagagattagcaaaagatgagctggtggtggattctgagaaacccaacacataagatctgtgattagagatctatcagcactgttcttaccaccgttaggaacatgagtgagactgattcctgtagcggagagagcgtcttggtttgatctggggagctgtaaaacgtcaccgaaggctgtgattgtgattggtcctttgattccgctgtttctgatagcggcggtgattgattgtgctactttgtagacattggtgtctacaggtaagttacagctcaggaagtcccaccagaccgaaaccctaacggatcgggactcttcgtcttgctgaggacgtcgagagggagaatggctggatccggagacgaaattggagccggaggtggttgtggtggagaatggagaggaatgaatgttagtgatgaaaagggtaattgttcgacggtgagattgggttgtggaggaagaagagaggcggaagagaagggatttggatggtaaagatccaaacttcatggtcggagagctatttttgctccgggaaatggagagactgagagggttttaggagtgaggaagacgaagtaaaggaaagcagagcttaaaccctagttattattttggaattgtcgataaccgaatggtatcccaattgaaccaaactaaaccgtactctcgctaaaccaaaaccaaatagcgtatggtttaatattctaattcaatgagtacagtaattagggatttcaatttttgtttgagagagagagagagagatg

SEQ ID NO: 32988 - DNA, 2509 bp, Unknown; identical to SEQ ID NO: 1721
  misc_feature (1)..( 2509): 2750-1469P.txt file - cDNA_ID_3063951; gDNA_ID_1620440; Annot_ID_157127

SEQ ID NO: 32989 - DNA, 3003 bp, Unknown
  misc_feature (1)..( 3003): 2750-1469P.txt file - cDNA_ID_3063951; gDNA_ID_1620440; Annot_ID_157128
acattatatattgatcttgatcgtatgatttcatttatatttagggactgaattatatattatattgtaacatttaacatacagtatatcatgtgttgctagttatgatttacatgcacttcgaaaatggtatctgattttttatatgatttagaacttatctggcacacatcattgaataggatctaacacattaaaacactgtctaacttatttgtttgtatgtgtgtgttaaatcatcattttagctaagatttttaaccataggcaaagaaatgactcaaatgagcaaacgagaaactgcagacagcaacatatatcaaactaactctaataggcccaatatagcccaataagaagtgtgaccgatggagggaagaatcgaatttaaatgatacagagtttttttgtttggagaggaatagactgatatgatagtccgtgaaaatattttcatcttgttttcaatgtggagatattttaaagtttgaaaccaatccaagttctaaaacatcaaaagcttttattctctgtttaaaccacttggttggtcttggtcttcttgaaatatacaaaccagacccaaacgataatcagtgaagatgactgcatcattgggtctttaagtttcctattgggccaaatcagcccaactatattattgttattatttcagtccattaaagattttcggcccgttttatcgttgggaattcatctatatttccccaatttgatgatacacagaacaatttcatgtgtatacgataagaggcaaattcaaaatttgcaatcaatgtaaagtggaaatgagaagcatggtggctcaaatcaacttatctttccttggaatacaaactacaaatgatgacggatttggcttccctttgaatttaccttttacctctctctttttttttttttataggtaatgttgttattggacaaaaatgttaagaaaataaaggtgaatgataaattagaagagtacccataactattttgattatttaagttgccaaccaagctagaccactttccaacttttatagacaaagtgtaagaacttagcacatgctttccaacaaggaatatgaaactttatttcaaaaagattattgttaaagcttttaatcattctaaaaggtgattaatatttgaattattggaagtaacttgttttggacatataccaaattaatcaatagtatcaatggacatataacatgttgtgagactatatcaatgttatattccaagccagttaaaccaatttataatgataccatttatagataaacaatacactttacacacattattttcttagaattgggtctcatatagaacactcacaaaggtgacttataaaaaatgcttcaaagatcctagtcttttagtgtgcattcctcaaaatcgtagttgatatgtatcttgctcctattcgggttttggtctagaattttggtttcaggaattttcaattaactcattaaaacatttataacataaaaagatatatcacgaaaaccgatcaatcatttaatatatttttattttattttattttttgtcacaataaaatctagacaatagtgtttaaacatttatcaaaaaattcaccttacgattaatttgttttatattttgtgatgatgcaatttaatctatataaattataaaacatatcgataatctgtgtttttctttttctacatataaaattcataaaaatgagagttttgaagctcttaaaatggactagtcaacaattggccaatctttgttctaaattgctaataaacgaccatttccgtcaattctccttggttgcaacagtctacccgtcaaatgtttactaatttataagtgtgaagtttgaattatgaaagacgaaatcgtattaaaaattcacaagaataaacaactccatagattttcaaaaaaacagtcacgagaaaaaaaccacagtccgtttgtctgctcttctagtttttattatttttctattaatagttttttgttatttcgagaataaaatttgaacgatgtccgaaccacaaaagccgagccgataaatcctaagccgagcctaactttagccgtaaccatcagtcacggctcccgggctaattcatttgaaccgaatcataatcaacggtttagatcaaactcaaaacaatctaacggcaacatagacgcgtcggtgagctaaaaagagtgtgaaagccaggtcaccatagcattgtctctcccagattttttatttgggaaataatagaagaaatagaaaaaaataaaagagtgagaaaaatcgtagagctatatattcgcacatgtactcgtttcgctttccttagtgttagctgctgccgctgttgtttctcctccatttctctatctttctctctcgctgcttctcgaatcttctgtatcatcttcttcttcttcaaggtgagtctctagatccgttcgcttgattttgctgctcgttagtcgttattgttgattctctatgccgatttcgctagatctgtttagcatgcgttgtggttttatgagaaaatctttgttttgggggttgcttgttatgtgattcgatccgtgcttgttggatcgatctgagctaattcttaaggtttatgtgttagatctatggagtttgaggattcttctcgcttctgtcgatctctcgctgttatttttgtttttttcagtgaagtgaagttgtttagttcgaaatgacttcgtgtatgctcgattgatctggttttaatcttcgatctgttaggtgttgatgtttacaagtgaattctagtgttttctctttgagatctgtgaagtttgaacctagttttctcaataatcaacatatgaagcgatgtttgagtttcaataaacgctgctaatcttcgaaactaagttgtgatctgattcgtgtttacttcatgagcttatccaattcatttcggtttcattttactttttttttagtgaaaaatg

SEQ ID NO: 32990 - DNA, 3003 bp, Unknown
  misc_feature (1)..( 3003): 2750-1469P.txt file - cDNA_ID_3063986; gDNA_ID_1620441; Annot_ID_157179
ataccacaggtttctgaacctgtaacaagtcagtagtaaatcaccatgagaacttaattaggcacaagaagctctacttacacccgtcctgaaagttattcatattttagtaattggagtcttttgaggatattactatacttcagtatacgattagttaaggatttgggttccgatcttatctaaggttttcatataactttcctctttcgtaattcaggatgttaggtaaagggatatgttcagacaaaagcatttcagctgaaaaaaggtcaaacataccgcattggtggcatcaaactttccacctaatccaacctccaatatagcagcatctacctgcataaagaagcaaaaagcagaaccccttatatcaataaagagaacatgatgttagtttatctatcatgtcactgagtaagaaaaatagtcagccaaggtaaagactggtatcaaacctcttctgcagcaaatattttaaaagctagcaatgcaaggaagcggaaatatgtaggcattggtatctcctcgttagttctctcctgcaaatcaaatagtcggcaaccttgtattttgagtaaaaaactaaagcatgtatcttaatttgcaactatgcacaccattgtaaattcttatgagttcatatcatgaaatactcagaccgcaaaacaaaaggtgacttcaacaagatacagggaagacactatacatgagctctaccgcatcaccaccccctcgatgaaaatagttccaataatacaatttctctaagtaccaaaacttcagtactgaacaccatggttttaagctaaaatggaaaaacaaaataagtgttcatgaaaaagggtgttttacatgtttatcacattctatatggctttcatcactaagattccaagtttacagaacgttactaacaactagtctactagtcaatcgagataaccaaactacagatattgagttcaaaacaaatgaatcaaatagctgaaccttcttttctcacgaacataccttgagcctgttatagcaccaccagaaatatcccaaaaatttctcttcacttatgtccacactgcagcaataaatagaacatatcagattaagcgaatataagcatttctcagtaaagaagagtgaaaaacaggattatgctagcgaagtattgttggttcctgattatatgagggccggtaactatatatttattttctcaaaattttcagcaaacttagaaaaacttacccatccaaacgaaatctttcccggacatcaatgaggtgaggtgaagtgaagagtccagttcgaaagccatagtttcgaataatagactctgtaaaggtacatgtggatcccttcatgccacataagaaacaaaaaggaatactgttaggtgctggatcagatagtaatcagccatgctaacaatgaaccactttcatcaaacaagttcactgaaggtttgaatcaaaaagtaagcaagtactagtttcataacaatttcctttgtgctatcccaaatctactatcacataagtgatatgagtcaagattaaagtagcaacttttgcaaaactgacactccatcagatgaaaccatacgcatctccaagcatgcaaggatctcaaaaccaatgttcttctcgcactcactcaaattggaaaaaagctcaagatgactcagtccagaaacgtatctctaatccccacagagcaaaaaccttaggcttcttctgacaaagcagtcataaggacgtaacggtcacaactagtgtagaagctgacacgaattcagaagatatctaactaactaactaaagtaacaaaaccaactcctaatattgacaatagatgatttagtatcatttattgagctttaccagaaaaagtaaagttgttgttgttaccttgcctttggtaccagcgacatgaataacattcatctttaaaatgtcttcttccaggtcaagtagctgccaaattaattacaagaagcgtattcaatcagaaaataaaacaaaaggtgcaataaatattcaaaactctacgagaatccaatcgaaaagagaaaccttgagataatcaaagactaactcaaagcgatcccctttattgctcttatcagcacgacttcgtttcgtgatcaaagacgacaaagcagccaacgcttcctcatatgaatcacctcctgtcaccaacaaaaacaaacaagtgaactcgattcgattactgttatcatcaagtgaggaagagctagagaagaataagaaaatcaataacaaaccttgagctgccatgtcgatctgctttcttaacgaatgaatctgaaacacgaataagagagaatatcagagatgccgaaactccgagattctcggaatatgagagacagagagcgaaagagaaagggaaacctgaaaagagagaggagatggtaggtgaggctggtggtgttggtagtgatggtggagccgaagagtgagaggaatcgagagttgacagagaaaggcagagctcaaacggcacgatgtggttcgaggtactatcgaaactgcaaacattctcttgtcactaacattgctacacttcttttgctttttgtttactctttttcggcaatttgttgacgaaagcggcgcatcacaaagacgaaaaaaaaaaaaaaaaaaaacagagcgcatcacaattttgttaagcttccttattaaatacaaacttaattgaattaataaaaagtctgggtggtgtagtcggttatcacgctagtctcacacactagaggtccccggttcgaacccgggctcagacatttttttactcttttttttgggattttttagtttgcacgtggggactcactcgcacacgtgtgtactaatctccatttcttaggcaaaagcaaaccggagaaccaaacaatcacgaatcgtgtaatcaaactcatcggagtctctcgaattcgtctttgaagaggaagagaagagaagaggcgagggagatatg

SEQ ID NO: 32991 - DNA, 3000 bp, Unknown; identical to SEQ ID NO: 1732
  misc_feature (1)..( 3000): 2750-1469P.txt file - cDNA_ID_3063988; gDNA_ID_1620441; Annot_ID_157178

SEQ ID NO: 32992 - DNA, 3003 bp, Unknown
  misc_feature (1)..( 3003): 2750-1469P.txt file - cDNA_ID_3063992; gDNA_ID_1620441; Annot_ID_157172
aagaaaaaaaagtcaaatatattctctttctactcgtgactgaggaagagaaacagagagcataactttatatccagccgattttttttcaaatttcttaccttttgctctcactaaagccatgttcttacctttatagtgagtgttatctaaactcttttgggtcttttgcaaaagaaaccagttttcaaagttcaaaattttgtttttaaaaatggagaatttagtgaagagctgcgcagggatcgagaagaaaagaagcaatttgactccatcgatggaagatatacttacagagtcaaaggagagaagcagcactagcggagcgagctacgaaagctcctccaccaccaccgtcgcttcgtcttctccaccaccaccaccgtcgcagattctgggttggccgattagaaaagcttcatttcggaaaaattcgaaggagagtgttaattttgatcataagaaattaacccttcacgatgattctgggtttaaagcgaaagagatgaattctgcaggttagtgagaaaaaatcaaaaattgaaacttttttactcagccctaagatctcatgtgttttctttgttgttgttgttaatctgattgtggattagatgtggagatgatgaaggagagatttgcaaagttgttacttggtgaagatatgtcaggttctggtaaaggtgtgtgtacggctttagctatctccaacgccataacaaatctctgtggtaagtcttaaaaaaagacgaagctatcttgtgtttgttaaaatgcttgaaccaaagtgttgaatttgatgtttcttcttttagctacgattttcgggcaactatggagattagagccactttcaagcgaaaagaaggagatgtggagaagggaaatggagtggattcttagtgttagtgatcacatcgtcgagttaacaccttcaacacaaacttatccagacggcaacaagtttgaggtaagctcttgattttttaagattgttgcaactgcaattactggagtttgaattgtgaatcttcttcaggtcatgacttgtcgaccaagatttgatcttttcatcaacctccctgctctccgtaaactagacaatatgcttctcgtgagtttcacttaactttcttatacgatgatcctctcaagtgaaacctgttttgatctctgatgtaattttcttttgcattaggatatattggcgagtttcaagaaaactgagttctggtatgttgatcaagggatcgttgcttcggaaaacgatggctcagcttctttccgcagaaagattcagcgccaagaggagaaatggtggttgcctgttcctcgtttagcaccgaatggtcttactgaagaagcaagaacagaattgaatcataagagggaatgtgcgacgcagatacttaaagctgcaatggctattaacagccttgctttaaccgaaatggatgttcctaaatcataccttgaaacccttccaaaggtctacatctttaactcaaaacatccctataaaaaccattgtaaggttttttttttgttctgacattaaacttttggtacagaacggtaggtcctgccttggggatgttatctacaggtatgtaacatctgacaaattttctgcggagtctcttctcgattgccttgatctgtcctctgagcatattgctcttgatatcgcaaaccgtgtggaagcttcgatatatgtttggaggagaagagttcaaacaaaacttggagtcaacaataatacttcaagcactactccaaagttaacatgggaaatggtcaaagaactaatggctgctggtgacaaaaggggattgcttgtggagagatcggaaactctcttacgttgcttgaagcagcggtttccttctctaacgcagacttctctagacataagcaagattcaatggaacaaggtccagacacacaaatcctctaaatacattacagtacaaaatggctttgcttgttcttatatattcagtcctttgaaaatttcaggatattgggaaatcaatcctcgaaagctactcaagggctttggagagcttagcatcaaacatcatagcacgaatcgatgatttactctacgtggacgacttaacaaagcaatcagatgataacaatcttttgtcaagtccagcggtcagcagcattatagctcacaagaaagtagtaccactcccttatctaatatctgcatcaggaactccatatagaacaagcttctcaacaacaccaggcttctctccttcaatgattagccccaagaaaggagagaggagaacaccttactccagcaaggacactaacaaaatcattgagaaaggtcttccttctcgaggatatggagtgagaagagtcttgaacaattatcttggcatggaatcaaaactgaaaatatgcgttaatccgtcagataatgcagatacagcagtgattaaccaaatcagcaaagacgtggaagaagagaagaaaagaaactcaacatcagtccatcaaaagggtcctccaaagtacactgtctcttaaaagctaatagaagaaactcaatagagtgtataattaatgcagacatggattgatttgtttgatatttacttgtagtttctgtcttatttggaatggtaaagtgtctatctttgcaaaccaaatcagatcacaaaatagacaaaaatgagagtggttgtaacaaatattctcatcaaatttgttctggtttggtttactagctttatttatttggtaaacaatcaccaataacgtgtataatttaaagttatgattataatgtttctttttgtaacccactacaaaatgtcgttgtagtatagtggtaagtattcccgcctgtcacgcgggtgacccgggttcgatccccggcaacggcgattttttttttttttaaatctcttcctccttttttatttcctttctgaacgaagctctctctctgattggccggatctgccggagagaaaaatg

SEQ ID NO: 32993 - DNA, 3003 bp, Unknown
  misc_feature (1)..( 3003): 2750-1469P.txt file - cDNA_ID_3063996; gDNA_ID_1620441; Annot_ID_157171
gatgtgactcaacccaatcaaaaccccaacatctaaaatcgagaaatctgtgatcaagttccttacgattgatgtaccaatcgattggaaggggagagaagaaggacatacctttgattaagatgcaagggagatgattggcgagagagattatgggatctgcagctcaatgaggacgatgagttttctaattactactcaattttcctgggaaaatgaaaaaggtttggaatttggataaaggagacgggagctgtatcttcacgtttctcgtgttttcatttgtttttttgctcttgggatagcgacgaatcctgagattattctaatttcaatcttttcttcttcttcttcttattcttgtcttcttcttattcatccttcaatagttttcttaccaaataaatagcagcaacaataaaacccctttcaaataagttggaacgtgattttttcacgttctcaattacttgaaaacgtgatttatatcaatatttcaccgttcagatttcagaagataaaatcgtttaccactttaacgttttcacgtttccaaacatgattctgattttgattttgtgcaaaatgtattttattagtctaaactataaaacagtttatgaatattctagaaaaaaaccctctattcagctataatatttgtttgattcaataattttatgagattttaactatcaatctcacatataccaatttgtcttcttatgaactttatggttgtatttattatgattagtgagtatatattttctagggttgaggttggcaattggcatatggctaaacaaccctattgcttaaggcttagtttatgtaggttaaacttgtacttagatctaagatatctatatgcgggcagcacaacatgctttcaaccatgtttagatagtttcaattgcaaacttaagcaatgattcattactactgagtatatgagaattgaagcaaggtttagtcgtttagatagtttccttagttttcttagcttagatctcaacaccgaccaaacataatcatttatttggactataagaactctcacgatatcttggtttgatttttacttgttggatcaagggtttgagggcaatagtttatatttacctaacttgaatggagcattcgtccctgaattgcattttgcacctatagaaggtgagagagttcatgctcgggtataagaagtaatggacttgaacaagagggcgccaaaacttttgtctaatctccattgatactgtaattaaaaaaaatatcttcataaccaaataaagagtctatagactatatataggtcagtcgttttcctttaaattcaaacctcttatgagattttttaaagaaatatcgtaagaaagaaaattttcaatcatgaagtctataaaagttgtatatgccaaacataaaaagtttgaagacaaagggtttgaaaaccgagattgaatgtagaaggcgggacacataacaaaaaaagtttgtaagagtcattaagagagtagtaagtatatcaagttatcaatatagatcgatatcaataccttttttaaaaaaataaaaataaagttacaacatttgggaaaagtaaaatttaggtgagtgctgtgtcgaaaaagtcaaaaactgtcactttaataaaagtactataccttatacatataagttcatttgaatttttgtaaaacacatccgtttaacaattcgaatttagacagtccataacctttcactttattttgactagtaatcaatagtattgctttatcgaagttcaaattttagaattgttagatgtgatggacaaatggacatgagtcgttatgacgtaacaaaatcctaaaaatacagatgtttgttctttgttttttttaacgcaatggaaactatacatttttttgaaaaacctaacaaattttgtttataaaggatatcaaattgttatcgtagaaactagaaagtaggaaaactaatttaaattagataattaagctctcaaagtcattaagctacgcctaattgtgggaggttaggcccttaaacggctacgaacttcaaacgaaatcgatatgggaccatgcgtttgaattaaaacctcagattactatattgcacactacagacatccatattaacgaaaatgccactcacttacccattgcattatttcctgacaacaaacaaaaagatggctgcattaaatccacttaatcctttttaaactcctaattattacttatttactttaatattggcggcctatgtcacattaaattttggtactcttcaagaagaatgtctccactttcttttgtatgaacatttttccggtctactctgcattcaataatattcagaaagtggttttgttgatatttgttgccatttttcgttcaataaaatcttataaactgaaattcaaacttatcttagacccaatgttaaaaaataaaaaaaaacttatcttagaccctgaatacagctatattcgtgtttaactaaaacaataaaacttatatttgaagttattacttccaaacaattaaacgtacttacatcttgtaagatttctttagttaacatgtcaattttggaaattcacctgtctcatttacgtaactaattattgccttgtaattaataaaccacaccgagtcaccaattgctatttgtggtaaaatactaaattcttgatttaaaacatgggcagaaccgtaatatccacaccattcaagaaatttgtccgccaaaaagataatttaatattttgaaagaaaaaaaagtcaaatatattctctttctactcgtgactgaggaagagaaacagagagcataactttatatccagccgattttttttcaaatttcttaccttttgctctcactaaagccatgttcttacctttatagtgagtgttatctaaactcttttgggtcttttgcaaaagaaaccagttttcaaagttcaaaattttgtttttaaaaatg

SEQ ID NO: 32994 - DNA, 3000 bp, Unknown
  misc_feature (1)..( 3000): 2750-1469P.txt file - cDNA_ID_3064003; gDNA_ID_1620441; Annot_ID_157168
taaatgagacaggtgaatttccaaaattgacatgttaactaaagaaatcttacaagatgtaagtacgtttaattgtttggaagtaataacttcaaatataagttttattgttttagttaaacacgaatatagctgtattcagggtctaagataagtttttttttattttttaacattgggtctaagataagtttgaatttcagtttataagattttattgaacgaaaaatggcaacaaatatcaacaaaaccactttctgaatattattgaatgcagagtagaccggaaaaatgttcatacaaaagaaagtggagacattcttcttgaagagtaccaaaatttaatgtgacataggccgccaatattaaagtaaataagtaataattaggagtttaaaaaggattaagtggatttaatgcagccatctttttgtttgttgtcaggaaataatgcaatgggtaagtgagtggcattttcgttaatatggatgtctgtagtgtgcaatatagtaatctgaggttttaattcaaacgcatggtcccatatcgatttcgtttgaagttcgtagccgtttaagggcctaacctcccacaattaggcgtagcttaatgactttgagagcttaattatctaatttaaattagttttcctactttctagtttctacgataacaatttgatatcctttataaacaaaatttgttaggtttttcaaaaaaatgtatagtttccattgcgttaaaaaaaacaaagaacaaacatctgtatttttaggattttgttacgtcataacgactcatgtccatttgtccatcacatctaacaattctaaaatttgaacttcgataaagcaatactattgattactagtcaaaataaagtgaaaggttatggactgtctaaattcgaattgttaaacggatgtgttttacaaaaattcaaatgaacttatatgtataaggtatagtacttttattaaagtgacagtttttgactttttcgacacagcactcacctaaattttacttttcccaaatgttgtaactttatttttatttttttaaaaaaggtattgatatcgatctatattgataacttgatatacttactactctcttaatgactcttacaaactttttttgttatgtgtcccgccttctacattcaatctcggttttcaaaccctttgtcttcaaactttttatgtttggcatatacaacttttatagacttcatgattgaaaattttctttcttacgatatttctttaaaaaatctcataagaggtttgaatttaaaggaaaacgactgacctatatatagtctatagactctttatttggttatgaagatattttttttaattacagtatcaatggagattagacaaaagttttggcgccctcttgttcaagtccattacttcttatacccgagcatgaactctctcaccttctataggtgcaaaatgcaattcagggacgaatgctccattcaagttaggtaaatataaactattgccctcaaacccttgatccaacaagtaaaaatcaaaccaagatatcgtgagagttcttatagtccaaataaatgattatgtttggtcggtgttgagatctaagctaagaaaactaaggaaactatctaaacgactaaaccttgcttcaattctcatatactcagtagtaatgaatcattgcttaagtttgcaattgaaactatctaaacatggttgaaagcatgttgtgctgcccgcatatagatatcttagatctaagtacaagtttaacctacataaactaagccttaagcaatagggttgtttagccatatgccaattgccaacctcaaccctagaaaatatatactcactaatcataataaatacaaccataaagttcataagaagacaaattggtatatgtgagattgatagttaaaatctcataaaattattgaatcaaacaaatattatagctgaatagagggtttttttctagaatattcataaactgttttatagtttagactaataaaatacattttgcacaaaatcaaaatcagaatcatgtttggaaacgtgaaaacgttaaagtggtaaacgattttatcttctgaaatctgaacggtgaaatattgatataaatcacgttttcaagtaattgagaacgtgaaaaaatcacgttccaacttatttgaaaggggttttattgttgctgctatttatttggtaagaaaactattgaaggatgaataagaagaagacaagaataagaagaagaagaagaaaagattgaaattagaataatctcaggattcgtcgctatcccaagagcaaaaaaacaaatgaaaacacgagaaacgtgaagatacagctcccgtctcctttatccaaattccaaacctttttcattttcccaggaaaattgagtagtaattagaaaactcatcgtcctcattgagctgcagatcccataatctctctcgccaatcatctcccttgcatcttaatcaaaggtatgtccttcttctctccccttccaatcgattggtacatcaatcgtaaggaacttgatcacagatttctcgattttagatgttggggttttgattgggttgagtcacatctgaatttcagcgtcattggttggcaactgcgagactttctggtgccactgagattttaacaaaattggggttttcgattcaaaaagtcttttctttttgggtacttttcgttgaacccttttaggtagagtttctgttttcgaagaaaaagtcatggttttaaggggtttaggtttgaggtagcttcagtttcggaatttagctttgactggttaaggaatttgagctttatgagtttattcgtcttcctatcttgatgattcttccgttgtgttgcatattcaggtgtattatatccgcaacaagatcattagagaaggctgttacaagtttgttttatgaccgcgtaacagctcacttggtaattgatg

SEQ ID NO: 32995 - DNA, 3000 bp, Unknown; identical to SEQ ID NO: 1748
  misc_feature (1)..( 3000): 2750-1469P.txt file - cDNA_ID_3064019; gDNA_ID_1620442; Annot_ID_157199

SEQ ID NO: 32996 - DNA, 3003 bp, Unknown
  misc_feature (1)..( 3003): 2750-1469P.txt file - cDNA_ID_3064026; gDNA_ID_1620442; Annot_ID_157215
actataaacataacaatgtcattacaaataaaaactctaaagatgaactctacgttcactcatatcttggaatcgttttatcacgattcgtttgtaacagtgttaagtacttgcttttcaataaaacaaacaagacaatcacttaagaacacatcactgatacggttacgcaatgtagtcttcacaaaattcatcgcggaaaaacatctttcgacagttgccgttgcaacaggaagaatcaaagatagctttagaagacgatataccaaaggatgtgaaagatgcttttttgtctctaccatcacacgagcaagatcaccaagacactttaaatctgtaaacttttcatcgtttttcacattatcaaggtagatctcaagttgatgatcaagagatctacgctccacaaaactaaagtcatctggataaaactcgatcaatctcacgagcatggacttatcaaactaacgaaaagaatctatcggactcacagaatctatggtccataactaaaccacatacttctttttaaaagggcctgtctgtttattttttattttcttagatctttttgtaattggtccatgatgactgagtaagaccccaaaagccgtaaaaagtaaaaaaagatggaatctttatagtttaaaaacaaaaggctagtactaaaatatctagttacggttacgtgtgccgccatagaaaaacaaatcttctgctcagtcttggattgagaggtaagagatccccaaaacttcgcttttcaatctctgaagctgcttttgaattctcatgttgatttctttgaatttgcatcgatcaagtttaggttttttggatttgggtttctcctaaatatcttctttgaccagtgtgtgtgtggtttggatttatccttttggatctttgtttctccagaataagtacagaaattgtaatctttgtcaaattttgtttattttgagtttcttagtgaactcagttggataacagtgacacatatgagatttgagatgaatttattttctggtaaatgcatagagattattaatgtttcttactgatttgagaattgcaaggcattgtcctttgagtttggtgttaaagttagcaaattggtgactatctctattgagtttacatgttttcttggttgttattgtgaggatttaagatttgcctgcttttgtatttctctttggtcttgtaatgtcagaattgtttctttcttaaagttgatttctttgtcaatctttaaacagagatcgaggtgtttttgacgcaatagaagatcgttctgcgtgttattatccaagaactgctttagtgttataaacatttgagcagagatgcatttgtggccatcgttgaaacttcgaaactctttcaagagcactagccagaagagatatcaaaggatgaacagtgggaaacaaagtcaaagcaatcagcagaaactccttgacggcgacaaagaatctggaagccccgagatttcgtctggtggtgggtttgctgttgtttgtagagatgttgccatggttctttcttgctgctactgctgtttctgctgtggaggtaaataaaccttctcgacacttttccccttagctagtatctgtgtgatctctggaccaatgttttcgtatgacctttgagcattatatgcaagcaccatggcacattctcatcacatattaacttagttggtatcagtttagaatctagattaaaccatgatttttatcttttagcagatatacaatggttttcctttagtgattattcgttcttcttcatcaatttctccgattctgattctgattcctctgatttgttcagcttgcattgatgaggaggagatttgatgcaatcatgtaagctcctggtggaggagttaagtgaaagattttagccttagaaaacatcaatctctcaaaatgtaattagaaatgttgtttataattaatctgaattctttttccacctttcccaaatcaaatttatatattatgattgaaattcacgatattgactttatcaaatagataagcatggttaaatgatttcaaatgattttctatttaacacaaactaaacttaaacagacacaacttttgttcatgtagaattttaactattcatggcatttaggatttgaactgttgaatttccgtttaaaattaaatgtcatttttaatgcattattttaaaaattatttacatttttatgactttaatttaaatgtattttaataagaaaatttataaaatatattaataaatagtaaaaaataggtttttcatatgtatgtcaaattttaaaattgttttttttatataaacgatatttatttataaacggaaggaatataattttatgagttttttttctttttttttttgtcatccaaaattaattaaaactcaaacgagccaatctcgagggatattgtttacacatgtgatatgatgcggttcggtacggattttccgcgccaaattattcgcttttacattagcacttcgagaaattaaagataaagaaaaatttgtgagttcttccttgtcgctttgcaattcctccaaatacacagaaaatgccggccattcggttggacaattttatgaattatgagttagaaatttagaatataattctctatttaggaatttagaagattgttagaagagcaaaagtcaaaattactaagtgagagtatttactcgactcagccaaccaataataatccgacacgtcatataaaagttccagaaaggtcaaaaaaaatcacacacattaaagtgctttgaatacaaaagcagactccactatccaattaaattacgaaaataccacttcggttaactccactcttttcatcttcttctctgccgtcgtcgctcggagctcgcgaagctctctcatcagaaatcaaaaaccctaaaaaaagtcctttctgattcatctatacagacacatactgtattctcaaaacaatg

SEQ ID NO: 32997 - DNA, 1306 bp, Unknown; identical to SEQ ID NO: 1743
  misc_feature (1)..( 1306): 2750-1469P.txt file - cDNA_ID_3064036; gDNA_ID_1620442; Annot_ID_157194

SEQ ID NO: 32998 - DNA, 3003 bp, Unknown
  misc_feature (1)..( 3003): 2750-1469P.txt file - cDNA_ID_3064040; gDNA_ID_1620443; Annot_ID_157232
aaactatgtttatattttgaagaaattaattaatctgttttcttcacttttacaaaattaggtgagagaggtgaaataagggagttaagtgcttttgctaaggttttataaggaaggattaagttgtcattaaagataaaattaataaatgaaattaatattttacaaaactatatgtttatattttgatgaaatcaataatctatttttttcagttttacaaaattaggtgaagaggggtgaaataaggagttaagtgtttgtgctaaagcctaagattaaattgttgctaaagataaaatttctatggatttttgattcgattaaaagatttttaaagatatcttatacttgttcaccaatttttttcttatattttctaacctaaaacaagaccaatttctaaaatcaatataaatacactctcaccaagcaccaaactatttttacttttatcacaagcaaacaaaacttaccacccgaaatgactgcttcatttgcttacttgagagacattcgtccttacaagacggcttggggagttcatgtcaatttgcttcactcttgacatgagcaaatatacctgacgagacacttgagttggtagttggtatcagagccgtgccaatgagttttaagaacataggcaaaataaaagtttatatttcaaattattttattagaaatatatcataaaaaatatcttttagtgtttatttatttttataataaataaaaacgaattataagtaattgcataattttttagagtacaaatcaaacaagtgtgaattatttagtgaatggtaagaatataacaaaacttggtatataaatgggatattcaataaaaaatgtatttttcaaattttaaacatatactataaagtataaataaaaataaatttgatattatttaacatgccccctctccataagaaaaagaagaagaaatgaaagaagattggaatcaatcagaagagagaaaagtagaggaagaattatatatatgaaagaagactaactctcttccacaacttgacacattagcacatgagagtttgccacctagacttcataaaataagtaatacataattagtaattaattcaacataacaattaaaatagaaaaatataattaatgagaacttgaaccatcactctttctacattttttaattcaatatatcctctttaattttgagatccacttaagtggctaaagtgatgataaaatccaaagatttacacatattcctggcctaaaaattagacgattattatgaaagaaactaaatgaatatgcagattaaatatatctaagcttttcaagatttatgctaagaaaacaagtaatttgaaagatatttgaggagctatctttataactaatacgtaagatataagattatgacaagaatttaactaaactttccaagaacatcaagttgaatatgcttagattaaatatgcagagacatgattaataaagacatgttatatttttagtgtaagaaataaattttctaaaatttcaccgtctcacaatctatacatataattaaaaaagcaaggatatataaattcaaaaaaaaaactaaaaatctaaaacaacaataaaaaacaactcaagcacattcttttttcagatgaactaatatagttgggcttttcaaaaacaattacaaatcatatttatgtttcaaaacctatgcatttaactttactttatatgaacatgcattatataaaacaatttataaatagtaatacgtaaacccgcacgtagtgcgggtactcatctagttattattaatacagtttttgttcaatccgattcaaaccgatttaacccaatttcaatggcgtcaataaaaacatactcacgacgcactctagagctatagagagagagaaagagaaagagagaaattttggtagagagataggaagacaaggcttttcgggtgtgcaaaaagaagaagatttgtctgtatttatatatttatactctttgtaagaattattacataattggttattttcttttttctctttttcaatattaaaaagctttttatttttgcgtatgtaagagaaaatccgtacagtataaatacaaacacaaaatgcacaaaatttatgaagaaattaacttgattttgatatgagttatgtaaaaatttggaaatttgaatatcgtaggcgaatgtttcattttctttcaagtaggcacggttctgcatagtatttagtaaccataaggtttgtaataaaattagagaaaataagaaaaatcataacagaagatgctcgagaggtattgaaaatatatatggtgttgagtatgtgataacaatttacaaatgtcttgtgtattacaaaagtctatgacctctcaattacctataattttttgttcacgatatatgatcaagtaaatatccctaaagagcaaattcttgctgcttaaacaacataaaaaccataaaaaccgttgatgtgtgacttctaattgtacttagttatcttgtaccatcaacttttttgtaatacttttgtcaccaatcgcagtttctaattgcacataggtaaagtcttatgctggattttaaaaaatttaaaactctagggaccaagcttttaaagactcgaaaaaatcccaaaagctttctttctctcccgagcacctgaaaaatcaaaaccgcatcggcgcgtgaacaacactctcctcaggaaatgctaaaacgacagcgaatcttccctcgccaccaataaatttctgccacgtaaccgtcgtttccctcgattttcttcccctttccataaacccctctaaaaacccttcttttagggtttcaatctcatccatctacaacctctagctcttcgatttcacgtcactcttcactcaataaaaaagctactgcttcaaagctggctacttcttcaatttactctcattcgtttgcgttgatgtagcaaaacaaaaaccaaaatg

SEQ ID NO: 32999 - DNA, 3003 bp, Unknown
  misc_feature (1)..( 3003): 2750-1469P.txt file - cDNA_ID_3064070; gDNA_ID_1620444; Annot_ID_157254
catattgataaaccaaaaaaaatgatcaagaagaaaaataaattatattcatagagaaatggtttcttcatatcgattcttgtaaatatagcaatcaactaaaaaactaacttcaatataaactcttgtagaacaccaaacaagtcttatccaatcttttccttagaaactgatctcacgtctctcggcgaagaactttccggtgatagcttgatcaggaagcaatgcaagccagactccagtgtcagctccatcttctgctgaaacgttccctgcatagcctgtcattgcggttttcacccaaccgggacaaaaacagtttgcatatatcttctctccctctggtctctcggatagttctttagctagtactcttgtgtatgcgttcaccgccattttggagacagagtagtctgtgaaggaatgtggccaacctccagattcccatgttccttcttccacttgtttcaaaaactctgatactgttttgtcaacgatttcttcagttagagagtccacatccataagcttggctctcacgtcttcattctcaagtttctgttgaagagaactaggtcaaaattcgttgctgccataatttttaaggaagatgaatcgagttagagagatatatagatatatgtacactgtgtcggccttttaatctaccgagccttgaagtgacattgacaatacgagctccttgacaagcatgtctcattagtggaatcatggcgttgattatgttcttggtgccatagtagttggtagatataaccatatgcgagaattcaacagagttatctgatccaacattgtagtttactcctgcattattaatctgcatgacaaaaatatttcacatcataactcatcaagagaaaagcctttagtatcaaagtctttcaaatgaaaagctcatttggttatgtgaattaatgaacaaaaggaaccaaacttactaaaacatcaataaatccatatttttctttaatccattcgcaaaactcttggattgaggaagagtccaagatatcgaggcggtggaaatcaacattgaatccaccttcttgaaggatcttggcggcttcgacgcctacattctcgtctcttgatgttagaataactgttagtccatgtccagccaattgtctcaccatctcaaatcctattcctctattcgcacctgttaccaccgccacggtttcagaggtccaccacctaaacaatcccccattcaagaaataaaaaccaatatgacacttagttatcagcaagacaacaaaaaaaaaagatcgaatgaatctcatatataagaaaccaaaaacttatttaaacgtccaacaaaattgttttcagtttgagatatcgatggaacacagaatttcataattgcatctcgtggacgataagcttgtaccaagtaaactagtttatatgttttgactagacctaaatgtaattcttcctactgagtaagggatatatacaaacatttattataatcaaaatttcatagatatgaagacataaaaatttagaatgggaatattgatacctctggtgatcagaatagggaatagtacgaaggagggagatctcttggagtctcttatctcgtttctctttcgatttttctttgcttcctaccatctttcttcttattttctctcttctacgatcctaagtatgtttattttcacgataagaggaggcaagaaagaacacagagcttcgtcgtcgttctcatctccctctcacataattttctcatcctttttgtgggtcaaaaggtgcaatcccccactttctgcgtaatttttttgtggcctctcatttcaaattcatctgattcctatttttagttatagcatctgttatgggaacataaattagctggggcctagctagggtgtgggctctcaatacgaaccaaagttttgttcattctgttttagttcctattaataattcgaccatttcttaacaaaaaaaaataataattcgaccatttggttttgtggcggtttaaaattgagaaaacaatcttatttaagagtctctcgtgttacacactctcactacgaatctatgatccacatgaccacatgcatgtcacgttgcatcctctcacattttgataaaatttatttgggacattttcggtatatagctcaaggctcacaatctctcatataacagctaagataacgttcttattctggtttagatatatataatgaagaaattaattagtttcaatgtgtcatatccacaattattctaatttttcttatttattatatatttaattctaatatctttttttgccaaacactattaattccatatactaattatttttatcaactaaactttttttaattgtggtatatttatttttggtatattattttttataggtaaaattatgttatatttattatttttatcaaaagtaaataaatatattttgaatagataagataagatattttttctttcacatatttttgggattaatattagattaaaatatagttaaaatcgagtaagtttggttaaattctggataaatagaaaatattgtctatttactgatcgattcaattagaaacatagttttaagaataaatccaaaaatacatataattttattagttgcaattagtcaaccctaaaaacaattgacaaaaaacaattaaactaaatatcctactacagtttttaactctggcataatattgaatcaacaatcaaatcatctaaaagaatatgtagttctctattcctcaagattttatgtctactttcggctcgtcatatcaatttgtactgttgtacatatctaagccaaaaagaataaaaattagttataatcatatgtgatcaagagaaggccacgacaagtataggcccattaatgggtccataagtacccactttcattacagaacaacactttcctgccgaaaagagagagagaaaacaaaacaaaaaatg

SEQ ID NO: 33000 - DNA, 3000 bp, Unknown
  misc_feature (1)..( 3000): 2750-1469P.txt file - cDNA_ID_3064072; gDNA_ID_1620444; Annot_ID_157252
tttacttttgataaaaataataaatataacataattttacctataaaaaataatataccaaaaataaatataccacaattaaaaaaagtttagttgataaaaataattagtatatggaattaatagtgtttggcaaaaaaagatattagaattaaatatataataaataagaaaaattagaataattgtggatatgacacattgaaactaattaatttcttcattatatatatctaaaccagaataagaacgttatcttagctgttatatgagagattgtgagccttgagctatataccgaaaatgtcccaaataaattttatcaaaatgtgagaggatgcaacgtgacatgcatgtggtcatgtggatcatagattcgtagtgagagtgtgtaacacgagagactcttaaataagattgttttctcaattttaaaccgccacaaaaccaaatggtcgaattattatttttttttgttaagaaatggtcgaattattaataggaactaaaacagaatgaacaaaactttggttcgtattgagagcccacaccctagctaggccccagctaatttatgttcccataacagatgctataactaaaaataggaatcagatgaatttgaaatgagaggccacaaaaaaattacgcagaaagtgggggattgcaccttttgacccacaaaaaggatgagaaaattatgtgagagggagatgagaacgacgacgaagctctgtgttctttcttgcctcctcttatcgtgaaaataaacatacttaggatcgtagaagagagaaaataagaagaaagatggtaggaagcaaagaaaaatcgaaagagaaacgagataagagactccaagagatctccctccttcgtactattccctattctgatcaccagaggtatcaatattcccattctaaatttttatgtcttcatatctatgaaattttgattataataaatgtttgtatatatcccttactcagtaggaagaattacatttaggtctagtcaaaacatataaactagtttacttggtacaagcttatcgtccacgagatgcaattatgaaattctgtgttccatcgatatctcaaactgaaaacaattttgttggacgtttaaataagtttttggtttcttatatatgagattcattcgatcttttttttttgttgtcttgctgataactaagtgtcatattggtttttatttcttgaatgggggattgtttaggtggtggacctctgaaaccgtggcggtggtaacaggtgcgaatagaggaataggatttgagatggtgagacaattggctggacatggactaacagttattctaacatcaagagacgagaatgtaggcgtcgaagccgccaagatccttcaagaaggtggattcaatgttgatttccaccgcctcgatatcttggactcttcctcaatccaagagttttgcgaatggattaaagaaaaatatggatttattgatgttttagtaagtttggttccttttgttcattaattcacataaccaaatgagcttttcatttgaaagactttgatactaaaggcttttctcttgatgagttatgatgtgaaatatttttgtcatgcagattaataatgcaggagtaaactacaatgttggatcagataactctgttgaattctcgcatatggttatatctaccaactactatggcaccaagaacataatcaacgccatgattccactaatgagacatgcttgtcaaggagctcgtattgtcaatgtcacttcaaggctcggtagattaaaaggccgacacagtgtacatatatctatatatctctctaactcgattcatcttccttaaaaattatggcagcaacgaattttgacctagttctcttcaacagaaacttgagaatgaagacgtgagagccaagcttatggatgtggactctctaactgaagaaatcgttgacaaaacagtatcagagtttttgaaacaagtggaagaaggaacatgggaatctggaggttggccacattccttcacagactactctgtctccaaaatggcggtgaacgcatacacaagagtactagctaaagaactatccgagagaccagagggagagaagatatatgcaaactgtttttgtcccggttgggtgaaaaccgcaatgacaggctatgcagggaacgtttcagcagaagatggagctgacactggagtctggcttgcattgcttcctgatcaagctatcaccggaaagttcttcgccgagagacgtgagatcagtttctaaggaaaagattggataagacttgtttggtgttctacaagagtttatattgaagttagttttttagttgattgctatatttacaagaatcgatatgaagaaaccatttctctatgaatataatttatttttcttcttgatcattttttttggtttatcaatatgttcgtagtgatataattgtcattaacttttttttcttttaactgagaaaatatatctcaaaaaatttctcatttatattttatctagacatttaatatccaaaattctttggttggaaaaaaaattatacagttaaattgcgcaatttaattccaaacaaaatacaaaaaaattgttatttttgtactcacaatctcataacaaaaataaattcaaatttactcaaatcatctcaatttataattatttctaaataatttttattaatatttcgtttttattaccaattgttttaagaaatttaaataaaaattagaagaataacaattttcattttcaatccactaaaagaattaaaaaacgattacacgtggcaaacaatctcaccactggttcggcgaggcgaaaacgtcgatcgtcacaaccttactcctcctcctcttcctctttctctaatcggcaaaattttctgctcctgagaaacaagtagagatactaaagatggaatctttgaactaaattcgaaaccttttaatg

SEQ ID NO: 33001 - DNA, 3003 bp, Unknown
  misc_feature (1)..( 3003): 2750-1469P.txt file - cDNA_ID_3064076; gDNA_ID_1620444; Annot_ID_157247
tcttttcacaaggacgtcacacatatggagctctttaaaaaatcaccgttggaagtggtcttatctaaggataaagattccaaaaagatgtctagtacactgagaaaggagaaagaaaatatacatcataacatggctctatagaagtatagttacatgtgtctatctgtcatctatatttgtttttctatttgaattattgtgtagtgaaataactatggttttgctaattgtggtcgacgttgtatttgtgcatgctaagacgaaaacataattattcgctcttttgaaacagcattactgtgtttcgggttacgcacatgcatgtgttgttgccctttgatttgtactatcatcgcttagccgcttacgatgatagcttatgctttatattttagtaaatatttcataaaaaataggttttcttttcctatgaattgtaatgttatcctgttaacgtttgtgaatatttctcaaattaaaattgtcacgtcttcgtatcggctttttactttatgttcatgttggtgtagacgttggccttctgacggttcatgaaattgttaagcatgtaatgtgactttttaaattgctttcagaaagaaaaataaaaattaaagacttgaagcatgctatatttcacgctataataattgaggtcccgatagtcatgtgaggtctatcctaatacccttatagtagaaagagccttttttaaaaagttttcaaaaaatattataatctgatttgggcaatactttgcattacatatggatgaactaataagagagaaggtttttaattagtagacttttgtcacttcaattctaatcatgaaaaaacttacaacatattttcattctttaatatagtttacaatctaggattggttagaaagaaacaactgagagaagtcaccaccggatgcttttggctagtggtttatcatgttgttctcgtagttgaaaccttggtgagagctagggatgcacattacgtcatatcataaagtattagcaaaggctataataccgagccatgggaggaacactgcctcggccgggccctctcctagttaacaagaaaagaaaaaaacctaaggaaatctgagttgggtcttaatttcctaggttgtcaagtagaatctgacaaatgtacaaaacagagggtacgtgatcgtttaggataagggaagacaaagtaaatggactgaatacacctgaaaatgttagacaattaaatattgaatagacttgaaaattacaagtcgttacaaaggcttcacaaatttgcgatgtatcaatctttttatttattttaataattggaataaaggaaaactattgaatggaagataaatagttcatacagctatatgattatgatcattatgatggcaggacacggaaggcaaaagagatacaatcagtttcacaacaataaatcacgtgtaaaattttatagattctgaaagggacaaagggttacgtaacccatcttctttaaggtggcaagtagcatcaaattcattggttggcaagcattttgtttatgcacgtgtggataaggttttaaatgataacattgacgtggcctattatggttggttaatatctaatgttatgtggaagaagaatttactcaaaatgaatcttgtcctagttattgcagaggtatagaaacaactaccgaatgtgtttaatgatggtctccaggtaatgaatcttccgccttggaacgatttcctgtcaatatgaattttgaaaggacttcaaattacgaatctttggagcagttgcaatagcatgatagagacagtcctgtgagcttggataaccaaagttgagctggacagtctcttaactgctcccaagagagattagtgtttgaagattcaaagaaactctccttaggtcaagaaagattagtgttagaagatttacgtggtggcaatagttactgtttaaggtgttgaaattacgtttttatatatataaaaagcaaattaccccgcgtattgggatattgagggcatatatttaattaatctgtttcataagaaaactaaagacacattttaaaaaaaaattaaagaaccatcataagaaaatataattaaggaaacaccataagtggaaatgacttgtgaggttttgtagagagactgagtagactttagaactgtagttgttacaagaagttgtttccaaccaacaaaggtgtttttgggtttgtgtatacttgtgttaaagtttttcgttcttttttgatcaaaaaaagacttgtgttgagggtttttttttttttttttgataagtttaacgttgtaatgttgcttaaaaaattatactagtaaactttggagttggggtgcactaaagttctgttatatctgaaagtatctctgcatgggttttacatacatctatatagaattgccatgattgtttttgtagtgatatttatattagctaggcctatattttctttcttgttcctatagatgcaatacgtaaatattatagaaatgtttttagaacaagtagtaagacatttcaatcagttcacacaaaatgattgaatgaaaaaataataatataaacagctatctgattgtgattgcaagatattgggggcagacaattaagagagtacaatcagttccacaacaataaatcacatgcaaacaagcttttatagatttttatagacccacacttcttctcaggtggctctacacattcatacgtgtagataagagtttgaataataagttgaagtggttaattctgattggttgatatttaaatctcgaagaataattttattacttaaaaaaaaaaaaatgaaacttgtctcttcagtttcatcactagcctcgtgctccaccattagacaaagacattttagaactccgaaaatgtcaataaaatggatgatgattatgagaaaaacttacacgtttaataggcccgaagttgctatctagcagttgtagccatg

SEQ ID NO: 33002 - DNA, 3000 bp, Unknown; identical to SEQ ID NO: 1752
  misc_feature (1)..( 3000): 2750-1469P.txt file - cDNA_ID_3064087; gDNA_ID_1620444; Annot_ID_157242

SEQ ID NO: 33003 - DNA, 3000 bp, Unknown; identical to SEQ ID NO: 1762
  misc_feature (1)..( 3000): 2750-1469P.txt file - cDNA_ID_3064113; gDNA_ID_1620445; Annot_ID_157293

SEQ ID NO: 33004 - DNA, 3000 bp, Unknown
  misc_feature (1)..( 3000): 2750-1469P.txt file - cDNA_ID_3064131; gDNA_ID_1620445; Annot_ID_157284
atggcagatcagtcgacgttcatgccatctcattttcctcaaacatacagttccatgtctctctcagatcctcccgaagagatgtggtaaattggtaccatagccacaaatcacgttatgtcataactaggtaccctacaatttgttttctattcgaacactactttttaattacttgcttgtaatggatcatctactcatactactcatttcagtcatggtattcttccccctcttttaaataaccttttttttttttcggtcatttttttttttttttggttttccgatttgtaagtaacaataattataccattgagtttgactcatttgttttcatattaaggatagtaacactaggacccgactatgtagctaaaagatgtaagcatcttcaaaaaaaaaaaaaaaaaaaaaagaacactaaaaccaaacttcaccacttcttttcataattcttctagagtggtaaaagtatttccggatacgaaaacaataaggttttggatttgttgtatgttaagggaccgagtcgaatgacaatatagaacaacctcactatcaacgatccaatgtagcctccaataaccatattcccggaaacacgatgtcataactcagattgactaaaggtgtatccgtgtatgcacgctttgaacagaagagccctaagtaactttcccattctttctgcaatgctatgtcctcatggggcgtttggagaaccggcaacaataaaccagcttttgttcgcttgcgaaaatgctaaaagcttgcttgagaatgtctgtcttctgtagggatccatccaatgaaatttttgtttctaacatcccaatttggagcattgtggggaaaatgatgttcagactcagttgaatgaactaaggcgtacaaccccatatgatgccggaagctcaggctgctacagttagatgcagaatgtaatctttcactctcaacgccgtctgcaacgtcttgatttggttccattgtaacaaaacttgtactcaactcacaactaaaacacccgtttatgttcttcaaccacaggacaatcagagtcgtatccagatatcaaattattgtccaactcttcttcttcgtctgaccaaaccggataacttgtcttgatattgttcttctccaaatcagcctcaacagatttttgatacagtccccgacttctatccagaaacccttcattcatcatgtttgcgaacttttccctgacttcaacaagagggtgcttttcgatgagatgccgcctatcatatgcttctctaaggatcactgtctgtgtatcacatttcatagaaatgtagaaaataccagggtgacgctcaaatactttggtgaacttctgcggaagtgcaaacggtttacgaagattgctaacgtttttcctctctgtcttttttccaattgttagatgaagaagttcgtgaaacactccaacatttctcttctctgataaatcagttcttggatccaaatgagatgcatcgacataaggtgatgtataaggaagtctttgccattcttggagccactcaatactcttcctcttcaatccaaaccctctcgtaaatttaaccgggaaagccatacgttcatcatttccaacgtcctctctcagttgcatttgcgaaacagcgaggtgttcatcccaatgtattaattttaaaccgtcaagatcactagacaacttcaccaaactgaacaaatccggatgcttagtaatcaacgaatctcgataatcatacggcaaacccaagtcccatctaagatgatcaatagaatgtagcgaaagtgttctttcacaagtaagcataagaagtttacacaacctcacaagaacatccctttcattcacccgtgaaacatcaacttcttcataataaagatcaatcgtctcacgagttaaaccaaagcaaggaacactagtacctgcactatcccaataacaatgctcaacaaaaatgttgggatacctccgaataaaagctgaaagcttaagctcttgaggcaaaccaagctgaccacggtgaggcaaaagcttaaagataggtagtctcaaatcaggagaagccgaaataacagaaacgagattacaaactgctctaagatgcttttcacgaaccacaacagcatcaagttctctatctttaacccatttcaactttacattaactaaaccacatctctgctgataaaaaaaatcaaacctttctctgcatttacacaaactagtagacaaactaacccttctctgtagcaaccagtgcattgtagcgaaaccctaataacaatagcctgcgtacaatagctagaaaacttaaagtttcgaaatttacagctaaattgctcaaagttctcatcattaatgttaaaattggagactttgtgaggtttttatggaaacaacgacaaaaggacgatgaacagttgaaattagatgattgagaagtataatttgtagaagttacctgaattcacaagtttccggtcatttctcgatcagaccaacacagtcgtaagcaacgacggcgaagttacagaggcgacggtaactatagttctgatgggtgggtcgggtcgggtcaattgggcgagttaaaaggaaagtgactgttgattggtaccggtcaatcgtgtggaatgacggcgagttacagagacgatggcaactatactgtagttctgtcttgcttttaatgggccattgggcccatttaagggttataagtcgatggtccgggtcgggtagatttgggtcggatatgatgggtggggttgagtaagaaaaggtcaaacccggtattgtgtggcgaacaacagaaattgcatcttctacacagttctgaagcaacaaaacagggttttggctagggttttaactttggctgctctgtctcaatccctcgagacttaaacccacttagtacaatctccatataatttgagtagaacctaaaagatcgaagcttgaggaaaatg

SEQ ID NO: 33005 - DNA, 3000 bp, Unknown; identical to SEQ ID NO: 1764
  misc_feature (1)..( 3000): 2750-1469P.txt file - cDNA_ID_3064138; gDNA_ID_1620445; Annot_ID_157280

SEQ ID NO: 33006 - DNA, 3003 bp, Unknown
  misc_feature (1)..( 3003): 2750-1469P.txt file - cDNA_ID_3064164; gDNA_ID_1620446; Annot_ID_157311
atgttattgtcaaatttcaaagtctactcccattttggttattatggcgaatcttgaaatgcagaaatgatctagtatttaatcgcaaaatgatcgaagtaacggaagctgtagaacaagccgttattgacacaagagaatggattgaaaacattgctacttcggaacaaggtcataacgacattcaccatcaccgatctcctagagtgaaatgaaaaacaccacaaagaggctgggtaaaatgtaactatgattcatctcaccataaaggaaccagtgggtctggattagggtggataatccgcaactcacatgggactttcatggaatgcggtatgagtaaattccaaggtagggcaccggttgaagaatcggaatgtacggctctgatatgggcactccaatcatcatggaacctaggttacataaagatcgagtttgatggggacaacctctctatcatccggctaatcaacggcaaagctgtaaatcctcgacttcgacattacctttgatgaaatcagtcattggcattgcatgttcacggaggtgaagttcactttccatcatagagagcagaacaaatgtgcggatatactagcaagacaagctctcactggtccaattcactacacataatagttgttgattcttctaattcgaatacatttttatccaaacaaaattattaatcggaaaactaatcttcttctttttcgttttaataactttagatttatattgtaaatacactagtgtcgcactttaagtgttcactaagatgaacaaacgattacatatataactaaactccaactttgtagttgtatatattttttgtatatatgttaaagtgtcaaacgaaaaaaactccaacttagtagttgcgtatatatgtgaaaattgataaaataattgcatgcaaaatgtaggatcaaataatttgatttgactacgatggccaaacacgttagatagttgggcagtcgctacaactaagcagccacacttattttacttccatttatcatcaataatttgtattatagttatttttgtttaatatccaagagagattcataactctttgtttgactttgattaaactatagggtagttagccactccacattggcttctaaactatatttgtcagcctttaaaattaggttaggtggccaaacgaaaactttttaattatttttcttttattgtgagacatactaagttagaagaagaaaaaaatcagttacttttcaaaaaggtaaatattggcttaaaaagccaaactatctacgtttatattttttactcaggatttgattgtatgttgataaatattttttttctttttctttgttaaacaatttcttgttggtacatttaatattttccaaaattattacgtctacgaagaaacctttttttttttgtaaaataaatctatacgtacggaagctttagaacgctagtatatatactttatagtaacgtaaataatttgttcaagtgagatatatttttacaccaaacaaccactatatttacaaaacattatattatctttcttttattgcttgttaccttttataattatttttagttcaaaataagtagattcataaattatttgcacatttataaaattaaatcctaatagtgtccatttttagagtcattttaactatttccaaatttatggatatgttctatatagtctccattgtataagccataatgaaggttcttaaaatttatgcatatataaggagataaatataacaaccttataaaaaggagattcttaataagagataaatactaaaaattatttccatgatctaaaaaaataactatattctgaataccaaaaatatattaaagaagaaaaaaaaaacgcttatagagagaaagagagtgcgcgaccaggtcgtagtcgtgctctcgttttgcaattcacgtttcctctctgagtttcttcgtcttcttcctctcgtctctctttctctgattctctcgtacgttattcctcttcacgagtttctctcatacttcgttattaacatcgcccgttttataccccaaaccttcttttaacgccttcctctgtttctctcgtcttctcacaattctcaggtgcacaaatctctctctctctctttctccatgtgttgtttctaatctgatcatgatcatcatattcatattcatcatcatcatcaccaatcttctacataggtttttaactctgtttttactgattaggaccattttgtgatttttcctatttttataaaattgaatcgaaatcggaatcggaatttggatcaaaatgttttcttgaaactgatcggcgttttagtcaattttgatgactattgttacattttcaagactctttctgccactttttgttttactctgttctgttctttttcctaatgcaactttttttgactaaagtattttgttataatcttttcattatttttatataatatatttataatttatcagttgaatgtaaaagtaactccctatattctcacttttacataaatggtttcataaaattcaactttttctaactgattaaggtcccacttgcaacatatattattatctctctgttttctccatgcatataaaaatgtatgcagaatttggtagctttgaccttttatatttctgttagcaataattttatttttttggtaaattcttcctttgttttgcagcaatctccagcaacatgatcttcattgttgctagatactgatttttttttgtgggattttctatgttgctttggtctcaagtctatgtttcaattctaagaccagaacaaatttgaggtttttttcaatgctaaattcgtctggagtaagaactcaacgaagaagcccaagacctttgtctctaggaggtagaaagattattactccaacaaaatttgcttatgatcatcataatcctgataaagttttggattttgtagaaatg

SEQ ID NO: 33007 - DNA, 3003 bp, Unknown
  misc_feature (1)..( 3003): 2750-1469P.txt file - cDNA_ID_3064174; gDNA_ID_1620447; Annot_ID_157341
taccaaacacaatgttagaacatatatctccgctctttgcttccaccggtgtaaccatttccactattatcagttttccattttcttcgagacttttccaacagtttttaagaattgctacgcattgttcgtccgtccaatcatgtagtatccactgttatgatacgaggttatgatgatttaatatatagctttgatattccattttattttatttattggttgagataaatatagaacttaccttcatgaaaatggcatccccctttggaatcttgatgaacatatcaccagccacatggttcacacctgaaaccagtagtaaaattaaaaccgtcgtaagtttaatgaaacgtatggatgtcatgttttactattagcaccatcattatccataaagtatgaaaaagatcattacattcacaaaataaaaaataaaaaaaaatacttcaatcatataatgaaatgaaactattagttttgataaccgtctattggcttttataaaaaattgctgattttctatttttaaaatacatattgtattattgtgttaataatttaatataataatttaacattacattcaaaaaaaaaaaaaaattatcgcatggttcataccgggataagaatgagcattggctaacaccggagctaaatcgaaattgataccaataagatgaggatacttggaagtgatgagacctagtgtgttgccaagtcctccccctacatccaccaaagtcttcacatctttgaatccttcataaaatttaagaaccttctccgtaaccatggtggaagattccaacatagcccggttaaacactttaccaaatcgctcatcggcttggatgtattcgaatagtttcatcccatgggcagaactaaatgcatctcttccttctaatatcacatcttcgagatgtgtcctatgaaacaaaaaaaatcattaaatggtcacttcgtgtacaaacgtaaacattaaggtttaattagtgagatggttaatgataactaatagagtgtgtatatagatagtccggtttagccggttaacttactatgtaattggtttattcggtttagagtagagtatataaacttcatacatgtacattctgttatttgagaaagatagaaaacgattcacaaatctctttgattcatgttctctatcatggtatcagagcattttttgcgtttttccagttgatttcatcttcaatcttcaattcttgctcagtttcttcgattattcactcctcttggtgtcgattgttcttccgcgcattcgattttggtgaaaatggtgaagaaaggtgggaaaatgaagaatctcaatgttactcctgacgatggtggttctgttgctagatctactcgaaactcgatgatcgctgaagatcttgaagttgcgagagctcaacaacaactcaatcgaagattcgaagcttctgaggtccgtggatcgatgttgaagaacactgattcgttcgacaatccattggttctccattcatcggatcatccaggtttaacaattgtatctcatattcttgatggaactaattacaacagttggtcgattgcgatgaagattagcttagatgcaaagaacaagctaggtttagttgatggatcgttattgagaccttctgaggatgatttgagtttccgcatatggagtagatgcaatagtatggtgaaatcgtggattcttaaaccaacaaggattctttgattcatgttctctatcaataaccggtttaatgtatttgaagagttaactacagtattgtttttgtgttatatgcaaataagtaccatgtcttgataaatacgtcgctgaggtcaagcataaagagcgatgcaaaagaacccgagacgtcgtcacttttgttcaagagatatttgcagaccggttcagctgcatataccctctcaacttttccggtttgaccgttctcttctattacagtacggcattttaagaccgaatggctgacgagaaatcgaagcatacggtctagcaaagccggagcttccaggttgcatggtttggttgggagtcttagtgctatttcagaaggtgagagccacaaatcgccacctcctactgtggtgatggtgtcgatcacgccgagctccaaggcggctttgagaaccataggtgatgcggctgcattcgcgagccttctcgctagcaatcttgcctcttcttcaacctcttgttcttctttaactcgatccggtttggttaaggggacttggagatggtttgccattgttcttgtttgaaaaaataatattagaggagtgatgctaaatatgaggataggtttcaactttcatactttgtgccattttatagagtcatatctcaatatagtgttacatagatttgattagctgaccccaagatttgatatacatccaacattaggtctttcttttctcttcaacacactatgtctactgttttttttatttgttatggtggccatgcaagaacatgttcgttcaattagccagtttcattaaagttatatttaggtaaacatattagcaaaacatcaattgtagagactaggtgaacaaaatcgaccgcaccctaatcgttagaaaacatcaaaactaagtattcttacataatatagtagatgtcgattcaaagaaaatcattttcctaaaagcaaaaagaattacaagaagtgaagatgctaatattagcacatttggaactagtctacaacggaatttgcttgtctcgtggtcaaaacctccctattcaaccggagagtactaatctaacaacgtcacgtttcaaatactaaactgacacccaatcacaaaattccacgtgtacgtaactacaaggttccccacaagtatataaacatctacccataatgctctttcatcacacaactcataattacaaaagctaaacagttctctaaaatcaaagtaacttttttccgaagagaagattagaaaatg

SEQ ID NO: 33008 - DNA, 3000 bp, Unknown
  misc_feature (1)..( 3000): 2750-1469P.txt file - cDNA_ID_3064185; gDNA_ID_1620447; Annot_ID_157340
tctagaaagaaaaagcaaaaactaccttccaattaccaatttatgtacgatcaatttcagagtataaaataatggaaactgtaattttctaatttctatatatataaacacatttatactagtaatggaaactgaaatgaagtcattttcactaagaaatttaaatatatgtttttttagggatgagaagaaatgactattaatctctctttatataaaattgatattatctacaacaacccacacttctgccacaactaaataccaattatggtgacattggtgagaatgtagcaacggttgtggtggtgatggtggtggtgacataacactggtggtggtgacataacactggtgtaattttttttttgtctttaactcaaaacatattcactattctttgaatttagaatatgatacggttgcgacactaatacaaatatgtaagttacataatcccattttctagtagtacattatgttgcattaagatttcaagtttttgtattatgtccaaggttagtttgtagtatctatcatattaaggggtattttgcattttcttgtatctatccttcttgaattattttgtacttctaaagatttcaacttataggcacccacttgttttcttacctaaaaaggaatattaatatcaatatcggttagttatagcgtgtatgaataagcataaagaaatttttgacaagacgttgtactcaatgatttatatttcaatttgtatgagagtaatatgtatagcataaaggtcaaattttgaaaagatgttgtactaaaagtttttattaatatcaagctaccaatagaaaatgcagtacaaatattctctaacataattaaaaataaaaatattgaacttatatatcttagtgcgaataggttctcctttattgagagtttactactaacaacaacatttacacaaatcagtgtgagcacatgaggaaacaagattaaaatggagatagtatccaattctgttttttttgttctttaaattattttagtattaatggaaaaacaacaaaaactaagaagccaaaaaaagaaaaaaagaatacgataaaggtaaaaattgtggggactcgaattccaattggtgtaaaaatgtcgtccctccatgagggatcaaattctttcaaacttcaaatcattagtgtcttctagaacccaagtggttaaagattccctcttattgcataaacatgcaaagcgagcatattatatgtcgatcttattatataaaaaaaacttaatggcaactaattcttcacgaaataaaactacttataagacctattatcggtaaatagtaatatacatatcacaatgatcaaaagtgcatgcaccagatgatattcgtatcgtactcgacatttacatgcatatatatatacacacatacatgagtatgaaaaacggaataataaaacaaaacaatcagttgcttcacaacaatgtgtgttctttttttcctctgaaatgataggttccaccattttcactatttaacatgtcactaatcgaaactataatccaacttgtctagtcatggtaacaaagagaataaatttagccgcaatcattgcttatataaaataaaaaatttaagctatagtttcatgtaatcatgtcatttatttaaatattatagaaataactgcatggctacaaattatcaatagacaagagtcaaaaactcttagatatatagatatatagaaaaaaaacatagaaaagcaaaagtaattgcctaaatggcttcgatcgaaatccatattcttggatttagatagacatatctatctaattatttttctggtagaataaaaacgaaaactgaaaacataaattattattagaacgtgcttctcatttgctgatgccggtcttttccttaatggtctcactcgcaccttgtgccttctgcttcagctgctgtccaccctatattttgtttttccaaattattaaattttctgaattctcaaattatttcacaaaaatatactattaaagaataagaaaagaaaataaacctcttggatagattccttagcagattgggcagcattggaggccttgtctatcaagttgcttgccttctcctataacaaattttagttaccttctaatgaatactccattaactcaaaaataacaatggatattaaagtttctaaaaaacgatcgtttaacaaaacctgagtttggcctttagcttggccagcgttgaagctcatgctctgactgttgttagacattttctaatcttctcttcggaaaaaagttactttgattttagagaactgtttagcttttgtaattatgagttgtgtgatgaaagagcattatgggtagatgtttatatacttgtggggaaccttgtagttacgtacacgtggaattttgtgattgggtgtcagtttagtatttgaaacgtgacgttgttagattagtactctccggttgaatagggaggttttgaccacgagacaagcaaattccgttgtagactagttccaaatgtgctaatattagcatcttcacttcttgtaattctttttgcttttaggaaaatgattttctttgaatcgacatctactatattatgtaagaatacttagttttgatgttttctaacgattagggtgcggtcgattttgttcacctagtctctacaattgatgttttgctaatatgtttacctaaatataactttaatgaaactggctaattgaacgaacatgttcttgcatggccaccataacaaataaaaaaaacagtagacatagtgtgttgaagagaaaagaaagacctaatgttggatgtatatcaaatcttggggtcagctaatcaaatctatgtaacactatattgagatatgactctataaaatggcacaaagtatgaaagttgaaacctatcctcatatttagcatcactcctctaatattattttttcaaacaagaacaatg

SEQ ID NO: 33009 - DNA, 3003 bp, Unknown
  misc_feature (1)..( 3003): 2750-1469P.txt file - cDNA_ID_3064189; gDNA_ID_1620447; Annot_ID_157339
aaaggaatccaaattatcatcgatttcttttatagcaaagtatcagccagtatctacaaatcgtgtactcgggtttgattagcctttgacacaaccggcactgatgtgaaactgttctaggagattacggaaaaataaagctaagtgtaaaataatatatataaaacagtaaccttttttacggttaacaagactcctatgtcacgcatttaactcttgaacacaatcatattggccaatcaatacacacattattctctatatattccactcacaacagctttatatctttgccatagtcccatcttgttcatatccatatcgaatccgtatcatgccacataaacaataccatgcataaccataaatatgcatttatcaatcaaattaacaacaacaaaatcgtgtaaataaccatatatatgcatgtgcaatcgtctggatacgggcaaggaacattcaaatgttaaaaatcaatgtgttttgagaagggacgagaaagtgttggttatcgcatatatatgcaatagcacacataaactaacattccgatccattttcgatgcgataaccaacactttctcgtcccttctcaaaacgaatatagacattacaaatgcgtaatcttactaggctagccagacataacacagatatatgaacattaattaataattaagtaacgctagttaatatttcttcatgttgaaataaaaagcatgattgtaacatattatagtacgtacatgttttttcatatcacaaaattgatatatgtatgtatgtattattatagtacatgtttattttcttttttcttagaagttagcacacattttctgtaggtataatagactttagtacacattttatgtagtaacagaggttggctagctgagtaatttgagtagaatattctagaacattggtgtaaaagagaaagagtggctgatttagtaatcacaaccattacactaattaatagaccaaagagagcatgaatgagcatgattagagtaaaccgccatagaaattatcttttaattgataggctgaaattgggatagttaagtctatttcttgtttgatttttgtcttccttcagttttattggaaattttatgtacaaaaaaaaaagaaaggaatttgcaaagaaacgaagcttcgagattctttcctaaagacacctctaagtagaaagcgcgtaacttctaaagttagattatttttttaattaaccatagatttgagaaaataaaaataaaacaaagaaaataaaaagaagaaaatatgaattatggcagaaatatgaactttacgcgtacgtctgtcctaataaagggtctgaatattcgtgtgatgaactagctactactatacttttatagatttctccatgtaattttagtaattaaaacctttataaagttgcggtttatttcataagcagcattatagtgagtacaatgataaatgtttttatatatatcacttacaaggtagctcccaagggtcgaattgataaatgtttaaatcccctatagcttctactaggcatgaatttcctagcaacttgtttcttaggtaaaatcctaggagttcctctttcttctctgggacgaaactcatagccgacgatcgacatcattttttttttcttcttcttcttctgaaaataatgaatattctcaaggaagacgaagttctttttttttttgtatgtatgttcggaacatgtggcccagttttttttttttctcaataagtagcattattgtagtctccgttctaaaaatccccgcctagtctgattgtgtttataaggtcgtgatctcatgtgtttatgttttcactttcacattcacgtgttatatatataattttagacgtattgtccaagaaatatatcagatattagcaaaacaaaaataaagaaaaaagtaaatttttttatcaattttgaggaaaacataagcaaaacatgaacaaacatttttgaaaaaatccagtaactaacgaaaatgttgctgaaaaaaaattgacgttcaagttttgaatttatttactctgttattcagataactatgactaaaggctctgctgtacaagtgaatgatttccaaaaacttatagagaaaatttttattcatccctttttattctagcaaataaaaatatgtcatctattaaaaaaattattaataaaaaaaatatgtcacaatccttcctctttttcatgtaactctcactattttcttgaatttgatttcatcggtcgtttaaaaagattcgattttgagtttgtggattttgttacagcggaggatcaaatcgaacgatagtgtatactatagaggaagggaatgatttttcttatactcctaaatgatgatgatcattcttcatccaatttataggtataaactttaagttgataaatatgtaggaaatataaaattgtaagaaaagattaattttaattgtttatgggaaactttggagcatgtcccaaattcctgtttattaatataaataaaatataatatgaatttcgccttatacatctttattcaataatatttttgagatagttctttaaaaaattatcaaatataaaccaaaataaaaattaaaaaaaaaacaaaaaaagaaagtaacgataaaagtaataacacttcaaaaaaagtatagataactataatcatctgacatgtaaacatatagcaaataaaagaattagattaagaactatctaactatgacttgtataaaaagaaacaaataaacatcaacagtaacatatatatttactgatgagttacccgatcttcacctgcaaatgaacaggcctactagtcataactaatgggctttctaaaccacaatattcttacggcccaattaaatttaaattaatattattattcgcagtttcgcgaggcttttgttttttttatcacggcctagtttagttaagctctcgccggtgatttagcggagatg

SEQ ID NO: 33010 - DNA, 3003 bp, Unknown
  misc_feature (1)..( 3003): 2750-1469P.txt file - cDNA_ID_3064244; gDNA_ID_1620448; Annot_ID_157380
atatgaatgagaatttgtttggtaaaactgtttgagttattcttccatcaatttttttaactattgaaaatatttaaataactcatgaaaaaattagaagaatattatggaaatcttcatgttaaaattatataaactaacatgttataaactattctataattttaaaaatcgtaaagatttccaaatttcataagtttgaaatcaatttaatgcataaaccataaaagcccctaaatattttattaaaatgtatttttatacaagagataatttcaaagtcaaaataatttttttttttaaagtattttcgcaaacagccttacgaataatctaaaaggctctggaagtaaatcgtggacacagcttaaaccctaagaaccctttcgttgaataaacaaaaaatcaaacgccttcaaaaatcaaaatctcgatccagatctcatcttccgccacaagctatgaggagagtcaccggacttgccgcgcgcacaatctcatcctccgtcgccatcaattcacgtctcactcaatccatggcgattacaaccatttcatcctccgaacctatctcccgaagattcggtggtcttccagagattaaaactccgtctttcgccggcggagtcgctggggttgtgttcttctctgccgctgctgtatcgtctcttggtcaagaagttcacgctaaggaaatggctcagaagtttaatcctaaagaagttgttctgtatcagtacgaagcttgccctttctgtaacaaggttaaaggtaatcttatcacactaatctaaaaattgctggatctgatcagaatttgatcttctactcatcgattcttgctttagacttaggttgaattcagtaggattgacttgaatgtgatggatttgaatggagaatggttctcattgtctatgattcagtaagagattggtgattgaatgaggtatctattgttgctggtatgatatttgggcgattgtttattttgtttgtagcgtttttggattacaacaagattccatacaaggttgttgaagtgaatcctatcagtaagaaagaaatcaaatggtctgattataagaaggtgcctattcttactgtagatggtgaacaaatggttgattcttcaggtttgtctcatgttctgtttctgacttgtatttttctcttcagatcaaaaatgtgtattagcttagttgagtaatcttttgttttatggtgcagtgataatcgatagcttattccaaaagatgcaccctgaaatttccaagtccgaagatgatgaagagactaaatggcgcaagtacgattgattttaatttattgactactgatattgagttcgagatttgtgtcactacaggaccttaggctgataatgtatctatgtgttgtaggtgggtggacaaccaccttgtgcatcttttgtcaccaaacatatacaggaatacttcagaggctcttgagtcctttgaatatatcaccacacatggtatggttatcgtcgatttagcttcttacttttttccctttctttatactcattttgtttttataacctttggaagatatgtatgggttaacattttaactagatgagttcatgggagtcccagttttgggaacctttatacgtcattacacatctagagaaagcttctggaggaggatagtcttcttgtctaagtcatagtgttgtgctctgtgcagggaatttcagtttcactgaaagattagtggcaaagtatgcaggagcaacggcaatgtactttgtatcaaagaaattgaagaagaaatataacattacagatgaacgtgcggctctttacgatgctgcagagacatgggtcgatgccttgaaagagcgtccataccttggtatgtccaacttctaatctaatactgaatctagtccctgctttctggattggtccatgattgtagtttctaatatcaggtgggtcaaaaccaaacttgggcgatctcgctgtattcggtgttctgaggccaataaggtaccttcgatcgggtaaggatatggtggacaacacacgcataggtgaatggtattctcgaatggagaacacggtcggagaaccttctaggatcaaagaataaaggatcattggtcgtatctcttagtggaaatatgaattgcataatgaatcgctgatttcacgggcgtaacaatattttaagctttaggactagagaaggaaacaaagaaactaaaggaaataaacgtctcttctttgtgaatgaaggattttgaatactgtgagtctgtgacatgcttggtttggtcactgttgctattactaaaaagtcgtttctttggtttctttcacattttaaaagattcattgatcagcttgttctctgttttctattgactgatgtttatatgaaaggacaacaactcaggtggtccgattggtaatcgtatggtcgaacaatgataatatattggtggaatgaataaagttttgcaattcttttcttagaaaaatgagtttgaatggtttatatacatatgtatgacccaatgatagttgtaacgtggattttctttgtggaaagatattatctacatatgtatgatagcaacaattttggcgtctctaattttgaaccaacctatgagaaaattttatagattagtacatcatcgttatgaaattgaatgtcaaacacaagcattaggccaaataatcggcacaattagacggacaggcatgcaattagtgaacatgtggtagtgccaaaactttggcattctattttcgaaaaatctcctcactatataaacatgtttcatcattcaatctcctttgatttttgctcacaataaaataaaataaaaagaaaaaaaaacaaaaaaaaaacaaaaaaagaaaaagaaaaaagaatctataaatatactgttcaattttttttattttttttttattaatatcccaacggtcgtggggaagaaaatattctgattttgtaatg

SEQ ID NO: 33011 - DNA, 3003 bp, Unknown
  misc_feature (1)..( 3003): 2750-1469P.txt file - cDNA_ID_3064247; gDNA_ID_1620448; Annot_ID_157379
tttttacgacggaaacttctatattcgtgaaattgaaatggtgaacaaatatgtgatagattgtggaagctacccgtgtgtgtcgtttggttgttatggtcttgacgcataatactaaattttataatccaataaaaatctctgctctctctctctctctctctcgtgatgcccatttgtttatcttttcaaaagcaggatggaaaggtcgaaacaattcggtggtttactttcaaaaggaattaattcctttcagttgtctttcaaatctcaaatataaaaaggtatacttaagaattattattcaactattcattagataaatttttaaattttactaaccaaatatcatcgcagttagctgaaagtcataaccttctatggaatcattttcttaaataatgataaattcagaaaaggaggagaaatgaaataaaaaggaccatggaataaagaataaaaaaagattggtctaaagagtgttcgagaactactcttttctagagaacatatgcggttatgcacatcattgatcggactttacattacttgtatatattcactactttctcattaatatattatatatatatatataatatgtatatatactaaatgaaaagtttttggaagtgttttgatctttgttgtattacttttaaaaataattgttttaattggtaattcataagaatgtaattaaaagtagaaattctttctaattaatatcataactaaaagttaataattaatgagaagtaaacataaaacatctaatgattttgaaaaattaaaaaattctattaaaaagttgtgatgaaagatattatgttaatacgtgccgtgccaagattttaattaactttatagatgttgtaattcagtaattaactttgaagatatataaacgcatatgtgataagtgcttgtcgatagtggctcgtgggtagcctttaagcatgggccagtgtgcttgtgcctacgagctcgagtgatcgagcacacacattccaaactaaacacaaaacacaaaggaaaaaaagtaaataataaaggcatatatatatgctccattagaaagcaatatatatagaaggcagatagagtttgaaccaaagaaaaaaagagagagagagagagagagagacaacgaggaagatggggtggtttattaaggaaagaagaggaggttcatggaagcgaggatggttagaggaaacactcctaacatcatcagctcctcctcttacactactagctctccttgccatcatatctttactactcttcctctcttcatatccgcgttacaagtacgaggttgagaaaaccgctgctaatctcaagctcttcatgctattcctcccaattctctttgtattcgtcctcgtctctctaagcttcgtccatcgacttctcttcaaatcctcttactccgttagagcaaaccaggctaagtccctttttggagaaggaaactttccgtggggagttttgcttatgctaattcttctacttcttttggtttctaaacaatcttactttcactccttatggtaccccaatttatgagttatgatcttccaatcattcatatatagtcttcaaatgtaatatttagattgatcattgcttcttgtaatccataattccacacatgttaaaagacattttgagaataatgataaaaatttatgtaatatataaatctcgcatatttgttaagaccaaaagtctaaacatacatagctaatttgcgacaaatttacaaatttatatataacacaatttttgttttgtcccaaaattgagagaaagttatgggaacacatatactgtaaacaaatcagtagtggtcagttaatctatataaattcacttaacacacctccattaatctatatatataaatttgtatttcttgaaatttgttttttttaattggtgtgagatatgtatataatatgatattcgcaattgggaggatggattatgcaagatagtaaaggcacaactcaaggctgaagttcgactaaactacgatcttggtatactccgatggaagcagaagatgcagcgttgttgttttcaatgcaaaaaacatggcctaaagggtttatacacgtttgttttaaaggcgattgcaaggtgctaatcaacatcatgaacggatctaccaacaacgacattgctatagaaggcttgtgtaaattaagatatccattattgggcatcgaagttcagagaattaaatttctcctttactagtcattcttctaatcatataagcccatatattagctaagcaaggttgcatagatttcagcttttactcatatagcccatactatactctcactcgaaaaaatatacaacagtaatgacaaaatctgtaaatattttagaaaagaataaaaatggtgtacttatttaaatggggtaagaatctctgtaagtgtgacacattaccatgcaattttgctaataacatatgataataatgttattaagaatatttcaataataataataataagggatatgaatgagaatttgtttggtaaaactgtttgagttattcttccatcaatttttttaactattgaaaatatttaaataactcatgaaaaaattagaagaatattatggaaatcttcatgttaaaattatataaactaacatgttataaactattctataattttaaaaatcgtaaagatttccaaatttcataagtttgaaatcaatttaatgcataaaccataaaagcccctaaatattttattaaaatgtatttttatacaagagataatttcaaagtcaaaataatttttttttttaaagtattttcgcaaacagccttacgaataatctaaaaggctctggaagtaaatcgtggacacagcttaaaccctaagaaccctttcgttgaataaacaaaaaatcaaacgccttcaaaaatcaaaatctcgatccagatctcatcttccgccacaagctatg

SEQ ID NO: 33012 - DNA, 3003 bp, Unknown
  misc_feature (1)..( 3003): 2750-1469P.txt file - cDNA_ID_3064259; gDNA_ID_1620448; Annot_ID_157370
catcatcgatcttttgcaactgtaagacaaggggccttcgagtaacaatgcctacaaatagttaccgcaaatgcatattgtcattactcaaggaaataagcaatttcataattaaaactaagtaagaagtgttaacactgtatttaccagatccacggggtaaaaagtcctttcccacgatgctctccaggactgaagacttccctgagctctgtcaacacaataaggatacaacataaacttaatgccacatagaattatcaaagtacagaaacccctctccacaacaatcgtagcttaaattaaatggttcaagaccaactagtgaaaaaatatccaagtcaaagccaagtcaacattcctcaataccaattgcttgcaaagctagttcatagtagaagctattaaactataattcctcacgatccggatgttgataagcaaaaacaacgaagtttagggcaaatttatccgaatacctcagctcaatatcaattccgaatcgcaaaaaaaacgaacgaatcgtgagatagatcgtcaagcatataatggaaggggaaggagatcgagatgcaaacctgaccaccaacgacggcgatcgcaggcaaggaatcccaaagagtaggtaaagcgctggagtctccatggtctcctaaagccgtgcaagctctctgtatcttgttaaccagagagatcagattttccatcgtcctctactcctcgtttccccaatatcaaatgagaagcccaaaatacagtagctgctacaacagatcggcgagatctgatacctccgccggtaaaatttattgcggaaggagtagatctgcgatgcgacggtgagctatggaaccagagaaatagagatagagagagatgagtttttgaatttgagtcgatgaagaatttttgcttgctagtgttgggaaaaagtaaaggggaagaaagcggtttatataaaagccaatacagggtcttttcttttccaaagaaaatttgaaacggcatggtgtttatttcgagaattcaaagacgacgaggagttgaccaaaaacaaaataaaaacgacgaggtgtgtcgtatatattcaaccaatcccttaatattccacatctctctaaccaggtaaagtaatgataatactattgcatgcatgaccaaccatataaataaatataacaaggtcgattttcttgtaaaagaatgtaacgagttaaaattcgaataaaaaaactatcacttattagtagagtaaagtgatttcatgtggaccacgaacatcctcattacgattgcagttcaaacggtccatagattgaggattcaaaaaaaagataagagacgttaaggattatgattgtttattcaaaaggatgacactaaacaacaaaataactgtagttttgaaaatttgaatgtataaaataaagatcttttctagaacaaacccactaaatctgactagtaatgtcacatcgattttagatagcgtttgcattttggcaaatactatgtttggttggtgagatccaaacgctttttagaaatgtataaaacatagcactaacacatttttaaaccttatgtattgtttacgcaaatacacgttatttattttccagctaagtggtgaaaaaataaaccggttcacatttttttttttaaatgttactaatgttgtgtttgtctacacaatttttttaaaaaatgttactaatgttgtttgagacaaacacaacgtgtaactttgtatcctacatactcttgtatcaattgttagattttatgatgttcatacgttaacaaatatgtatcatgtgaccaacttctatccctcaaattagaattttgaagttagtgaaaacgtgatgtaaaataggtttaacatatgctttatgggaatatgttgagactaatatgaaatacaaatgaggttggagtgagacatgctatgtaatatatttaggtatgtagactgtatgtctccgtagcagctgcatgaatttagcttccaaaagcacatatacttgcacgggtcacacggtttatttgcagtgtaactttttcgaattgcgattcttgaacaaaatctctaagagtactcttctactactttctgatgtttttcgtcatatgtgagtggaagatgttggtttagtgtcgggttgtgtagagaggacaagagttagaccatagacactcaaacagtcaaaccaatctattataaatagataatatctctccggtttagtatttaagctttctttgtataccatttatgtttaatgaaggtttcgcgcttgttgatacaatctgaacgagatctaaagaaaccgtaaaaacatttagaaataatacatctccaaaaaaaagtcattcggaaaaacattttatgatttaaattgatggataatttgttctcaacttatacatccaatttccgaccaattcaaaacgaaattcatcaatactttaatttcttccttttttttttttttttttttttgtcaaccgatataaatttgaactcaaaagatccaatcccgagagatattgtttacatacgtgacatgatgcggtacggtacgaatctttcgtgccaacttatccgcttttacatttgcactacgagaaattaaagataaagagaaatttatgaattcttccctatcactctacaactccttcaaatacactggaaacgccggccattcggttggaatcggtgaattggtgaaatttttgtttctagaaatcaactaatccgtcaaagatggtttattcccttaatgatgaaggaaaatgggttctcttgttgctaataaaataatggtatttattttgtttcttagaaagaaaaaaaagactaatttaatttggttggtcacacacaaccgttttcatcggaagaagaacaagttggattgattttgctttggatctcacatctgagatcagattaatctctctgtgaagtcgaagaacgaaaccctagttcccatg

SEQ ID NO: 33013 - DNA, 3000 bp, Unknown
  misc_feature (1)..( 3000): 2750-1469P.txt file - cDNA_ID_3064264; gDNA_ID_1620448; Annot_ID_157364
ttgtacccatacttcttcatcgacgtgtaaacccctttgttgaaatctccgttaacggcgcttgacggtgagtaaccgttaacgttaacgttgactgagttgaatttccacgtgtcgttgaacggtgagttgaatttgtcgattgggtttaaatcgacggtggattttgaacccacaggtccgaatcctaaacccatgtcgttgtttgaaccagaagacttccagttccagttggaattgatgttgtcggaagttgtcttcttctgataatagtcgatctggttgttgttcttgtcggtggtggcggctatgtctaagtttcgacgctctttgaagacagagtttgtgctccagatcgagtcgttgagagacagattcgctagattcggtgtctgaactctcagctggtcgctgaactgccaaaaagattgctgattgttgttattatactccatctctaactctctgattgatctggaaaaatctgatttttcgatctgggtttatcgaaagttgaaatcttttttgcgatttttggtgagaattggggttggttttaagtggagagaaattggtgaaaaatgggtgagaaatataaagaaagatgaagaaaaagttgtaagcttttaattggagcaactgtgtcatctaagtagaaatttccacgaaagtcacaataccattctattttattttttcaaggttgcgtgtgaatctgacaaagttggatgattaagtgaaaagtaatttattaaataaggaatactaataaatacaagacacaagtacttctgtatttataaaattacacaccaattaattatgtcaaatttaccatttagtacttctgtctgagcttttttttttgtataaaaatttggttaagaagaaaattgcgatttgcgagtgaatgagcatgtagcagcagagacgcggaacaattgcaattatgacgtggcagacttttgagaggagatttatttgtgccgatagtaacaaatatctaattttaaaatattgtttttttcaaaactaattaattttatgttttgaaaatttgggttgatttgtcttagaggctaaggattgtggaccaaacaccaaaaacgcgttgacgagaaagacagtgagtgtgtcagcatcaagttttcgactctgtataacacgtattaaaattccccggaagcttctattgggttacattccccactttaagcccattcaattactgattcaacaggcccatgtacggcccaattagaaaaggcaatcttattcttcaattcttcttcttcctgaagccagtttgacagagaaaaattcatagagaaagagatggatccgcaactaatggaggtttcacagcagttcgagaggtttaaagctgcgtttataataaaagatttcgatacctgttccagtctcttgtctcagcttaaggtactgtttccttttagccctaattcaatgcggatcaatagataaaaccttgaatatatcaatgtcaaagtttaatatagatttgatttattaatgagtagagagcctaagttgaaccaattgatttagagttgtttgatcattatcttatatcactctcactgaatgcattgcttttgcttacgtgtgctctgttttttctatgtaccaggaatcgtattccgccatctccgcaagagaatctaatcatggggttgaacctactgagactgcttgttcagaacagaatagctgaattccacacagaactgggattactttcatctgcaaccttggagaatccttgcatcaagcatgcggtggagctcgagcaatccttcatggaaggtgcttataaccgtgtgttgagtgctagacaaaccgcacctgatgagacttacgtctatttcatggatctcttggcaaaaaccattaggtaaataggcttcatttgtcatttgaccctttctcttctttagctcattgccgtgacttaaaacatcattgtttatctgtagagatgaaatagctggatgcagtgagaaagcatacgatcatctctcaatcagtgaaggttgtaagatgttactcttctcgtctgatcaacaactgttaacatatgtgaacgaggagcacccggagtgggaagttaaagacgggttagttgtcttccaaaaaaccagagaaaccgcaccgtgcaaggagataccgtcacttcaactcatcaaccagactctcagttacaccagagagctcgagcgtatcttgtaaatcccattcaagtgttaccattgtttgacttacacgcctcagtcatcactagtattttcccaaacagttgatttgattcatcagataatttagctctgtcctttctttcttttgtcgtctggttataatgcaacttatatgttatggtcacatgaatgatttctggctcataaaggcaactccattaaatgagtccgtgattgaattttgattcttgtgtcccactgcttgtaaatatattatgtgtattattttttttattcaagaaagagggacaagaatatcaaaattgttgagaagttgttttctctttaattaacaaaatgttaaataattcttcttctctactttctgctccattaattttccaactacaaatctttcttccgattttttcttgacttgtgtatttaataattgatggaatcattaataacttataaattaatttcttaaaaagcattttgataattgaaaagtgtgctctaaatacaatattccgggtcattatgttttgatttgtcgactgcttttttcaatttttaaatcctcgtaataaatttaatatattatttttcagtctttaatgaaatgtaatttggtattattagttactaacatttaaaagaaaataattggcttgtaaagaacgtatggaatgtgtcgagtatgtgtgtatagtgtctccacttggatctttcttacttactccattatcttcttctctctctttccctcatctcattaatg

SEQ ID NO: 33014 - DNA, 3000 bp, Unknown; identical to SEQ ID NO: 1792
  misc_feature (1)..( 3000): 2750-1469P.txt file - cDNA_ID_3064275; gDNA_ID_1620448; Annot_ID_157358

SEQ ID NO: 33015 - DNA, 3003 bp, Unknown
  misc_feature (1)..( 3003): 2750-1469P.txt file - cDNA_ID_3064285; gDNA_ID_1620448; Annot_ID_157355
tttgtatttgtgtttcttcttttgcaattttgtcagatacataagctttttgttgctaaatctcttatcatcgaattcagaaatctgtttttgttgttataactctttctacaacccaagcaatgaagctattttgtttaagttctgcatcataaatatgcataccatgaagagttggatcgaataattgcagcctgatatgatcttttgtcttctggtccttattctaattcttggcatctcttggactgtttctgtatgtagtgatgaagtggttaagagtcttaggtcttctgatgtgtgatagaactccattgatactttcaattatttttaacatatatgaatataggacataacatgtaccatttagcctgtcttatttgttcaaagaaagctttttatcactacatttggtttggttttatgtaattttttttctttctaaacttactggacgaagttgctcattttctgctcatctacttcttcagaggaagcattggatcaccgtggtcactaaggagaagaaagcgagttcttcaacctaaacaatggaatgcttttttcacagaggaagggcgactcagtgatggaggtgtcaaatttctgaagaaagttcgtagtggggtatgttgctaaataagaaaaaaatctgctgtaatctgcagttgataaccttttgacactttgatatactaatttttatttttgtttcagggtgtacatccaagcatcagaccagaagtttggccgttccttcttggagtgtaagaatcagcatcttgtcacttttccttgttttttgtatacttttatgagttttatctttttcggctaccattgggggttttctgttcggccttatgttcatactcatgcatggtctattgatattagctttttctttggggatattgatgttatgtaggtttaaggttgaataaacagtgcatcagtaaagcattcattaactaggagatcagagagttgccttaatgtttttctatcaagagatttataagattagtcctagtttcgccataccaaactccaccagccgtcgccctacattccattaacttgataatgaaacctgtgcaagttatttgtagtctttatcatctcgacacattgtaaccttatgctacttacctctcacaggtatgacttaaagagcaacaaagaagaaagagactccattcgacagctgaaactgtatgtttgcttatacttattgagagtttaatggcttctcaactttctaccaaatgttacgtttcccatttatctctgttctcctaggtggcagctggttattaacttgctcaatgtgttgataaaactaggaataagaagtagtagtttggaactcctacactgagatttcgagtcagtttgtaagtaacgtcttttatatctgtaaatcctgcaggacggaatatgaaaacctgcggagacagtgtcgcgagattcatgaacgctatgaaaatgtctgcgactcaaaggagacagctcagagcagcaacactgaagacagtcaggttcttgaatcccatgatattgaggaagtcgagagttccacaagaaccatcaccgtagatgaatcagagaagttgaattctgaatcgattatgcaggatgagaactgtgaaaagagcgatgtcaccacagaagatgctgctggtaatgattcagactcaaccaatcctgaagaaaccgagacttcaccttttctagctaacgaagaagtagaaagccacaatactgttaaccaagaaaaagaaatttcgtctccatcatcaaagccaaaatctcaggcagcggacgaggatttcatgtcaacttggcagagaattatccgcctagatgctgtgagagcaaatgacgaatgggtgccctactcaccaactcaagctgctgtttctgagacaaaagcccggggaatagccattcaggttggtctcaatgactatgaccacttggaaccctgccggatatttcacgcagcccgcctggtcgggatccttgaagcctacgcagtctatgatccagaaattggttactgtcaaggaatgagcgacttactatctcctttaatcgcagtgatggaagacgacgtcttagcattctggtgctttgttggcttcatgagtaaagcacggcataatttccggttagacgaggttggaatcaggcggcaactctcaatggtatcgaaaatcataaaattcaaagacattcacttgtaccgacacttggagaaccttgaagcagaagactgcttctttgtataccgtatggttgtagttctgttcagacgagaactaacctttgagcagacgttgtgtctctgggaagtaatgtgggcggatcaagctgcaatacgaactgggattgcgaaggcgacatgggggagaatccggttacgagcaccaccgacagaagatttgttgctttacgcgatagctgcaagcgtgctgcagaggaggaagacgataatagagaaatacagtgggatggatgagataatgaaggaatgtaacagcatggctggtcatcttgatgtttggaaacttctagacgatgctcatgacttagtcgtcaatcttcacgacaagatctaagactacttatatctttcactcttgttctctctctttacttgtttgttgcattctttgttatttgttacataaaatgtgataaaaaccgttgtcctaaaacgcatgaaaatgtcttcactattgctaaaattaaatgtagaaaaacttagccaaacgagaacccgctgaggctaaaagaaggacttgactttatttggttttaagagcctctggttgagctagaggtgtataactgtaacaaactaactattcttcgttttcaatttccagatacatcagatctcttcttcatcttcttcctcttgggagacttgatttattttgtgatcagtctcggattgtaacatactgcgatcttttttcagcttctctaatg

SEQ ID NO: 33016 - DNA, 3003 bp, Unknown
  misc_feature (1)..( 3003): 2750-1469P.txt file - cDNA_ID_3064299; gDNA_ID_1620449; Annot_ID_157427
tgtaaaaattaagcctccatctagctggaaagtagcaagagaatgtctagtagttgttatgagaattatggataagaacaagctaagggaattagaacacgagcatgtttgatacgtatctaaattctcaattgattctgcatcaagtaggtgtagtagtagtagtagcctgttgatgaactctctcttcctctgtcttgcaggaaatatgccttcttagcaatgctaggtctggccgtttgcactactcatttgctattaccttacttcgcagctgagcctagcccctctttgtaagtttattgtttgatactttgattaatcttcactttgccatacatcgaggttgctgcttgatttgtggctcgacactttggttttgcaactttaaaactatagtttgtttttatgatttcgtaacatgtgtatactttcttcagataatgctttcaaaatgttgaatatcatagaatttgttaatctactcgctcaaactacaaattcacaaggtgatataacttttgattttggcgtgttacatcagtaagcattagtcctattctaaactaagttaaatttgccacttccattgacaaaataacctctcttgaaactcaaacaattaaaaatcatcaatctttgtaatagcatgattaattataaaataacaagaaaatactacgtatctaaattaatcttgaattatattaacacaatttttctttgctcaccacacaaaaaaatatatataaaaaatcgttttaccaaacaaggcaaataaaaaagatggatcagaaaataggcttggattttctcaaaaaagagaaatcaattcgctcagattgttcagcttcgatcatttggagaaataatcctcacttccatctaattatgtgaaactagttataaaattgattgtatataaataaataaaaaaagggatcagaaaattggcttggaatctctctgaaagagagaaacataaaatcgctccgtataatcagcttcgatcatctggggaaataatcatcacctcccaatcttttttccaataatataaaaactaatcagaacgaaaaaaaactaacatgcaaaaccaagaaaaaacaatttttgatacaaaaaaaacgattagggttcgtagaattaatgaaatgattaggtgatttatataggaacgttggtggctctgaccaaaaaaaagaaaaaacctacatcctccaagaataaaattagggtttatcaagtgggctgttctttgggcctattttgacctttttgcccagtaaaaaaataattgaagatggacctgaaccaacaaagtgtttttcaattttctgtagacgtacgagcctacgaggtggtctatagagaatgattcctcatcgtattactgatcagtgatcaatgtgacaaatgtgtataatgtatatgttataaataaaaggtaaatccaagaatgtataaaattaagtattgcattgtattatgttttttctcattatgtcgaaatgaagaatataacaatgtatgtttgatgactttttcaaacactccttgtataccagtaggggtgggcattggggtaagccgtttgtatttgggtaaaacccaatcggataccaatccttcggataaagaagtttaagatccaatagggtaaatctaaattatcagttcggtttcggttcggttccagtcgggttcagataagtttggtgtagaatttcaggctcttttggaaccgataccagaattttcgatttttaggtaaatatatggattttcgggtaaaattttgggtttcggataaaatttagattttcgaataaaatattcaggtattttcgggtagaggaatttaggacccaatagggtacatcttcgggttcagttttgggtccaattttttgggtcggttccggttcaggtaatcggatccagtttttttttccccagccctaataccattatcgtcaatgtttcctacttacttttggatccgctctcaagtgtgattcaagtaacttatagtttgaatatatatttaaacaatttttactattcagaatctaaatgtaaacattattaatggaagtctaaagattcaaattagtttaattgttgaagtattagagtatctccatcaaggagaaatccatttagtttctcaaacaaaaaaaaatattaatattttattataattttgttttatgattaaatttttattttagtaaaaaaattgaaccaattgaaagtaaagaaatattatgattgcatgtagagagtatctcatagtttctcacttgagaaactttctacattctctcttttttttaattattattttattagtgagaaactcaatattaagatactcctaatggagatggtcttattatctatgccggtttcactttttcgtttgcctaacattactcaaacaaaccaagaagcttaatccctaaataggtctatgcataattaggtttgctattgatagcctccacttagaaccacgtccgtcttcgtagattatcacgtgggttgtccagccaaagatatcactttaagatggttcacattgtatccatggtcaagtcttcatgaattacattagtcccttattatttttgttggtcatcaaaataaaagaaaatttgtaaggttatcatattacctcgagaaatttgagattttgcataattgtttgatatcaatcgatgcaagcaagatttagacgtttcttcaacataaaatttgtagacataaggtgaatttttagactgatgtagataatgctttcgttagcccctatgaatataaaattttaggcacaaatcgtagtcatgagtcaccaaatcaaatgtcggtactcggtacacttggtttgagatctctccctataaaatggaactaagtttacctgttgacaccatcctttctttccgactctacctttgttatccatcttattctattttctaaccaacgacaacaatg

SEQ ID NO: 33017 - DNA, 3003 bp, Unknown
  misc_feature (1)..( 3003): 2750-1469P.txt file - cDNA_ID_3064310; gDNA_ID_1620449; Annot_ID_157421
ttcttatggtgtcttgaattatgatcagctgccccacaaactccacaatgcatgattcttttcttaccttttggctgcttcttagtaggagactcattcacaccgttcttccttttcttctcagcctttgtcattttcttgtcttcttcgccttctgttggaggaggtacatacactctcagaccattactctcgggccagaacttagggcccctttgtggaaaaaggccatccgtgtaattcttcctccacattgctgtcctaaaccagcaacatacaaagttctctggttcaagcttcttgtggatgatgacgctatatgcatgctcacatgggatgccacaaatttgccactttatgcaggtacaagtgtaagcctgcaagtctacacggtgaagatctccaccatgcctcacttcatacatcccattggtacttggagacaccttcgcagcagcagcgactttgtgctcaccagctaagaactttgtaacataaggtgtacaaacacctacaaagtaagagaaatatatgctttaaagggagtcaaggctatatcacatgttaagaatctgcaaagaacaaggcttaatagagtagctaacctgtgtgagtatgggattcaacagatcttttagcaatcctcaccatagccattcttctgattgtctctaacatcgcaacaaatggcttctctcttgccttgttcaaagatccgttgaaagactccactgagttgttgtcaacgtcttcacagaagctgcctatcttctggaatgccctaacccaactccttggttttgtcttcatcacagactcatagactttagtgtcatagcaccgtatcttctccaaatgctgcttatactctttctcattgtaagaccaatccaaattccatagcagtggttttatcattgttttactgccataaatcttcttcgagttcccataaatgtgttgtacacacatccggtgctctatcttgggtaactcaagttgaaccgctgctattaaacctgaaacaataagacaaacatttttttttgggaatatctggaagttcaggcctaaaggccctacatctccgagaggcgggacccacaccaggttaaattcatctcctttggagaagagatccctccctacgtgcctcgaacccaacacctccacctggaagatttaccactaggccaacaacaccttggtaataagacaaacattagctaacactaaagagacacaaatgacactaagctaccttttgcctatctgatatcatgatgaagccttcaccatcacttaatctgaagtcttctttcagcagcttcataaaccacacccagttatctgtgttctctactttaacaaccccccaagctataggatatatgcgattgtttgcatccctaccttaggctacaagtaactgtcccttaaccttattctttagaaaacaaccatcaatgcctattagaggcctacaagactccttccatgtccttctaagactgtcaaagcatacatagaacctattgaacatgtctttaccatcatcactcgtgagacattcaacttcaacccgtgaatccttgtttgcttcaagtatctcagccgcataatcccttaatcttgcaaactgatcatcgtactccttctcaatccattgcaaagccttctttctagcagactgacattgattcctagtgacacttatcttccattgttccctaatgatttcttctatctttgtgggcatgtaaaattcaggactatccctaatcttatcaacaaataaccgagctatatgcggcaccttaaacatctcacattctccattagggatacagctatatgtatcaacaaacttcctaatcttccacatattatcactcgggagaattgccgcataaattttccactcacacttagctccaccttttttaccgtcacaaccaacacaaatgaacccaattttatctttatcatacctgtattgctttatattgcatccggttttgagagcgtaatcaacaaccgcctctttgaacgcaacccactgaaaaaactctgcttgtggtacaaataaccatcaccacgccttatatctgtgtcaaatctttcggttttttcttcatcatcactctccgggtacatatcgtggcgaattggtggttcgtcagtccactcctttagcagttcttccatgtgaaactcatctctttcttcagcttcggaatcgacatcaccaacaagatcagggtcgtgaaggactaatgacatcgatcaaagcttctagggtttgggaaaaatcgatttgggtttctagggttcgtcgtgagaaatttgggaatttttcgatttggtttcgatttgttttttggtcttaaacgggttgtaattcgggtttaggctggttctaattagatttatttggttaaatcatcggtttggtatacagtaaaccaattaaacccagagctatggggttttaaatctcgaacttacgattcatggacattaggctctcgaactttcaattagtggggaaataagcgtttaacttctgtttcatgggtatatagatagaggtcaaagatcggggtttatttagccagatatgatagttatcgtggggaaatagaccgtttttctgccaaaaagatataccgttatcggtctggtaacgttaaataacgtcgtgtggattttgacctgattatgattacgtgaaatgaccaatcaacaatttttacatgtatacgaagttcacgtattaaatgactactttttaaaagtttgcgtattaaacgatattttctcgttttttttcccagctctaaccatatatatctcacataaaattagggttacgaagtggaccttttataaatagaggataagagaccatcatcgaaaactcaaagaaaaaggagacactagctaagaaatttaccttgcacttttgatctgtgttctcagtagattattcgtaccaccatg

SEQ ID NO: 33018 - DNA, 3000 bp, Unknown; identical to SEQ ID NO: 1793
  misc_feature (1)..( 3000): 2750-1469P.txt file - cDNA_ID_3064319; gDNA_ID_1620449; Annot_ID_157409

SEQ ID NO: 33019 - DNA, 3003 bp, Unknown
  misc_feature (1)..( 3003): 2750-1469P.txt file - cDNA_ID_3064357; gDNA_ID_1620450; Annot_ID_157457
tctgtttcaagcaacatatatagtttaagattcctgactataaaacaatcaaacttgacatctaaaaaaatgtggagctccaagtcagaatttaccctgcgttcttcttgaagggcactcagttcatcagcagccctggatagtatcccttccacctagaaattaaacaaaaaggggagctgggagcgtcattgacatggaactcgaaaatgaaaaaaacaaagatcttaaacgccattgtataggcttattctccaccaaaaaatgagttaacggaaacaagatattcccaactgctaacaccagattgaagctagcaaagaaatactgatagggctccgatggcaatcttctcaatattcatcgaccaagtgactagcgaatagttattttgtcatgaatagaccagaagatttttaggttgttcaaagaaacaactaccccctaaaaatgaacagtttgtatcacaagatggttaagaggacttaccgtagataaactaccactttgggcctctggtggaatctcaaaatccagttcaggaatctgaatacatatattaatgcaaactactatcagtttccagcttcaaatcagtccagttttcatattataagaaggaaactaattcacagttttcagggagattaggggaagctgtttcttataaatatgctcggttaagaaaatactgaatccgaagatgcattgaatttcccagaatcagtaagagaactcaccttaatagtggctgattcagattttacaacttgccggtcaaatgtctgcattcagagagaaataagaaggtaaaattagcttagggagcaagagacaactaaagaaagataattcatgttttttcttataagaatggcaggctacatgctacctcataattgcatctccacatgaaaattataacaaacttctattgaaaagaacaaaactttagatttgaatcaatgcaccaaccttcacatcaccagctgaaacctctagatggtaagagcatcctcggggttgaatctcgccagcaaactgaacttcattattcctataaaatataccagagatcaagaaaaggcttatcttttttaattgagaaaatagacaatatatagtgtatctcaaatcaaatacttaaaagcatctcaaaatcataagaagttgtacctttctccgcaatgcggacattcaaatgcagatattaagacctgtaaccagaaatatgttagcaggaagcttctaagctaacacaaggtagagaaaattctaaataaaacgtcgaaccaacaaaacttagtggattgttagttttctagaatgtcgtctactcacattagctagaatattaaaaatctgaatctagaaaatgaacaaaattgggtactctttaaaacatacctttctgaagtgaggtattaaggtcaatagaaatctagttgttccctggaaaagaaataagaagctactttatgcacagaagaaggatcaagagaaagaccaagaaaatctcatacgttggactctttacaactgaaaaagatttcagccaaaaataaactagtagctgaaagttcacaatataaagcttcccaattgatttccacagaaccacatatgttaatatatttcattccatcaccaagacttagccaataaggtctgtttcatccccgctataatacacttcattacaatctcaagaaccattggactgtagaacgaactaatgttattaaagccaacatgtacaatttgggaacaagctcaaactaaaaagcaaagactaaagcgacgctagcctgtttcctagacctgtataacctttcctcctatgacaaaggataaggactacataacaacatcaggaatctcaataaaacttggtaaagttcctctaaatctcacaaatacttaagtttctctatttccaaccttctcccatctcaaatttgatgaagatgctccaaactggcaagatttcaaaggcattgagatggtttcacttctagtaaatttacaaagcaatgagaaaacaaatacagtcactgcaagctacgcgttcaaccaatttctccatccacaaaaagataagcttacacagaaaaattccaattgtaaaatcaattggaatatacacatagaccttacctacaaaccgagacacctaaccaaatgtaagtgtgtgagagagataaagagacatacattttcaccgcagcgcatacacatactctcaactacatagagaggagcaccaaaggaatgatcagccgaaactgcttcaactaccgagccaacatcgatttgttgatcattcccgttgtccatcacctccaaaaatttctccaaacaatcctatgaagttcaaaaacctattattagagaaaacaagctaaaaagcatgaaactttgtgctcattaacagctagacaaaacataaacttatatccaaaatttccaaacacaatccctatactaagaatttatataagagctctttcaaaggtcaaatcagagtgggacagagtgctcaagataagttcctagaaatcgagaaacagagttcaatttcgtcaatctcgagagaataataagaaaaaaggaacttactttgatatcaatttctgatgtgagaagcgaatatgtgtatcaaacaagaaaacttaccgagtaaaagagacaatgcttgaaattttactaaactcaggcaagaagcagaggacaccgaagagctctagaaacggcgagagagttgaagaagaacccacgtgagcatcacgtgtttgtcttttgtttattgtttatcttcgggtcgggtaaaccaatcctactcaccgccaagaattgttcttgtccggtctggtttagttaaactgttcaaaaccgaaacctaaacgacgtcgttttgtctgagtaaagaaaagggttttcgactggtgaattcttcttctgattctcgtcgccggtagttgtttccacgaaaaacaagtgatg

SEQ ID NO: 33020 - DNA, 3000 bp, Unknown; identical to SEQ ID NO: 1805
  misc_feature (1)..( 3000): 2750-1469P.txt file - cDNA_ID_3064363; gDNA_ID_1620450; Annot_ID_157455

SEQ ID NO: 33021 - DNA, 3003 bp, Unknown
  misc_feature (1)..( 3003): 2750-1469P.txt file - cDNA_ID_3064369; gDNA_ID_1620450; Annot_ID_157449
atcacaaatgatcagttccagtgtcattagacttgagcgttagggagtttttaagaggacaaaatctattctgtcttcccgaaaaccactatgaccgtgagggggaaacaacttcgggaagatggttaaagggacataccgttcatcggtggtctaatcgatctttttctcgcaggttattctcgagttctcgcacacataaaagtttttaatcgtatgaaagttcccgaaaatttgacaaaaacttaattttttacaattataaaatttcatttaaaaaaaaacttgtttataatttgctttcttcctattaatcctttgattcctagacttattttgctttcttgctcctaaattaattgagttgctctcttggttcgatttaaattgtttgatcgacatcgatctggagtgaatttggaggaagtgtagaccctaaaaggtcgtatctcaaactcgatgttggcatgtgatgcaagaatttgacttacaagtgggtgtagatcaagggttgatgttaatctactatccgatgtaattcgatacgttccattgatgtgaggaggggccaatgttcatgcttaagcctctagtgttatcaccgaactcaagacaattgaatgctgcaagattgtgtactaagagtatgcagactgattttacgtgtcaagactttccactgcgatttcaaccacagtgtacgtatgttttcagtgacaataatacggtattattaatacccgactctttcacaaactttggaaattagtttgagttcaattcaaaatcgcatttaaaaaaataataaaaaaattacatgaaacccacaatatttggtatgaaatttaatatggtagttagtaacctcgtaggtacaacattcatcttcttgctgccgacatcataattgttcataaatatttttgaacacgtacatataatgttcatggaccaaatctgatcagactcctaattagatgaattgtgtggtcgattttgagatgtactttttgaatcataattctttcaactactcgaaataaatttccctcaccatcccaagactactagaatagcatattcttaaatataaattattatataaccaaactattattctttttaagattatcactggatgttacgttgaagttataagacatgatatatatcactcaatttcagaaatgagtagagttcttagtgcatagtttttcttaaacctacaaggctacaatgaataaagcacgacaccatactgttctcaaaatatttgtatatagtggaactcggttgaaacatatatataccagtaaagttatttttgtttttgttaataaaagagtaactcgtgaacttgaaatcaaggagctaataaaaaattatttttgtttgaatttaactttttcaaaacctaacacgaaaatcagaaattctgaggggttagaatggttctcacttgtttacgtttctacgtccaaaatactcattgagttttcacattctcaagttttggaaaaattaacaatttcgtttataccactaacatgtttaaaactataattattctaaaactttaattatcaagttcatttcgtttagctaaaatttattctgttatatagttatttattggatataaaccctaaatttagtgttttgatgccacacgtaagctgattttcaaatcacaactttataaattccctcattaatttatcttctaatgcatctatcaacaataacgttatttatatatgttgtctatatctattaatctaaatttgttacaaacaatttaagtcagcacttatcggttttatgtctacatcatacattatgtaggttgtacgatgacgtgggttgtagctagttaggtataaaaatttacttttaaaagaaaaacataatctcctcatcaaaagcttttaattgaatttaatagccagggccaaatatgccaacaatatacaccaaaaaacatatttgtcgctagaacagtgctaattaagggactcacatactattagacattagtgcatgtcagccaataggcttattgtattttcaacatgttggcccatgtcagccaataggcttatagtatttgctaaaaataaaaatatatatatttgctcaagtgttggtgttgcatggttcaatatttatcaaaactcaaaagaattgttgactaactttacatattaacaagactaatcatttttctggtttgtccttaattttaaatatgtaaaccactcatttatgatttctccaatttagaaagagtgagatgtgaagtttctcccaaagaaagaaaaaaactacaggtaaataaagtgtatactgctttccaaaatatgtcgaattatcacaaaaataaaacgaatttataattaaacatctcgttatggattttgtatagaaatttattggcctacaactgttaatagacatattatttggcattgtacgtaatctagattagccaaactatatatagaacatcatgtttagctgatttttcaaaaaaaaaaaaaaaaaaatcatgcgtagacgaaatgcaagttttaatttaattttattgctttctctggttagctctagaggtctttaatccaccgatcttaaaaaaaaatccaactttctactttctctttctaaatgaaacaattccatatttttcatttcatttatacatcatacacttaattaatgatattctctttctagtaattagtacattaatttaaatttatcaagaaaatgctgttgaacatatataatcaattattatgaaatgaaatttataatgaaatgatttgtttgatagaaagaataaattataaactacttaagagaccgacgaagatagcaacgacaaaaccctaaccttataccaaccctcatttaataccaataaaaaaagagggacaaaaaaaatcaatgctatataatcgaagtatccactacaaaggttggagaatccttaaactgactatg

SEQ ID NO: 33022 - DNA, 3000 bp, Unknown
  misc_feature (1)..( 3000): 2750-1469P.txt file - cDNA_ID_3064411; gDNA_ID_1620451; Annot_ID_157480
atttatttattaggggaatgtaccttatgacccgaatgcacttttacccaaatccaccaaaaaaagtcttgcaaaaatactatagagataataaacgatagtcggttttgataggtataagattagcaaatatattagttagcttttattagttgaagaatacaaattgaaaaggtatattacactttattcaaatatagtatcaaaacttatataacacagagatttgataattttttaattgttgaatacttttttttgtgctaatttttctgtgattaagatttaattgatttcgtatataaaattattaaattgttttacgaacttctttgtttataatttggtaacagatagatattcaaatattcagtatattttgcttcagtttaggaaatctttgatgacccgtttttagatccaataagccctataatctagatattaacctgcagtataccgcatgtaggcttatattttagttaaactaaaaacttttactgtaaagatgatttaaaaatatatgatattattttatttgattttaaatgtatagtaaacagtgagttgtatatgttttgttgatattatctatattgtttagtgtttaagattatacacttgtagtttgattgttaatttaagagtttcacctgtagtataccatcttgtattaatatcgatctaaacccgtcaattctaggattttccagcttgtattaaaaattgaatcacatcatacacataaaaaaaatctaatatgttattaattattgtagtatataagattataaattttcaatataatatgtatgaaattgaatataaatatttcaaattatgacctgttactcagtagaaagttttcttaaatctatttttcacccgttataatattttttcatgtattgaacaatttatattcgtttttaaaaattcaaattatggcatatgcgaaaaagtctaattctttttttataatgatgattttattttttcgaaaaaatagaatcatataaagatgagaagtgaactatactaattaataaaaaattaatatgataatttagatatcaaatctaatttgttgattttaattggttactttttcggaaattaataatgtatttcgtttttctaattaaattaaattaattgaaatttatacatcaaatcttatatgttgattttgattggttattatttttggaaattaataatgtattttattttttaattaaatttaattaattaaattagtatttgactttttaatccttaaagagataaattaatttactctttaattttttgtttttaatggcatacctatgtaattacttacaaaaattaaggttacatttaaaatgtacttcccaaataatatagtaggatttttcttttttcaatttagtagcagaaatctttccaccaatttaacacaaaatcctctcccttctctatatgtccatgatcatgtccaccattgacaccctataactaatttcgggatgtaagaaaattgagttaaaataaaaaaaaaaagttatgtttaaattcatatattcttttacaaatattaggatgcataggttgtaataacctaacagaaatatctcacttgaaccatgcatctgatttacagtgagtgcactggtagaactgctatgaatgtttaggaacgtttaagttcaaaaccggttggaaccgcataactcaatatcctaacaagaaacttaactccaacgcttaaaaagtaatttatgcgatctaagataggtgtttagaggttaaacaacttcttatactgctttttaaagtattgaaagaattatctattatagttgtctatatataacaatatattggtaattataacaaaataataatgtatttttttctgtaaactttttcatttctcaaatacaatgttttgttattcaaaaattagaacctggaaaatcgaaaattctgttaggtaaattgaatcatttttctttaaaaatcaaagccaaaagatgtgagaggaagcaaaaagaagtactattatcttatttatttaaagaagaaagaagagagacaagaaaatggaaaaaaaaaaaattatataccaaaataaatatatcatagttgtgtatattatatagaagatcatatgaccaatttaaaacatatgaccacacccttaatttaaaatatttgccattggatctaatttttcaataatataattgagccatacctgctgaacggttgtcctccagcacaatgataactccaaccaacttttcatttttgtgataaatactataaaattaacttatctaaatcagtttaagaacttgctcttaagctacgagcttgtattaaattaaactaaaacatatactaaagcatgggttgtcttgattttgacgctatttgatcttacgaaaatccacttttttcatattttaactcttcatattcaatttttttttttttctttttgttttaatttataatattttcttataaataataaatatttgctttttcctcggtaatgaaatgaatcgtccaaaaaagtggaagctgatgaaagtagtttgacccctccacatctcccaacttggtacttagcgtcgcacacaccacatgctctctctctctctctctctctctctctctttcttctcctttctctttgtatctcttctctcttatgctaagccaaaaatggaagctttactctattgaagacgagatccttctctaatttacaggtacccatcttttatttctgaataatagattttggttcttgcaaatcttatagcttaaagttgagatttttggtatttacttagcaacaaaaaaagtttgtgataatattaccataaatggtgagacatccatttgcggctgagattttgctactttactcttttctctctctctatttccatttgtattgtcactcactcacatacaaaaataacatcataatcagagataatg

SEQ ID NO: 33023 - DNA, 3000 bp, Unknown
  misc_feature (1)..( 3000): 2750-1469P.txt file - cDNA_ID_3064431; gDNA_ID_1620451; Annot_ID_157470
ccatattccataagcatatatacattcacaaggcaatgttatcaattcctagagatgaataaagatggtaccttgacttcaacaagtgaaaccagtgatgatacaagcacaacgccatggtcttcctgcaataacaagcactttacttttcaaatttcttgaaatgtatatgaatctaaagctagggccttttcaaacagaacctaaatggtaagcaacaagcacttttcgttttagatttccttgaaataagaatcgaaagctgatgcttttctaagtagaaacctaaatggtaatcaaaaaccactttctttttagactcctttccaagcagaaactaccaatatccaaagtcaattcaaagagtgtaaagggagaagagaaagatgacgtaccggcgaaccaatttaagtaaactcggtttgactttcgtttatctctaaaaatttaaatttgattggattaccggtttggttgggttcggaacctccaaaacgattagtttcagtaaaataggttctttttttatcatactaaaagtttctctacgaaatcaaaattccgaaattattgagtttactgaaatagaaaaaaaaaattcttaaaatcaaaaattttattaaaaaaaaaaaccaaattttggttcagtttgtgatatcaaagactgtagtgagtaagtgaccgaaccaaaattttatacttttgaaccaaacattagtttttttcttgactgaaaccaaacagaagttttgttcgattttaattggcaaaaaaaaaaaaaatggatttaaaccaagaacaaaaggacaaaattcctgaattttttatccaaactatcccaaaaatattggaaagtgtccatacctaggtttaaattttaatagattgtctgctattttttaaacttatcatttttcaaaacaacttgctatagttgacaagaaaataatgttaaaaggataattttgtatatgtgaatcacttgatgtaatacgtgcacgtcacttgtgagttcaagaatcgaatggaaggagctaatgcaccttgcatagagactatatgtgatggagcgttttacacacatctatcaaatttatatttacttaaagcattatgatacgtatggtctttcaaagatacacatatggtgttttataggaaggccttgcatgcatatggttcatgttgtatatcgatatgtggatggtggtggcgcattcaagaccatgctttttgttaaacggtatttgtattcacatacgaatattgcacaaggtgtagagaaatcttgttttatatatttcaaaaggtattgaagactgaggaaaatgatagccttcgagaaccagatctcacatcaccgaaaaataaaataaatcaccccaagatagacttcaacacaagagaagtttattgaatataaataaatgaaaattgaaaagagtgaaagagtgaagaaatagttttgtgtcaatgcatttttattattgtagtaatctaaaattatttttgggaaatgtagcacatcacatcattaattttggtataatatatatatatatatgtaacattaactttggtattatttatttttgaattttgtattgtattttattcaaataatcgttagacggtaattcggcattcggtaagacctaacaccaagataaataataataaaaaatgataaataaatttaggtctacgcacttagaaatttttattttctatttttgcaaaataagttgaaccatatccatcaaatctaatattaagaccctagttaaatttttagtgggtcaaaaagattttcgacctggtttatctttaaaattgattagacgaatttaatcggatatatgatttgactaagtcctactcataaacctccaattcgatgtttgatttgaattaatccaaaattatcaaaactcacttaaaaaaccaaaaaaaaaaagtgttttgaatatccgagtgagctatattttttgttgagcaaatggtgagctacatataagtaataaaacacatgcgtaggcgtcggtgccataagagtagccgagtagacgagcgggtaagatcttatcccaccggtcctactcatttattactaggattgttacatcaccaatccaaatagaacttttgtaaaagatagaaccatattaaattctaaagtcaaaaagtggtcctaagattaatctcatcttcgtaatcaactgttccagtttgattaattgataactatcatctataaataaaatgtgcatatattatatatgtgtaattgtatagtattttcccacttgattttatgatactcgggaataagtcaacaaccacttggtttggtagttgtactgcccaatacgtgaatttgagcaccgtcctcatttaagttttcggttttgtttattctgtttcaaataatgcataactgaattttttctctggtttgatttggattatatacggggtttttttttgtcaaggattatatacggttttaaataaataaaagagaaatttgttatttgtattaatattttttcttatatgcctttaagtatcattaatgaatgatgaaaatggtttgtagtatattcatttattttaatacatataacacacatattgagccaaaacaaatatcatccaaagtttttggtgattgtgcccattgagtatgcctgcttttaagaaatgcattaaccaagctagaattttggttcaaatcaattatctatatatatatatatatatatatatatacatatttcattttaaatatataactaagtcattttgactaaattatttaattgtaagataattaaagtattagaactgaaacttctaattttttatccggtttaattcgattttacgctaattctggtttcgaattaatttcgatttgaattaccgttaataaaaaaaaatgtcattgtttcaaaaaagtaaaattaatactgtgtttgaccaaaacaataaccgatg

SEQ ID NO: 33024 - DNA, 3003 bp, Unknown
  misc_feature (1)..( 3003): 2750-1469P.txt file - cDNA_ID_3064495; gDNA_ID_1620452; Annot_ID_157527
tctatattgtttaacactacaccaatgcttctgctgctttggatgacgagatagttttttttttactcgacacatcatacaagaccttcgtaagtatctgtaatacacgaatcattaatacataacacgaataatgcattactatagttttgagaatctcattctcatacttctgtctctcttgttgtcgaagaatatcacacttaacatataaaaagaacaacatgtcagtacacaaaggtaaagcccaccaaagagagaaaagaaaacaagacttaactataacaataaatttaatgtcgctctcaaaactcatttttttcatatgaattttctaacacaaacaattttccttggaaatctccgccttgtatctcttatataactcatctctctatactccgaacatgtccctctccgttaaccttaacggccatgtcagccgccgcagctgaaaccgacgtctctctccgtcgcagatctaactctcttaacggaaaccacactaacggcgtcgccattgacggaaccctagacaacaacaaccgtcgcgtcggagatacaaacactcacatggatatatctgctaagaaaactgacaacggctacgccaatggtgtcggaggaggaggatggagaagcaaagcgtcgttcacgacgtggacggcgcgtgatatcgtctacgtggtgagataccattggataccgtgcatgttcgctgccggacttctgttcttcatgggcgtggagtacacgcttcagatgattcccgcgagatctgagccgttcgatcttgggtttgtggtcacgcgctctttgaatcgcgtattagcatcttcaccggatcttaacactgttttagccgcactaaacacggtatgtcgtgtgagttaatttaggtaaaatatatatttaatgattatcttcaaattcttattgcctcctttcacctaataatttgtttttttcttcgtcattcataaatcctaatattttagtcaaataaaagtggggtagagatggaaacaaacctcagattattttcccgtgttatttaattctccagctggaattttgctgtcaatggtaacaagcaatgaaatatcctaagtatagtgagagaaaattagcaaaagattaatcctaaaatggtcataaaagattaagaccagttagtggataaaatggtcttaatcggattagttagtggacgaaaacatagttaatactacaaactctttgttttagttatgtgatcttctttttaacaactgcttttttgtttgtttgtacaacacttaattaatatagatcgcttttaactttagaaaagccaataaaaaatgacacatggtgaagaatgagttggagacacgatcacatgcaacacagagagattggttacttaaatctaagttttgtacttttaaactaatataattgggtggggacaggtgttcgtagggatgcaaacaacgtatattgtatggacatggttagtggaaggacgagcacgagccaccatcgcggctttattcatgttcacttgtcgcggcattctcggctactctactcagcttcctctccctcaggttccaatccacatatctctccctctttaaggataaaccaaatattattacattagtaacttcattttctttttataatattagtaatgatctaccagtatatatagatgtaacgtcctgtttactggttggtccatatcagcagaagtcgaacattttggacgtgtgatttcccttagccactaccgtatagaaaacagtttataaaggctccaaataatttgttaatctacaactctcattcaaagtatatttgattataatagtcttcaaatgattttatgttttctacctctaaaaaattttcatttaattttctataaaacgtacctctaagaaaactaattggctacgtatttctgttaaaattgactatagttttaacatagacaattagatattttctagttacagtttacattaaaactctaaagatattttaaaaaacaaaatcctctaaatgaccatatattagtgtgaagtgaaaggagtgatagattgtatatattttggtcgggagtgatagattgtgtctaacgcttttaagttttaacttgccgggtttaggttaattttcatcatcttagtgatttttcttcaattatcaggcatcactgttttccatctttcaaaatagttccacgatttgattgaatggacataaatatcagattgtcactcatatacattctacggtttctagtgactcatctatttactttctttctcgtgatgtagcatcggtacatggatttatgtgtcgttttcttatactattgacatgttcaagaaaaaaagtaatatcttaggttaattatctctagttcgtgatcaagataatttaatcccgggtattacataactcttttgcaggactttctaggatcaggggttgattttccggtgggaaatgtctctttcttcctcttcttctctggccatgtcgccggctcgatgatcgcatcattggacatgagaagaatgcagaggttgagacttgcaatggtctttgacatcctcaatgtattacagtcgatcagactgctcggtacaagaggacattacacaatcgaccttgcggttggagttggcgctgggattctcttcgactcattggccggaaagtacgaagagatgatgagcaagagacatttaggcactggttttagtttgatttcgaaagactctctagtcaattaaatttgttttctatcagaatgtttagttgagttgaatctagcgtaatgaatttttttgtttttctttgaaatggttctacttgactaccgttatttgaacctaactaagtgtgatcaatcttatgttaaggggtattacatagtctatttgaaattcataggatctacactatatattcatatatgttcccattagtatagtgaaaaaaatg

SEQ ID NO: 33025 - DNA, 3003 bp, Unknown
  misc_feature (1)..( 3003): 2750-1469P.txt file - cDNA_ID_3064500; gDNA_ID_1620452; Annot_ID_157526
gcgtctactttgcgtttgatctcagccacagtacatttcttcgtgtcgtatatgagacagcttcgttgcgagaagtctccatcgataatgtactcttctcctgttccgtcgtaaacttctacttccatcgtacaccgtccgattatcgacgatctacggacgctgaatatcggtttctgaccttccgatctctcgccgagaaaaccttcccatctttggtgtagagttggtctctgttcatcagaaaaataaacaacgagttgactcagtatcatctttagaactactatataacaaataaaggacactataaattgtgttagcaactgagtcgatgactcggaattaggcttatacaaaaagttgattaaaattttcagctcaaaacaatttcttcagatctcgtttctaacaatgatttttatcgattctagccaagtcattatttgtttaccaatacaaaaaacttatcaagattttcttgacaaaaaaaagaggttagcaaaagattcttgaattctgatggatgctcaccaatgaaattcattttttaaaccaaacccatctaatcaaattcagcacaagaagttgagcatcaaaatttattataatcacctagctagtcaccctcacgactagactcttactcatcccaacataattttaagaagaaaaaaaggatgaattaagtttacctttcgtttaacggtaaggagacacttcccggtcgcgtccatgaggacaatctcatcgttatctcttgtgtcaggtccataagaatcaaccctgaagatgatatcaccacggcagtcataggcggcgaagccatcgccggtgtagaagagagaagtcttgcagacggtgagtggtttgtcttcttggtaaagataagctttgtcgaccacaattctttctcccatctttttcccttcttttggaatggtctcttcaactaattccatttttatttttattttcttgtgtatgtgtgttttgtgtgtggaagttagattttgtggtttgattaacgaatgatttttaatctatgatatggacactcttctcttccttcctttgtctctctatttatatgtggttgatatatacgtacacacgcttgacgcgtatgtaatgaattaatatctttaagtctgcttcaaaaaagtcgtaacatatattattgttatttcctattggctaataataccaaagtcacatgcataaataattaaataacatgctataacttaaaaatgttagtttaatctgttttattaggctttattctaaactatttttagactgtttacacgccgcttttatatccaagttgcaaaagaagaaacaggtaggaagattgtttgaagtttttatggtattttaacattttaggtggtattattagtttgggatttaaataaagttttaatgacttaaaatattattgagaatatattgttatttaatcaaattttttaaaaagtttggtattattaatttaaattttttataaatttagaattattgaattcatacttttataaagtcattcaaagttttgtgttattcaactaaaacaaaaaaatctttgaatatttatgaattaaatttttgtgttattggtttataactttctacacgttttttacaaaataaaattataaaagtctcattaaaatagagagattgtttgagaaattttacaaaattgctaaaaactaattaataaaattatagaaaacactttagttataatttagaatcttttatttttttaccacctataattttatcaaaatcttcaaatttattgataaattagaaaccaatatatatcacttctttaatgtatttttatgtcgacaaatgttttatgttttatttatccacacggccactttatacttattgtaaatttataactttgtaaaagatgtctaactactaccctatacgtgattacgtgttacaagtttttttttttttttttaaattataataataagtatgaagaaaagaggaaataggaaattttgtacgtcgatttttttttttgtaaaagttgagtaaaagtgaactaaacatcaacgatgtcccaaatcatagccttgactagtagacaaacacgtctaattgggtgacgattagacagaccagtccaattatgtgaaaactaacaaaatcactacctcttgatttacatttacatttaaatgattacattcataccaccttttgagtgtgattgtatgaaatttacattctttggtacaactaaattcagatttctttctataatctcttaaatgtctactataaatttacaaataaaaaataaaatggttctaaatatatttaaaatctcaaaatatatgttggcatgcaaggaaattcaaaccaagataatcaagaaaacaggtatagcgtttcttctacgtcagatatcaaatccgtgatcgagtgaacaatgtcaatatgacaatattctacaaagaagaaattttgtttcattcatatttcttggtaatgtatcgattgatcattttgtttcttcctgtttttgtttctatattgtttaacactacaccaatgcttctgctgctttggatgacgagatagttttttttttactcgacacatcatacaagaccttcgtaagtatctgtaatacacgaatcattaatacataacacgaataatgcattactatagttttgagaatctcattctcatacttctgtctctcttgttgtcgaagaatatcacacttaacatataaaaagaacaacatgtcagtacacaaaggtaaagcccaccaaagagagaaaagaaaacaagacttaactataacaataaatttaatgtcgctctcaaaactcatttttttcatatgaattttctaacacaaacaattttccttggaaatctccgccttgtatctcttatataactcatctctctatactccgaacatgtccctctccgttaaccttaacggccatg

SEQ ID NO: 33026 - DNA, 3003 bp, Unknown
  misc_feature (1)..( 3003): 2750-1469P.txt file - cDNA_ID_3064511; gDNA_ID_1620452; Annot_ID_157522
agtcaggtaagagacaatgaaagtagtttttgttttaaccgacgaattattctaaattcctaattagagtttttttcttattagaaaagagttgtctacaaatccaatacatattgaccaaaaaaaagtcttattctaattaaacttggtctacatattatttttttccttctcccactaggacatgtgagtaacgaagcatcaaaatccatatcgcaatctttttctaaattttaatatatagcttttcattaaataaaaaaaaacttgtataaatataggagagagtcaagaaaagagttccaaccataaaaatttcaacagttgttaagttacaagtctcttcaaaaacacacacacacgtctctcttcacagccaatcatcgatcacagctcgatttttctttattgttccgttggttttcttgagaatttttctttcttggtatcatcaaactcgtcggtaaggaaacttcacgcacgtatcttcaatgttgagctgttctaatggtaccgtcgtgatcgcaaccgccatggtttgctcaagcaccgctctgtttctcgccatggctcgtcaattccatggaaatcatcaaaatcctaaggttcttgatcagactctacgacccattctccgttcttgtctatcttcaggtacgatctttatctctatggctcggatgtttttgataaattttcccgggaaaatttaaaggttttcttgggatgcagaggaaacgaagaaacaggggaagaagataaagaaagtgcggttcgcggataatgtgaaagatacgaaaggtaacggggaagagtaccggaggagggaattgaaccggaaaagcgtaccgaagccagtgactaaaccgggaaagaccggttctatgtgtagaatctctaccatgccagcgaaccggatggctctgtacaatgggattcttagagaccgagatcacagagttcaatattcttattgactttttcttcttgattagtcaatagatttaggttttgtaaatctttcttttgtttttcggtactattagattttttcttggaaatttcagatattgtagactttgtagttgggtggtcttctttttctccctttttgtgtctcatagtagtaggtggttttcttatgctccacttatctacttacttgttttaaatcaagtgatgatgtaaataattgacatgtaagtagtcattagaaatttgaaaaggcaaatgaaagaatataaatttgtaaaaacatagtgtgcctattgtacatataaactctcttttgttggggatatctatggaatttatattgattgtgttgaaatcagtgaccacgtctagaagagaaaaaaaaaagagtctttaaatctttaacaaaacaaactttggagcaagaaccggaaaaattaggttttggtatttccatagaaattttggataatttgaccccccaaaaaaaaaaaaatccttccatacattttatgaaccatatcctagagttttattttatactaatagatagatatagccaacacaaacagcacatgtcatggctctggatcacgagtttaatacgccaatcaaagatttttcaaccaagtttgaagaagcagaggcgccttgttttgttaaaataagatatgtgtaattatgtattgaccagaaaatgatgaagatatgaatcttttgctctttactaaaagctaggagtaaaatttaaaattcaacacaacttacacaattttgatgtttattaaattttaaaggtaaagcccgaggtcattctttattgaagatatgtatttggtgtgttaaaatattctttaaagttatacataaaaaacaccctctcctttctattatttacattgtatattaaaaattcaaagaagaacaatataagaaaatcgacatatgtttttttttttgttttaataagaaaattagaaaatggacataagttccaattgcacattttatcggttatctttataaattacataatttgactgtgtattaaccatgaagccagagatcaatttcaaagcgaaactttctaagatccaaatctaatcacaatcatctccaaaacaagtgccgcttggtggatgggagaaaacaaaagctttccaatatgaacagaacaaataacaaaccaatggtccaaattgcacgtagttaattatttcgattctttgaataagttatttcttgtcctaacatttctttaaaagggttataatttgcttatggctcacgtaatcataagtttttaattattacatatatgaccaccaaaaacaccacctaacttttatcaccataccgctttgaattttcaaactttattgtgattttatttacaagaaacgaatttagaattttagtggatatgtttgtttcaatgccaatggatatcgccatattggtataagattctccattacaaaaaaaaaaatacactagtataatagcatgtaacatttatacaacataacaaagtagaatctacaagatcaacataatttttatcacccttgggtttaacctccgattagttttttctttataagaaacaaattaacctataagaacgaatatacattattgtcttcaattatggcaaaacgaggaaggatctaaaaaaccgaacacagtcgaaaggagccaaagcagtcaaaagtggataaggtaagtgtagggtccaaagccttataactccacacgaccactacactctctacacatggctcgtcgtcgttttggggctatacgtggggtcgggcacttcttctttcaagtttcttcgaaatgaagtatccgaaacttccagatacacgcaaaacccagaaaagagaaaaaagaaatcgtctttccttttacttctcttcttccgattgggtctttgatcatttccccaatcgattgataagttttgttgggttgctttcgattcttcgtttgatgatctaagaaagtctctgtctttccacgatg

SEQ ID NO: 33027 - DNA, 3000 bp, Unknown; identical to SEQ ID NO: 1821
  misc_feature (1)..( 3000): 2750-1469P.txt file - cDNA_ID_3064514; gDNA_ID_1620452; Annot_ID_157515

SEQ ID NO: 33028 - DNA, 3000 bp, Unknown; identical to SEQ ID NO: 1823
  misc_feature (1)..( 3000): 2750-1469P.txt file - cDNA_ID_3064537; gDNA_ID_1620452; Annot_ID_157506

SEQ ID NO: 33029 - DNA, 3000 bp, Unknown
  misc_feature (1)..( 3000): 2750-1469P.txt file - cDNA_ID_3064544; gDNA_ID_1620452; Annot_ID_157501
aaaaccaatatatgattcaaccccaagctagtgcttgattgaaggaaatatactaattacattattcacaaaaaaaaataaaaatccagaaatatgaccagtgtaatatcaagatgatttagctccaaaacgacataacaaagtgattgctgcatgatatagtaatcctgctaaagcaatattatgaaccatagcaaagaatgcaagttgatcgatataagtcagtaaaccagctggactcatattagttttgaagaagcaataagtttcaagatacatacttattctagttaattgagatcattgaaacagctacatttatcataaagccattcataatactcgagctaagttaagtgtccttggtttgtttcacgtatgcccgtgtgttagtgatgaacataagaactatatcatgcctagaaacactgatgactttgcagtaaaaaacaaggttaagatattcaaagaggagtcacgacatatctctggtaaaagaaacttatctaaccttagttccaaaaggaccttcagggaagtcaatatcatccagcctccttccctatcacaagaaaacaatgaaaaagtcaaaatcaaattttcctcaactgaagtgtattatcaagcagaaatatacactccattggcattgctataccagaaaattatcgagaagtgaagtcatgatcacaaacacaattgtaatcatactcagatcttaaaattgcaatacataaagtaaacataagcaatcacctcaagttcagcttcaagctcttccttctcgtgtccagtcgcaatgggcattacatcctccaccttcttcgtcgcaggagtctctactgcaaaatacaatccgtaataaacaatcattcaccttccaattgagaagatgaaaacaaaattgcagcaacaccaatctaagagaccaacacagatttaagtctatcctctaatatgcgatgaagaaaacatagtgaatcgaatctaattccagcgcaggtaagagtcctgagccgagatctgaaaatgcgtaaactatagcaacgatgaatcacctgaatcggagctgaaacgacgagggataacgaaagaagatgcggaaatggctgatcgattggcggcgagatagaaaccgacaggtctggtggtggcggctatcgatcgacgaggagaagcagcgacgacatcggcggctagggttttgagctgagaggagacgattcttctccacatggtgatgatgatgagtcaaaggaatttcgagtgagattgttttgtgttgtgattctcaggtcacaccttgaaggattagcgaagaaactccccaaatgttttattcttcctcagtgatgattcttctttgggaagagattagagagattcttaatttagaattggtcacttttttacttggaatctcgatattaaccggtacgtgtgaaactacatagtacacacgtgtcaggggaccctatattgtgtgacatttcaagtggaattagtgatacaagtggaaataatgatacaatgatgcatatactacaaaatgaaattatgatgaaatggacatgtaaggattattttttcctcagtccagttatgcacacaggcacaagcaagttgctttagttagcaaccaaattcatgttcctcgaacctcgttgagaattccacaattcaaaacttcaaatgtaatacctgatggttttggttttctttctacttctgtctgtagctagaggtaatgttagcataaaaaaaatcgtggtatagtagtttgtgtgtagaatgtatatatatgtccattgaacaaaacatatgaacgataaagacgtacacaattaatagtttctttcattattatcttatactcatatcctcaataaaattctagatgaattatttttctcatagataaaaaaaatctactcgatgtctccaaatatgaagttttccgttagtacgacactagcgtgaaaagtttgcatcctcatctttttggttcaacatttgggttttttcttatgcgggcttgcttcaccaattgggtcttttgggctttataacgttttatcttctcttgcaactaaaacagaaatccctagtgttgctaatgtgatacgaatctgccaaataggaaaaagcccaaaaattgaattcaaaataacgaaggaaatcagtcaatcacttagctctaattattttagttattacttattagatacaataaaatatataatcaatgttttgttagttagtttttctctgcacattatttatggctgatgaaacatgcaataatagtataataccatgagtcttaaaagacttatatgcgttcagcattcgtaaatctaacaaaaactcctattccatgcaaatgatcacatcatatacatgcatttacctttacattttgccgtttgataaaagaagactgacattttgttacgagttcgaaatacgttgaaagagatatagtcaaatatcaccgacgattattcctgatttaagaatattccataatagttgaactctattttccaatgagtacacgtcattttggatattgtcaaagcgacaagtcacacaagcaatgtaaaatccaaacaaaaatatcctaatcaacaaataattaaagcgaaaagtgaagacgaagacatttgacaattggcaacgctgctccacgccttcaatcttatccatctcctaaatttttttataatccagtgctctcatctccaccgtacttatcgtagtgcacaacgcatttaccgttgcacactctttccgaaaatacccttacgttgataaaaaccagtgaaacgaacattccacactataaaaaaccacaccgcatagcagctgattccacctaaatatctacatatccattttcttttcttaatccaaaaatttacaaatccttaatctttctcttcttcctaaaaacagctttgagctttctctcagataaccacattttacctaacaatg

SEQ ID NO: 33030 - DNA, 3000 bp, Unknown; identical to SEQ ID NO: 1812
  misc_feature (1)..( 3000): 2750-1469P.txt file - cDNA_ID_3064547; gDNA_ID_1620452; Annot_ID_157499

SEQ ID NO: 33031 - DNA, 3003 bp, Unknown
  misc_feature (1)..( 3003): 2750-1469P.txt file - cDNA_ID_3064581; gDNA_ID_1620453; Annot_ID_157570
ctaatttggacagaatgttatgtaagcgaatgttgaatatatatagtgatgatgaactcatttgtaattatttattgttctactggttatgaccattacagcaagtttctattcatataaaaattaggtggttattttcttatctaataaatctttagatgtttacatatatcttttgattgttctggaaaaatgaaattttctagagaaacatcacggttgggaaaagatggcacatgatacatctactttaggttagactcctaacgttttgagaacaattgtttggagcggtgcacatttctattgtgtactaaaaaccattcggttagacttgtattcagaattcggtattgttaatatagggagtgagcaatttggtttatgattcgggttggttatttttacggtttgacagaaatataaatcatctaaaaccattcgtaattcggtttagtaagaaatttatgtaaatactgattatgattttcaatatataaaagattaaatataagattcaatgaatttttattttgttcgattcagtttagtttgattacaccaaaattggtttcagttcagttttggttacagaatatttcgaattttaagataacgaaacaaacgttttataagaaacgtccacgatgcatttgatgaaaccaatgttgcgttgatccagttatgtttctagtgttaatggtttattctcaactctaagctgcatagatacatagctatatctcacactgtctgtcacacgtatgacgtatctatggtcaaacttaattatatcaaaagagtatttttggtataagaaaatactatgaaaagagtaatttgattacttaataaaaacgtgtatggattcataagaagttggccaactgacgtcataagaagtcaaaatgtagttaggtttatattgtttgattaactcgttatttatttacaacttgctgtaagaaacctagattctttaaaataaagataaaacctaacgatagagtgattagactaattcccaaaaggaaaaaacaaagtagctaggtagtcccttgattggaatcttgccttgtgacttgtgagactaccactagcaacaaaaacagacctgatcaattgtagtcgagcctaattaaaaaaggttcaactgagctctaaaatatgcaagtgggggtgaacgagaaattttcataaattgaatctttcctaaacggcttactcgactcaatggtcagcaacaaataaagaaacgtgacacaacacaaagaggaaatagggttaggggagaaatcatggcaacgcctctagtcgaactgaccatacacaaccattgtttttattccaaattttcaaaattgcactattctcacggttcttattgcgagatcgactatctggttgggtaagacatgacatttacgtatctactaagtattacaatatgcctcttaccatattaaagaagaatccaataaagagtggcatgcattaagaatgtaaacgaagaggaaaacattcattacaagggagattttcgagaatgaaatgtgggctcgcttcagactcacaaattgtgaagattatacaaacttgaagtataaaggagtagtaccaacaagagtttcaaaggattaccaaataagggagtacaaaaataaggaaataccaactagagtttcaagtcctctagaataaatttggggatggaagcaaaatgcattggtcgtcacaactgtagtatggacccatgggctactgcacctctctccaccctatttgggccaggcctagttcttatcccttccaaatattttgatatcttaatcactaatatctatatgaaactttctttgtataaacatttcttggaacgagaagaatccattttaaccggttcctagtttaccaattttacattactagaactgaattttcattattcataaccaacaatgcaatttgtctacacatatcaatttgtcaattttactaatatcagtttatagtaataattatagacaaatcaacaaaacatatttacacaccttaagagtttttataactcattcagacaaaaacaattaattaaaatacccttaaaaatagttaaaaatattttcactttttaaaaaatcaatgggaggggatcaaagattttcacaatttacaagatttgtgtaaactaatactcttcatttttatttgatttttgtaggaaaaaaaatgttttttaaacattaattttttaggttttatatgcagtattattgatgtattttaaacttcaataaaaataattgaatattctttatgatcagatttaatatatattttaaatattttttttttagaaaattaattaaaaataacaaaaggagtaaataaataaaacggaataaagttgggcgtttttttattacaaaacatgggaaaatggacaagttcttcaattcttgctttttgggcttcttgcctgtctctgtctcgaaacacccagaaagagagataatctcgcttatctgtctttatacttagctggtttcttcttcttctttatcccttttggctcttattacaacttttttttttccatgtatttcctcaaattttaatattttttctttactgtatattcatcaaatctcaagttctctaatttcccattcgacctcgaaatttgaccaatttctcttgtctcaaatttcagattctcttcctctgaaaaaaatcaaaaaccaagtcttctaattccatctcctctctgtacccatctcctaaaaatctcaactttgagtcaaaattttgtcttctctcaaaccaattcatagttctaaaaatctcacctttatctcaaatttttaatctttcatctgatttctgaaacccaaattctctaatctcatctttgagccaaaaagtttcaatctttcctctgatttctgaaaccaaaaatctctaatttcaaaaaaaaaaaatctcacctttgggtcaaaaatg

SEQ ID NO: 33032 - DNA, 3000 bp, Unknown
  misc_feature (1)..( 3000): 2750-1469P.txt file - cDNA_ID_3064590; gDNA_ID_1620453; Annot_ID_157568
ttggaattcaattcaagaacgaagaagctattaatagatctcaacaaacgcctccccggagctaaattctctttcgcagacacttatcccgccgttctcgatctcatcaacaatcccactcactacggtaaaaagagagaactaatcaatattcagactttgcataattgcatttgcgttacgggtctttatatcgtaacataccataacgtgtcgaaaacatatacaatttagtttacgttttgactattttacaaacaaaaaaacgcaggatttaagatagcaaacacgtcatgttgcaatgtggacacaagtgttggaggtctttgtcttcccaattccaagatgtgtaaaaaccgtcaagactttgtcttctgggacgcatttcatccgtccgattcggctaatcaaatcctagccgatcatcttttctcttctcttctttcttcctcttctccttctcctgctcctaaaccacgtcaatagtttagcatttacaaaaataaaaacagttaaccaatttttgttaaattggacctacttgctatatacatgtgtaactaattttatgttcttgatgtaaccatcaggacaaatatgtgtgttttgttacacaagtattatatattataagataattatggtttgtatgtatcatgaacacattgttatatatacacatatattcgtgtttagtgtttctagacatgtgttataaataaacatctacaccaattttggtcttcagattgcttttgcagcataacttcttgttttttctccaaaatgctctataatcttcaaatacattttaaacgtgtaaaaacctgaaaaaaattctaaaaataacaaaaagcctcttaaaattataccaaaatcatagccaaactcgataaaattcaaggtatatcaatgaactaataacgcatcattcatcccatcacgtaagttattagactcaaagaaatctaatacaaaccgaattaccgaaggcccaacagtaccccaacattcatggtaaaagatgggctaataactgtctggacctgtaatttgaatttaaccattttccttatcgaccctaacttttccacttcatgtccagaaaaaggtttagtaagcgtcaataactcatcccatggtaaacctgcaaaatcctcttgcagcaaagcttccaccttttcatcaacatcttccatagaatagagactattatagtagttcgccgcaaaattcacctttcatattcggaacctataaattctcatcatttttcaacatttcaatctgatttctccttcttcttgtaattgttgaagaaaaactctactcgaccaagaactcactagtaccaaaacacttgtattcacttattattccttgtattcactatatcaagatcaatttaatcatttagttaaattcaatattactctcaaagctttattgaaaatctagcgcccttttttttataaaacctaaatatacaaatctgttgtgtgaattttatcacatgcaaatatccaacttataatatatgtagaacaccatatgaaatttttttgttgcaagaatactacatgattcaatatttttttggattccgattttcccgttttgctgtagtaagggcccgtcaacaatggcactataattgctgaaaaagactttacaaatgtgatgaaaatatgtttggtttcatggagtgatgcagagaagctatacgattgtttctcgacggccgttacaaaaaataggagaaatcgaaaactaaaaatatatcatgaattacattgaaatcgataaacaagtatgtgtattttttctagcaacacaaaaaaatgtagtatatattaaattaattgagtatttttaagagatttttttttgtttgggtcttgtgatagcaaatcaaattgttttatttttttctgaaaaacagaacaaatcaaattgtatgtgttaattcttgtttgaaaaaaaaaacaaaaaaaaaacaaaacaaatgatggataagaaaagggtgatttagctgaataaccatatttgataaacaaattaagaatatagcaccatatatatagaaattaagaaaatagcatgcaaggagaaggaaaagacaattttagtgttgaattggaagtgagatgatttagtaacacttagtttagttttcacctatttatttttttttgctataaatcttttccaaaaaatagatttcaattataaaatttattagaaaaaaacataggtttttttctacatacaaaatagtttgaatttttaaaatcgaatttgaatttataaaatagtaagtagtgtttgtaagtaaagacttgtactattttggatagaaataaaatgttgtattatactattttggatgtatagaaaactataccctaagatacaactttggcaacccaagcaatcagataacataagtggtatctgaaaaatctagtttgttcttttcgtttgtttgttgtgttatacagaaaaaaaaaagagaagagattgagagaaaaaaaaaaaaaaagatgaaaaagagaggagagaaggaggaacttagaataaggtagagagaaagaggtaaatatgccattattatatataatatagagaatatagctgttttttttttcttgtattacttttttaatttataaatttttgttagttattctttgcaaatttcccataaaagaaataaaaggaacacacaaaaaaaaaaagaatggtgacatctaaaattctaaaagcaacaatagcgtgacaccaagagtgaaggaagagacaccgttttcacaaactgacaaattctattaccttaagtaaggtccagattcttccctgttcctcttcctctctgtttctctcattacccatctagcaaaattcaagaatcgaactagggctacgaaatatttcgattttgaatctccaaatccagaactcgagtgttaaatcttcgaaaagatcaaatctttggagatg

SEQ ID NO: 33033 - DNA, 3000 bp, Unknown; identical to SEQ ID NO: 1830
  misc_feature (1)..( 3000): 2750-1469P.txt file - cDNA_ID_3064613; gDNA_ID_1620453; Annot_ID_157556

SEQ ID NO: 33034 - DNA, 3000 bp, Unknown
  misc_feature (1)..( 3000): 2750-1469P.txt file - cDNA_ID_3064632; gDNA_ID_1620454; Annot_ID_157599
tggataagaacatattatattttcaacatactgtacctaggaacagacagctcagaaatttatgagaaagaggacgaaaaatccagcatttgcttagaggtaggtgtttaagtttatgtagtattgtttttaactaaatggtaaaagacacagaaaagatttaacacaaaatgcaccaccaagtttagatatgttccgactatgtgttacatagagcagaattgactgacctgataataataggcagggtaaaactcaaactcagtcaaagatatttccgcagttccttggtttgaggatgttaagctctgaccagttgctgagcttgtctccagcaactcagcaaagacaagaaactgcctactcatccagtcccaatggagaaaaataaattctgtggatccgacaaccttttcatatgatgttttatgttgatgaaaccatgtcactgcttctatgagttttccaccatgcaacaaaagcgttgatatcttgaaatgcaattgctcagctatgattttgatctcgaccaagcgttgtattgcaggcaacctagtcgatgtcccgatcatctgtttgcataaacaaaattgctcgtcgaaattgaatgtgtggaaaccgcaggcaaagatatgtaataataagaaagcaatgaccatatatgcatcaaaaggaacttcttgactagaagcagaatacatattagcgtgacagatgggttgggaaaaaacaaaatacttagagataataaagacctcgtgcaaggaatggtatgcgtcttcataaaacttcagtgcttcaccccaatctctacgaaactctgcatatacagcgacctagcagtcatggcatgaatgagccttccttttcccagatactttggaacaaaatgattagacttagcagaggtaacgagaaaagcttactttaaaacagtagcgaacattcaaatcaagagaattggaactccttttctcaattcggcttttgattctccgtccttcttctctgtaataagaaagtgccaactctgcaaaagcagaagcgagtctgcaaacataccgtgttgagatgcattgaaggaaaagcctcttgttctaggtgcaaagtaaaagaggagagaaacatacctggagagagagagcgtgagttcagagactatgctggaattgaagaagagcacgtacttagaatctaattctgcccgctttcgcaatgccaccagacgatcgtcgctaatgtcctctaaaaacaagtcgggaaggagtaagtcaccagtagttccgagaggaaaatgaaaagaataatcggataaaatgcgctaccgtggggagaagactggaccacgacaaccaccagtttgatgtttttgggacggattacggatctagcaagcaattgagatcgcagtgttaatttgagggtttgaaacaaaggaggggaaacaaggaaacaaatataaagggagatgaggaaatacttgaggctgtcgagatcggagcagacctgtagccattgagttggatcgccgaagatgtgatgtgagggaaagaaggcggcgacaagtgcagggaccttggtgcgatgcttaagcaaccagtcccgtttcaaaataccgccgcatctggaaggaatgggagaagcagaatcggagacgctgagaggatctctgaaggaggaggttcggctgatctgatcatcatgagcaaggaggagagagatttgagagaagtcggggaaggccagagcgttgatgggaggctgctgggagtggagatacttagtaatggacgcgtgtagctccgcgtatccgaagagagccaccagacttaccggtggcgtcctgagctcttccgggtattcctccatctcgccggggagtgtctgagactcggacgcgttgaatcgagcaaggaaggatctgacacattcattttacgtgggcttttaacgggcctttggataagggaatggacttgtatagctgtcagattgttcatctggcccagaatatgatgtgaaatacttaatgggttttcaacgggcctttaatctttaagggtatgaaccactgcagttgtcagatctgatttaaactaatgtggtttctaaggatgtagtatcatcaggcccattataagcccacttcttaaagatgcatcgactcgtcaaaaaaataaaataatacaaagaattcgaattggttgcatatacagaaacattggattttacaaaatggaagaaagaattattggaagagaatgagaagctgtcaagcggaggagcggttgatgaagtcaatgcagtctgcaattgcatcggcgtagaaagagttagagcgacgtatagatgtgtaatcaagaccgtcttctctgaccagcggaggccttctgcagcaccagctcctgagaagcctgaaaaagcttctcactctcgcacgcagtctctttgtcttctgcctcagcctaattcctcttccactcggccatcgtatccttgctctttccatctttcaactctgttgcatatgcgtcagattgttgagttttcatgtatatgcaaattatctatatatcgagaggcgagggctttcatgtctgacttttagaagtggttgttgagaatttttgaagacttttttaatgattgatctggtgcccacgtgtcattttatgctagagggaggtgttggttagttggaaaactagcttcctaacaaaaaaaacacatgtctaacgtactcgataaaaacatataatcttctcattcatcaagcatgttgcaagagggctttgaaattgagtttgaaaagcaaagttccatttgctctattaacaaaataaagcccattattaaaaccaacagattactataaggcccaatatcaacttcctaaactaagcgggtgaagattttgttagccattagtggtaatttctgatcccattgctgctcctctctccggagatacaaaggcgaatctgaccagtaagaaagatg

SEQ ID NO: 33035 - DNA, 3000 bp, Unknown; identical to SEQ ID NO: 1832
  misc_feature (1)..( 3000): 2750-1469P.txt file - cDNA_ID_3064643; gDNA_ID_1620454; Annot_ID_157584

SEQ ID NO: 33036 - DNA, 3000 bp, Unknown; identical to SEQ ID NO: 1839
  misc_feature (1)..( 3000): 2750-1469P.txt file - cDNA_ID_3064666; gDNA_ID_1620455; Annot_ID_157628

SEQ ID NO: 33037 - DNA, 3003 bp, Unknown
  misc_feature (1)..( 3003): 2750-1469P.txt file - cDNA_ID_3064683; gDNA_ID_1620455; Annot_ID_157616
catgaagaccattcattcttacaaccgattatccgaaaaagttagagaagcaaatagagaatttagaagttgaaagaccttattgttttttttcttctttgaccgtgacttcttctcctcctcgagtaaaagataagctgctgctatatctgacttggcgttggattccatattcacaatttcattctagataataagatacatactaacatataagaaacaattcaaaggccaaatcagatggtaaacaaaagctctctatatataaccgaagtttcagaccaaccagtaagaaaggtttcagcagtcgaaggatataagtgcggttgtcaaaagcagaaagcctggtgaggttggttagcaaagtaatccttgaattatcaatcagcaaaatcttagaatcgattagtagaacctgcgagtcatatagatatttttagatgggctattctatgttattatgttgtaatgaatattaacatcaaacaaaccttgtgggtgaccactgatttcaggtggtgtatggacttcaacgctatatcatcgccgagacttttacgctgacgtataagattcatgcaatcttctgaatcgaggaaatcaaatgtcggatgcgatgctccttggagaacatctcgtactgcccacaagaaaaaatttgcagtgatggaattttcggagactctctcttcacagctatcgcatagaagagatgcatatttattccactgatcttccagaagattctttctcctttcatcttcactcatacacaagttctcaacgacagtaagagctgcatcataatctaagaccagatatttctttgcatatttttttcccaaaaacgaaaatgtgaactgaacagctttcagaacagccacccagataccaaaattgtgttccctgataggtctgggaaagatcgtatctactgaattgtagtcagttaaccaggatatgatatcatctccctgagctggtgccttggcgtagtgagcattgggatcaaaaacattgattgtcccttcatcatcgaatggaacatctttgcattttagcagtcttttatccagaagcagaaatgaaaactgagggtcaaagtcgatcttttctttgactcgagtatgatccaagaaactgttcactgctctgcaaaccagatctgtaccatcattccttttacacttgatggtttttagaaagtctaggatttgattgagttcatgactttcaagaaaacagatactctgaggtgttcccactaggtgagaatcaataagactctgttcggaaacatcaagttttgcaagatgttgaaccggaaaacgcatcagccactctcgaatgctagaaggaagaattttatggtcacaaagtgacacaaggagcaatttgatttccttgagtaacttactgcgatcttcatctgcagctaaaggccactcttcggaccatccattcttaggtgcaaacgctttcacatctgcgagccgattcttgatcatttcaacggcagctactgtatccactggttcccaagctccaaccgatatcttacgagcccagtcctttcctatcctctggaccatatcctttttcgaagcatttttaaaatctgcatcatgttgttgttcaaaatgattcttacattcttcagcactagaaagcttcttcaaacatttacttctacacatccaaaacgtccattttctatctgccttagcagaagtgagaactttctcaaaaacatctcgtccctctctgttatgtactccctcgacaaaacttttaagctttgcaatgcttactttcataaagtctcttttgatcttaatatccaatcccatccaataagacctcaattcttgaatctcgtcgtcaacaaggtctgaacttttctttggctcccaaactttagactcagagcttaaaggggaagtcttggctccagcgatcatgcgctctgcatctctgattaaagtattgaattctttgttcatatctttttttagctcttgcaacattgatcgagcaacaggactcgtgttttctgggtaagtaactgataaatcttgttttgatttcttcacgcattgcttgtaatacgatactgacccaagctgtttggccaaattgtagaatcccattgcacaaagtcgtgataatatcacatcttgagaatagcattgtacagaagccaccaagtatgcgaaacccacgtctggattctctgttatgtcctctagtttcacgaacattgtaccttgtttgatatgaagaaaccatgagtccttgtctttcttgtggtcaaaaatcaaatcttcaagtatctccaaggccttgcagtgatttcctttaacgaattcttctctagatttcgtgatgagttttatgacctcaacatcttccaggaaagatggcttcatcatagtaacgactctcaagattcttgcgttttcttgctctccaaggtttcctttgcttcggagagaaatttgtcagaatgtagaaaacaacagcaacagtgagctggcttttctcacgtgagagccacgtgaaaagggttgatacaaaaaaaaaaccaattatgagcactgaggaattctgtcgaaccccttgtaagcaatatccgtttgggattttcacggagtagcaaaccaaaacaaatcccaaaaattgtgtgaatcttcgattttgggttaagacccaaatgtagaacgatcttcatgttggtgttacacaaaattcgtggaaatgtttggacttgaaaatcaacaatctcaatcttcttcgtcggatctctaataagtgttttgagttttactgttaaagaagacacattagctattctactgttattaagttctcgtttcaaacgccatgccgtttgttatatttaaaaacggcagcgcatcgctctatcccctactaaaccctgagcatttttaagttaaactcagaggtcctctgtcacaagccgcaagaagaagcagagcaatg

SEQ ID NO: 33038 - DNA, 843 bp, Unknown; identical to SEQ ID NO: 1836
  misc_feature (1)..( 843): 2750-1469P.txt file - cDNA_ID_3064703; gDNA_ID_1620455; Annot_ID_157606

SEQ ID NO: 33039 - DNA, 3000 bp, Unknown; identical to SEQ ID NO: 1846
  misc_feature (1)..( 3000): 2750-1469P.txt file - cDNA_ID_3064722; gDNA_ID_1620456; Annot_ID_157647

SEQ ID NO: 33040 - DNA, 3000 bp, Unknown; identical to SEQ ID NO: 1847
  misc_feature (1)..( 3000): 2750-1469P.txt file - cDNA_ID_3064726; gDNA_ID_1620456; Annot_ID_157646

SEQ ID NO: 33041 - DNA, 3000 bp, Unknown; identical to SEQ ID NO: 1845
  misc_feature (1)..( 3000): 2750-1469P.txt file - cDNA_ID_3064730; gDNA_ID_1620456; Annot_ID_157645

SEQ ID NO: 33042 - DNA, 3003 bp, Unknown
  misc_feature (1)..( 3003): 2750-1469P.txt file - cDNA_ID_3064745; gDNA_ID_1620457; Annot_ID_157661
atcaatatctactccacctctttcagaagcagcctgcgtgctgacaggaccagtattcttctcttgcttcattttccagccatcaactctctccttccaagctacattcccgagtccaacaggatccacaatccttctatttgctgcagcgtgaatgacaacaacagattttattgtttagagttttgacataaaagagaagcctaggtacaaatatatgtgttggcgagagagttagaaataaaggatatttacgtgattgattgacatctgatgaatagggaaggcgctttcccccagcgatagtagaagatacagagaggcgttcaggtgaggcagcagaaaactctcctgaagtctgtaaataagcaaatgacaaaatcagattccaaaactaaattgcgtgaggatgcgaatgcttaagagggaagaatgaacagcaatgccttacatcttgtctgctcgtgagacgaggaagatgattgtgagagacctctttatcatactggggttcccccatttcctctcccttcccacgagtaagatgccaaccaagcatccgctctgaaattttctccttctgagggtagttgaactcaacagtaccttcatcagctaagccatcctcgtctttatcaccaggaatagcaggactacctagaatcagaaattagcaaattgctataaataccaatctgatccaaaattcaaaacatactgataaactatcgatgaacaatgaagacagtatacttcagaaggatcaaaagagaacctttgagcctcttgtatctggttttgcactgaggacaagattgattcccatctttcctctcatactcgtagcaaggccgacaaactgggaatgaacaaatatcacaagccacaaaacgatctccatcaacagtcttgccaacattgtcactacagatctggcaagtctgcggaacaatgttcttcatcggctttccctacaaatcaagtcgaatcaatgaagccaaaattagaaacctcaacagaaaatttgaaatcagatctctccaatacacaattcaacacccaaatcaatcaatttcagtacatataattcctgatttcgataaaggtaagtataatgatgaagcaagagtcaaaaaagcataccgcggtttctccttcggattccatttgtcacttagttgcttccaacaccgaaacgtcggaatagttcaaatctgatcggaattatcaaaaacagaaactacgattagatctgaggagatccgagtaaaggaagtcaaatctgagaatggatcatgagtgtaagaagagttaaaagctttaccatgagatctgaagatggagtgtggtgatgtgactctctgaatctctctcaatctggatccaagctttcttctctacagagagatagtttataaggaagacgaagaggagaatcttgggatggctaagaagatgcaaagagcaagctatttgtctcctctactcgtcactcttccagatttttaaaatattaatatatttgtcacaaatcataatccaaccaagcaacaaccaccaccaccaccgacaacttccacagtcgatttttttctagttacagttttacagtggctgtaaaaaaagtgaaaaaacggccgataaacctttaaaatatccttagaaatatattatcatcgaattagtgactaaatcaaaatagtaattgatatttgatagtgatataactaaaatagaagtgtgaagaacacaacaaatcacaagtagtggggtaaaggatattcatcgtcactaactttcttacagataaaacttaaaaagtatttgccgacaaaaataaaacttcaaaatattaattaatcaacggattagtccaatgaataaatcaaaatatattgatagtgatgctttacttactagtatatcaaaataggctaaaaccagcgggctgaaaaaataaaggtccaactctagtatcatcaagcccaacagaatcgagaaaatgggtttgttggactttgcagacaaaattggtatatgttcggtttacgttatttacgagagaaaattgaatcgaaccgaacccaataattaataggtcaaactttgataactggtggtgcatgtggagatgtgtggccactagtgcagcaaagaacagactgtcagatagacaaaagaagaaaatggcaaacatttgaatcccaaagagcgccactttctcttcgctatccgacaaatcttccctcctctttgtcgtccctttaaacctttccaccttctgcttcgtaactctcgtaccctagcaatcctctacttaaaccttcctttgtttctccttcacttttcctgtaaatctgctcttttgttccctcgatcatatcaattttcaaggtcagtgaaatctcatgtttatttggtcctatgtgaatcagatttcagggtttgatatttgtttgttccgttgatgtgttttgtagatcttatgatctgagttacttgctctgtttttctgagatttatggagggtctttgtctatgtttcttcaccgttgcaaatgagttataatttctgtttacatgtagtgaaaaaagttcagttctgtgacataagaaagtcttaaaatttacgcaaccctagtttttttattttctaagatttcaattaaagaacattagcttgtctcttcatgatagttttccactgattattatcacaacttttttttttgttagatatttttaatcgaaattattgtagagataaatataaatacgttttttttttttttggtcaaaaaatataaatacgtttagttatagctaaatcttaggagtataaaaaaaaaaaaagtaaataaaaatcttaccagtttttatatctcgtatatcttctgtatttttagggtttttctgttacatcattctatgtttacgtttctttgatttttttttgcttgatcatttttaagttgattcgctttttgttgtttaagtgtaatg

SEQ ID NO: 33043 - DNA, 3003 bp, Unknown
  misc_feature (1)..( 3003): 2750-1469P.txt file - cDNA_ID_3064755; gDNA_ID_1620458; Annot_ID_157685
gttcggacatccttaacgagtttgtacggatgaaacacgtagttcctgatctgctgtccccattcagctttcactgcatctcctcttatttccttgatttcagtagcacgttgctcctccgcaatcaccatcagtttcgcttttagtctgatcagagctctcgtcttgttcgccagttgacttctctcctctgcaacatccaacgcgatcttaatcaactaccatagtcagttctgatgcattgataacacgatcttacgggacattcaggttgtaacattagtggggaggaaatacaaacctgtgcaacgaacagcaacaccagtagggatatgagtaatccgtacagcagtttcaaccttgttaacattctgtcctcctttcccacctgccctcgtgaaactaatgtcaaggtcctcttctggtatttcgattcccaccgcttcctcaggcaaaagcggcatcacttccacaccagaaaagcttgtctgcatgcaataccaatataaatccatagcacacaaccacatatgctttttgagctcatagaccttatttttacctggcgaagacctttcgaattgaaaggcgattgtcggacaatcctatgagttcctttctcccctgaaatgtaaccatatgcataacgcccttcaatttcaagagtcgctgacttaatccctgcctcttctccattagacatttcaacaactttcgtcttgtaccgctgcttctctccccatctcatatacatcctaagcaacatatcagcccaatcctgcactgaaagttatcattgttttaaaagaacctcaattcacatcacaaacacacacaaacctctaagagagtataataataacctgtgcatctgttcctccagctccagctgtaatgtaaacaacagcaccttctttgtcataaggtcctgataaaagctgagtaagctcaaatttatctaaagatttattcaactctttaatgattcccatggcttcttcaagtaaactaacatcagtagagtccatctcttctgttagtttaacaatcgtttcggcatcttcaacctatacctcaagcaacaacacattatctcaaagcctcaacatcataaacatataaaccttagatatgtaacaataccatcgttttgaactcagagagtaaccgcatacgatctttaagatcatttaaagacgataaagtttcttgagctttagtacgatcatcccaaaacgatgtatcagtagcttttgattccagatttgtaatctcttgttctagttgttgtaaattagcagaagctctaatctcttcaacacgagctgatgctatttctacatcttttctcaatgtataaaaatctaatcaccaatgaaacaaaagaaatcaaaaccctaagaattcagattcactgggaaatatgttgatagatcaatggtgataagaaggtaccttgcatcagccactcactggtttcgttttcgttggatacactcaagttactctcctgtgcagcgaatactactgaaacgaaattcggaagaaattggtttacacaaatttgaaatctaaaattgaagttggagcgagagggagagaagaacttactgggcgaattaaaacgagaggacgaagagaaattgggaagagaaagcgggagtgagagacggagaagagggaggtttgttggtcgaagaagcagaagtttaggttttccggcgattgcgaaactccgaccggcgaggggtccgagaacggtgagctccatggacatgtttctgctcaaagcttttcttcagatttctgacctttgccaagttatccatacaaagctagcagccacgtcatcagttttaagtataaaagttaaattgtggaatatatttaaaaattgggtttttaatggattaaagaaaagagattgacgaagatagtaatgaaaaaaataatttttcaaaaagtagtatatcttttaaaaaattccacaaatagtactacaagtttttattaaatactaaatataaataattaatttaattaaataaacaaaaaaaatatttttcgtcaaaacttttttaaaaaagtttccaccaaaacatttcccatcaaaaatattcttttttttttttggtcaaaacccaccaaaaatattcataaatattttttcaccaaaaaatatacatcaaatttttacaaaattcgagaatgatttgacagaattcaggaagaatttcggaaaaaaaattacgtgaaacccttcctgaatttagtgaaatccttcctaaatttcagaaaatgattatttgaatgattcgccaaaattcataaaaaaaaatctacaaatttcagggaagggtttcatgaaattcaggaaggattacagacaaaaaaaaattctaaatttcgtgaaaccttcctgaattgcttaaaatcattcctaaattttgtaaaacctttcttgaatttcttttttttggtggaaaaattttgacgaaattgtttttggcggaaaaatattgtcggaattttttttgaattttttctttaaggatttttttattaaaattagattaaaatttaatatgtttttttacacaagatttgggttactctagttttacagtttgattgagagttatttgagttattcttgttaggttttgagtcaatctgatataatttagataaaataattaagcaaatctcttgaaaccatacgagtccaaaacaaatcaaattattggattggttagttggtctttttttgtgtggacttttttgttttttgctgctttaaaaattgatccagatcattgaagatactctggttgcgttttgaatcaaatacaattatagagcaaaagattaatagtatataattatttttctatgatcgcaaaatgcgatgacgattatttagtaattttgtagtccgtttctaatagttatatagagttgagccttaaagacattgctaatcagaatctgaaatacgaaatg

SEQ ID NO: 33044 - DNA, 3000 bp, Unknown; identical to SEQ ID NO: 1855
  misc_feature (1)..( 3000): 2750-1469P.txt file - cDNA_ID_3064774; gDNA_ID_1620458; Annot_ID_157675

SEQ ID NO: 33045 - DNA, 3003 bp, Unknown
  misc_feature (1)..( 3003): 2750-1469P.txt file - cDNA_ID_3064810; gDNA_ID_1620459; Annot_ID_157715
ataaataactaaaagacggtgatctagtggcaatacaaggggttaattctatatgtctggatttaacttttcttggatataattttaaaaaaatagaaatagagtaaataataactctggatactaaaagagattatagaccaaaaattcagaattttctcagtttaaccaaacataaataaaaaataatgagataaggaaattaatcatgtcttacttacaacgttatattaattgtattgtagactgtactataatttttataattataataaaattatgatatttgatcaatttgtggagatatttataaaaaaaaatatattgtttgatttgcagaaattgtttgattaataagaaaaattataaaaaaaatattggttatatattggtttaaaaaaatattttttattaatcagaaaatattgtttgattaataaaaattttataaaaataataaattttgtggagatattaattgatcaaaaataaatcagaaaattgattttttaatatattattagtttatagaaatattgaatcaaacaattaaatgtgtagaagtttgattatatatcattacgcacatgcgaatcctacaccgttcacattatagagttactcttattatattttaagtacaattggcacataattcaaaactaacaacatgatttctagctgtttaatttgcaagttttgctgtcaatatatactattgcaagagttttgactgaagttaataaaagaccaactcggtttacatcatttataagtcatttgccaactgtaacaaataataatgacaagttgacaacaaaggataaaataatctttgtaagcgtattaaattttacactggtgaagctgtattgtctagttttagtgtcattgattaagatggtactgcatactttttcctcgatcagatacgtgcaacagcatcttcatgtgttgtctgtcatctttttgaaaacttggaatggtgatgttgttgaaatgaatttcgagcactaattatccttaacaaacttcttaatgtgtatattaattaagttgagccatatatttcgataatattgggccaccatattgggccatacatatttgaattcggaccgtaactttcgctatacatctataatctattttgattaacaatatattttaataaatgatttttacaataaagaatagtaatagtttgaagttcgttcttatatagtttcataaacttattaaaaaaataaattaataatattagtactaatccaaaatataattttaaacaaaacaaaaacagtgacaaataaaagaaaacaaaaacaccaatccaagctaaatggagactgtctagattcttttgattatttttctaactcattataatttttatttccttcacattatttcaaaaatatttagatgtttttgcataaaaatttgagcttacaagcaaaaagaaagtgttgtaaataaaatttcatggggaattgtccaaaatccttgattcaccgtgattcacattgccttccaaaatctctaactccactctaagattcgatttctccttcctaatctcattaagcgtcaaattaggccgtgtatcatttgtcaaccaaagcctagaactttaacacaacttctcctcatctctaacctagctttccatccgatcacattttctcattctgattctcgcatcagttttatttcaaaagataaatcatttttttttttaccaaaaaacgttataaatcgtactctactgacaagtaagtagtgttcaaacaatagctgaaggagtggatccgctactagaaatttgtaggatcatagcttgggttttcccaagtgggttaatctataaatgtgatccgaacaaaacgctcaaagtaaaataccatgtgtgtttattcatagagaaaaaaaaaaaaattgataagaaatagggtatcagcgaggacagtttacagtgttctcagtttatgttatcttaaatcatgaacgtatctgcataaatatatgttaactcaatacatgtcagaaacgatgatgtccaacttgatcatgcactcgttcacattgccccactaaaacttaatccaattttatcatataatttaagtttttgttgttgcaagtttatatataattttataaaaagtcaaaaatgtaaatcaaactcatgaagttatattattttttattttattttgaaattgaagttatattaatttacaatataacttgttgacactattgctaagtttattaaattattattttaaatttttaaaatgaagcatttacataaggccggctcaacattactaatttactatggtctctaggattttttttttgagccctaattattatttttaattgtttttgttatgaaaactatttttttgtgtaatttgacaacaaataattgttaaaaaaacaaaaaaatacagataaattcttctaaattcttttgaacatttttcaatatcatatataaaattttttaaaatatttttgaatattaaaatagtatgaaacttcgatatacacgcttataatgaatagtccaattgtcattttaagaattagacactttaatatgtgactgtaaaaactctttaaatatgtatattattggttagatttaattacatgagtttgatatatatatatatatatatttgcaaattgaaaataaatttaaagaaaattgttatttagaattttaatttcttacgagaaaaatcctataatttaattttagcgcctggctcaccccgtctggctaggaaaagaaatataaatacgcatgtgattattagaagaaatgatgttaaaagagagagaaagatacgagagaaaatggagagaaagtgagagagagagagagagataaagcagaggttgacttcgctttgctgagaaggcaaagagctcgaaagagagaagactaactctcatcagcgacgaatgtctgatccgttgaagatg

SEQ ID NO: 33046 - DNA, 3003 bp, Unknown
  misc_feature (1)..( 3003): 2750-1469P.txt file - cDNA_ID_3064824; gDNA_ID_1620459; Annot_ID_157695
ttgtggtccggttgatggcaactttagaggctcctatctcaccatgttgagctctggcggcgctgtcttcggtctcatcaacattgtcggaaacttcggcactgtcttcgtagataatgtaagatgatttctctacagtgaagtattttagtttaattctcttttggttttcgttttagttttagtttttggcattttgccataggattttaatatgaaataccatttgatgagtttttggtttttgcatatattttttttaaaaagtggatggattattaatttagtcgtaaataaatcatgataaactctggatgggatggattccttaaacaaaaagttgaaatagttattttacggattatgtaccaatattcacagttaaatgttaaatgttttgtagggttattgggtgagtgcaatagctgctcggccttcgtcgacccacaaagggtatttgcttggtggactcgtgtggttcgctgtaccgttctctctagctacctcgttaggtctcggcgcactagcccttgacttgcctatatctaaggacgaggctgaccgaggtttggttccacctgccacagccattgctctcatgggtaaatcaggatccttgcttctactcactatgctatttatgtaagtacactctctctagatcatatatatataaataagttttggcataacaaagtttatgggtagatgttttggttctttttttgctttatttagttctttcaattgatttttaagaatcattttaacgcattactggtttagtttaacaaaatttgggtctgaaatttaatcagtaaccaactagtcaatttgattcgggttgattcaattatttcaattcaaattggttcgttcagttcaaatacgcatactacatataatgcatgaatcgtatgagttgtgatcataagccctctttctttacaagcaagaatttgtttataagctgtcttggttacttcttacacaagaaacctagttagcatacaaaatatacgcttattccaaatcatgatgtattacggtatttgttgatcattagggctgtaacatcggctggttcttccgagctaattgcagtctcatcgctctttacatatgacatctaccgaacatacataaaccctagagcaaccggtagacaaatcttgaaaatctcaagatgcgctgttcttggatttggttgtttcatggggattcttgcagtggtcttgaacaaagctggtgtttcacttggatggatgtatctcgcaatgggagtactcattggttctgcggtcattcccattgctttcatgctcttgtggagtaaagccaatgcctttggtgcaattcttggagcgacctcgggttgtgtttttgggatcattacttggctaactaccgcaaagacacagtacggacgcgttgatcttgatagcaccgggaaaaatggccctatgttagctggtaacctcgttgcgattctaacaggtcagattcctatagtttactcaataaattatggtttaaaccataaacaaagacctaatcttggtttgttttggtccgtccatgtaaataacatataggggggttgatccatgcggtgtgtagtctagtccggccacagaattacgattggtcgacgacgagggagatcaaagtagtggaagcgtatgcttcaggggacgaagatgttgatgttcctgccgaagagctaagagaagagaagctgagaagagccaaagcttggattgtgaaatggggtcttgtcttcactatcctcattgttgtcatttggccagttctctctctcccagctcgtaagtcttcccatacaaatgaaaataaagcttaaatactaacaaaacttagaatttatccgaaccatattttctatttttttttttttgaatagaaaaataaaatgataaaattaattaattaactcttaaacaacactagtttcgtcgttttctaaaagtaaaacagtctaaaataaaattttggttactaatatataatagcccttaattaatgatcatgaacatcaattaaaaatttgcaggcgtatttagcagaggatatttctggttttgggcaattgtggcaatagcttggggaactataggatccatcgtgatcattggtttgccattggtggaaagttgggacacgatcaagagtgtttgtatgggaatgttcacaaacgatagggtgatgaaaaagcttgacgacttgaaccataggcttcgagctttaaccatggctgtgccagaagctgagaagatatatttgcttgaacttgagaagaccaagaaaaatgatgaagaaggttgaagaaatatcatattgggtacacaaaaggttgatactctatttttgtttgtatgctttgtttggttgtcttttcttgttaatttgtgtgaaatcgcatcaaagctatctccgtttgtacaatgtgttcaacatctttgataagtgtatgtattatacaaacaacagacagtgaaagtttgaaaccatgattaatttagtaggtgtggttagttatggatttggctattttattcggtttggtttaattcgtttgattggttcaacagacagtgaaagtgtgaaacaattaacacgttttttcctccgtctaattaaggtgtagtaaaattgcgaacacttgttgaattcaattgatttagttttgtgcaatttgacatgattatatttgtaaatttgtacaataggcatttaaatggtttggtttggtttggggtgctttcgtcggattcaattcggcctggttcgcatgccaaataggccagggcccaataaaccgtaacttggattaggtagaccaattaagaataataacccgacccgtttcaattaagggtcggatcactcactcccgtgtttcttctttcttcttccaaaggtgtttgttttatcaaatccacatttccccaaatttctttcttcttcttcgcttcagccatg

SEQ ID NO: 33047 - DNA, 3003 bp, Unknown
  misc_feature (1)..( 3003): 2750-1469P.txt file - cDNA_ID_3064832; gDNA_ID_1620460; Annot_ID_157735
taaatccgaaatactttaatctaacatccatataataaattagaccgtttacatacaaaacatgttaaaggaaaatattacataggtcataacaatgaagtataaaggtcatccaaacatgtcagaaaatttacacaaataatttatttgttccattgctattttcttaattgctcttctaaattttatcattggttgcaaatactatgatcttaaaaaacatgaaataattagttgaattattagcaaaataaaataaaatatagttgacacttgacaataagagtggacatcactaaaactaatcgtatatattgggttcgatgtatatgtataatgtaataagaaaataggtgtttaacaaaaataaagtaagaaagggtgtgtgtgtttttttggtgaaatgaaaggaggtgtgtagccaaaaacaaaagaagagaagaggtgcattatttctaaataaattttgatcaaataattgtgcttatgtaatgattgttgaggacatatcacacttgacttgcaatcattccgtcgacatttttctgtattatacatttcgtcaacaaccaatccacaaaaccccaacctatgataactaaatcacaaaagtacatttggttttatgggttgatacaaacttgagatcaagctaggtataaattaatctcaaaagtaatcgcaattaataggattcattcgttagttaatcgatcatatcctgtataaattttgttgtaacaaccatgcaattttctctaggatttaagctattgtcaaatttcctttcaaaataattatcgaaaatttttagttcgaaaaatttaacgtataacatcacttttaattttcattattcgtatacgctatacttacatttaaaccatttatttatttatttataaagtttatatatgtatatagagaacttaccaggttttgttatcccaattgtccaattgataattaaagtataccgacttctagttataggacttctaggtgcatgcatgatacatacatgatgcattatgcatatacatgaattcttctaaaatggatacataattaattagcacacacactatcttggcttcttcgtttcttggacgtcttggctttttttggtcgacccacattagcttattttatatacacgataagagacatacattttcattcgccaggcctgatcttatatatttatgtatagccgtatagggatatttgtatgcatgcgtattcaagtgcttcttcttttccgatctgaattggtccttctcttttcatattttcttcactttttctttcaattttctattatttttatactttctttgtacacatactatatgaagcatatctgtatacactgaaatctaatcaggaaatacgtaaagtatcgttacaagaaatacgtaaaataatgcttgccaatgattgattatcttatctaatcattggtataatctatatacgcacttgctaccaaatattgcacttatatggaatatgaagcatatatatgtttatggaaacaataatgccttggtatcatcatcacttatatatatcattttaattttgtaagtgcacttggattagaaaggatatataattatatatcaactactttgtttggtatatcttttaggtcttaatttcgttggatgattaaagttgtagctgaccaatactatgctaagtcgctaaatattttaattataggaaatataagatctataatacaaccacaagagttatccaacaaacaacaaccttttttgtgaatggtatctatattcgttgaaaatgacggtataattttaaatagaaattgattacagttttttcttttctttgttatgcactatagaaacttttttttttttttggattcaagcatgtggctcaaccatcagggtatgtcaaattttttgaatgaacacatcaactaattaaaagaacgtaaaagttaataactatttttcagaaatgtaaacagtaaaatcaagacgttaacagttaaattcaatcaagcaaaatgacagtacacatgtcggatttgctcagatcctcaatagttctgatgttcttgtaagtttgtatcccaaaactttctgaaatttagtttaaacaatatatttaagtggtccaaagacttcacaaacattttttttttacggaataataaaacgtggaaaggtcaaaggtaaataaataatactaatagcttactaattaaggtttatcattagttttaaataaataatactaatagcttactaattaaggtttatcattagtttctttataaaatggttcggactcctgagggtatatggctgtaccttaatttaaatacatgaaagtattggtttactatcatttgattttctttcattgttaaattatctcatatattcttaagttacataataaaagagtattttttcatgacaaattatcgcttttatattttacatacttactgaaccgtatcatatcacatatataaacaatattatatactaatggctcgtttaatttttttctttttaataaattagttgacaaaaattataaattagttttttaaaatttaatagaaaatacgttatgctgtcaaaattaaaaataagatagaaaatatgttgtatatttagttatttactaaaagcaattgaatggagtaaaatttgccacggtcagagttattctttcttaagttcactattttaggtcctcaattaattgaggccaatttgtctttttgtaatctcattatattcatcttctttctctttctcatcgcaccaaaaatgccttttgcccctctctctctatatccaacccatgtctcctctttatctctctaactttccccttagagagattcctctttctctcaaactagggtttcctctctgaaaacaacaaaaatatcccaataattgcaaaatctacttgaagatttttcattctcctttcttataattaatg

SEQ ID NO: 33048 - DNA, 3003 bp, Unknown
  misc_feature (1)..( 3003): 2750-1469P.txt file - cDNA_ID_3064835; gDNA_ID_1620460; Annot_ID_157739
tgacgctaatgcaaggctaagctcacagcaaattgcgcaaagcgagagagataaagcaccaatgcttgtgaaagtgatgcattacatttgtgtagccttcagagatcatttgcctcttgagaaacagcttagacttgcttctatggacatgtcttaattccttaaaacctattgtatagtttttatatttaggagtattttgttgtatttttaatttttagcgggaatttcattgcccacactgttgtatttttgaaagatatataagaaagtgaatatgaaggttgaatacaaatttcaaatgaggtacatcgacatagtagccaactttatcataattaaagatgtctatgattgctgattaggagaaaactaattgaagaagttaatgagtatgaaagcaataactcgtgttttcccgtatcttattatgtatctaaacaatgtactatttccagatggggtttcagaagtgttgtctttcatttaaaaccatggctttcgaataataacttaaaagttgttaagaaaaatgaatgctgcctttttttcattggtcaacaacatagcgaataagagcttcatattttcgtattttttttttatcatttaagatgtgagtttttttgttctgattatttttgttgatgctattattatgaaattttcatatatgtcttttcggaaagaattcatcaaaccaaattatgatatcattttcttatatatttatatgaaccagaataatatttttatttatcatgggtggcattggcaatcgcaattcccaagcaaagccaataataaccaataagaatcgtaagaccatccttattgatgagttcttagtagaattcttaacattttggatagacaaaataatatttaaatattaaatagttcttaataagaagagaaagtgtatcaataatctcttatttaagagccaattttatttttctaaaaacccttttctattttttatttgtattttattttatataatattttaagagtttttctaaagtttttaagaacctattgataatgatgctctaaaaacatctttaatggaaggttttaagatgaatggattcttaaacaaagtaataaaaaaataaaaatttgaatgaaagaagaaaaagaatgaagaaaggcttttagctaaaagcatcaagaagaatttttgatactcaactaaacccatttaaatgacttgtctctcatacattggttcactttttttctaaaattaaaattttagttatataataaaattacaataaaataattatttttgttgttgttaagagtctcttagaaatgcttattgtcgaggatggtctaaaatagagttggattaaaacactaccgtcttgctcgctgacatgcccatattccacagccacaaaatcttcaactgacacgtggcataactaaagcctctacatatctcaggcacgtgaatctactttgtgaaaacactgaatccaatgtttccagtgtgtgcatagagttttatttttagatgtcaagatgtttaacttggttggtataagatatccttctgtattagttcttactaatagcaaatatgagatcttacaagtaaagatatcttaaatagtcttattaggtatacataaatctatcagaaatggattaaaaagaaaaaaggataaaatcaagtaacatttgtggaaaatcaaagataataaaaatagaatttaaaaatagaatttctttttgataatatcttatatatatataattaatttaacaaatagtttttgttacattttgttgatgatgcttacccatataaatgttttatttataaataataatacaacttttttattctctaatagctcgttaaattttttaatttatccaatcatatactttattcatatcaaccgacttttttaagccaccttctttctttaaatagattccatcttctctcgctctccaatcccaatcagctccattatcataagcagtatattgtttaaatgcggtaaaattttgataatgtctatagtttggtctttgtttcaaagtacacatgaaacgagtcgtaccccaaatgttagcgcgaaaactattcacgtaatcatatcccactggtattatttttggacctattacatcatttttggaataacacctcatccataagtttttatgagatttgagttcgttcacgattctaattccggtgccggatacatgaccaaaaatgtaaatactaaaaacaaatagaaaaactgaaaggattttcatttattttttttttgtttagggtagatgtttagatgttttgttttgttaccttgatttttgtgtttctctggtactatatatacaaacacatatctgtattactattatttgcacgatatatctttctttattagttctaagttataacaaatatgatatcttacatataaagatatcttataataaacgtactagagtactaggtatacataaatctatcggaattgaattttgaagaaaaaaagataaacattacgttggcttactttatatgaaattcaatgaaaatcacttagccaaagaaagatagaaaaaaatcttatgatatactctttgtgtacgtaatataactttgtttataattatttatcaacgcaatagcaagcattgccactaaaccaataagagagtgatcatgagcatgttgggaacaacactatccacttgttcgcttacgtggacatttttcactgccacgagatcttccactcccacgctgcataaccacaatctctacatatcttctacacgtgaatctagtttgtggaaatctaaaaccaaccaatctacactcgctgacgtgtctatatgttaatcttcccacaaaatggagtaatgaacactttactatataaacggcgtctccaattcaacaacatctcattctcacttacttcttttctttttttgtgttcttgtttagaagaagcaatg

SEQ ID NO: 33049 - DNA, 3003 bp, Unknown
  misc_feature (1)..( 3003): 2750-1469P.txt file - cDNA_ID_3064839; gDNA_ID_1620460; Annot_ID_157752
gattttttttagtgtctttaaaaacacgagttcaagtttagataatagagaacattttgatagagtatttatactagaattttcacacatatgaaaacgaatataattttggaaattttaaattttctcttttcaaaaacaaattaacagaagatgttagtttgtaatatgttggtaattgtgattttcaaagttttaaattctggaattttcaattacaattttctacttggtgtacataaagcttgtagtaaatttgttaattcggaagttaatggattttttgtaacaagaaaataaaaatgattagtacttgagagttgacattagccagtagggaagtgcatataacgcgcttaagagggaagtaattaagaaaagagtcgtttccacttaattaaatcgtagccacaaataatggggtttcttaaaaatggcttaagtgtacttaaacttttgtatgatacgccaaattatgtgccctttcaaatatggaaactatttagttatgctttaacgagtaggttttcaatcactcataacccttgctataaaatctaaaatatatcatttttattttattttgcaaatatgaaaatctaatggtcttattagctccatagatcattcacctcctcaaagataacatagttattattattttttaaagttacttatcaaataaaagtgcaccaattcagatgtttggtatacgggtccggtaccatggacttggcccttgggtctacccatattcgactcgtacccaaacgtttattttgttcttttcaattgaactaacaaactaagcatcttaagtataaaaaaatcgttaattgtaatgtaaaagccaaaaaccaacagacaaatattgatttttgcgtttgtgcttaacataattatttaatgaaaaaattatatgttttaattttataactcaaaacctatttcttaaactgatgttgaattgtcgaaaaactaaattaataatgttggcagatatatatggtcacgtcaaagtctatctaatcaggacttttgtttttaatcttgataaacgcatgttatcgcattaaaaatgaaaagagatgggatgtggcaacaaaagcaagtatttgctacttgaagtgtgaaggaccatacatttgattaattttggatgtgtttttggttaggaattagtcacttttcactttaagataatggatttcgaatttggttgggattagagtgagataactttttagagtgtcaagatcgtcgcgtctccatcttaatttgtactttctttgtcatgttcttaatttgtttactaatagagtataataagttcagttacctacaattaattaagttaatttggcgtcattatttattactataaagtagtaaactaatgtacttttatcgatttctttatgagacatgccctactacaaaagcatataaagatcattgagttgttgaagtacatagcaaatttattctaccaatttaattaccatccaatctttttttcgtcaactatgacttgaatatatggacaatatggttgactaaagaaacgacaaggagtctcatgccgaaaacttagtacgtcgaggcttgtgtgtggtaacgatggaagaaatagattgagaaaaaaaagtgaaacggcaagcagtctgtttatgaagtctttggatctcttaaaccgggctttgtccaaaattagaatggaaaaaaaaaaagaaggatcccttaaaccggtaagcaacccgattaaattcaatatgtgtacagaaacttaatttgatttttttataaaatttaaatcaagactaatatggagacttacaaaagttaattatatgaattgtatgttacagattgagtgcgaaaggatgttccacgttcaatccactagcgaaacaaaaaaatcatttatttaactgattgtcttcgtaagtttacttagtaatatcatgttgaaacattaaatctgatatatgtgccactatgtaaatcatttagttaacttataattgaaacaagaaatgttatgtgtgccactatgtaacttttattagtacatatataaaggaaatagcgtttaataaatcgactgctaatctaaaactaacaagataattaattatgatcactaagcttcattctaacaaatcagtttatagaggacaagaaagcttataattactccaccttcttttgtctttttgtttgtgaaagagaaatatctgatggtaaaaaagcccaagaagacctcctctctacacctttaaagtttatgcaaatttagaaacaaacaaaacggaccactatagctaattatcttatatagataagatatgtagaaggagggatatacatatgtataataacaatcttgatatataacttccatcatccatggttaagattgtaacaccatgagttggtgcgaggataattcatatatacaaaccaaaaatcacgcgtatgtatgttattgcatgcatgtcttgcatcatccatgcatgaatgcatcaaagagtctccagtctttaatatacatatctacatggatggatgaaagtcatgaaaccatgttattaaaaccctttttcaaaacaaataataatgaaaccatgttgttataattggttaggtttgaagagatatacatagatagtccccatgcatgtgttattagtagtgtttaggatgaaaataacccctaatacataaattaattttatgattaattaacactctaagattaaggtaaaacataattaattaagactttagattaattaagggttagtaatcacgcggtgaatttagtctctataaaagcagtacctcaccttccacaaccttcaatatcaactcacccacatctttctctcttattctctcactcttttttttttatattcctctctctctaaatctataaaatatatttaaaaacttgatcgtatataataaagtaaataaagaataataacaaaaaaaatg

SEQ ID NO: 33050 - DNA, 3000 bp, Unknown
  misc_feature (1)..( 3000): 2750-1469P.txt file - cDNA_ID_3064881; gDNA_ID_1620461; Annot_ID_157766
tatccttttaaaacctatctatcaattgcaatgtttcagcctataagagtcatatttctaagattgaataaaattgcttccaacattggacttgtaagtaaactaataagaattagaaaggagcgacataacataccaactcaggcacatactctactcctggtttaactttcaggctcataatcttaaacttaaccttgctcttctgattcaacggctgcttttcattgttctctggatgttccacaaacttgaacactgcacttaaacatatacatacaagaagcaatactcagaggctgtataaactagttagggtacacaaaaccaaagaagacatcattcttttccagaatctcattaccagtagcaaaaacactctctcctggagccaaaacacctccgggaggacgcatataacaactcttaggtgccgttgtttggaactaaacaagaagatacagagtgacatagatgaataagtacatactaaagtcaacaaagagtcaacttctctgcaatttcttaactagttctcaaataagtatcagaaatgcgagaatcaatagccaaaattgatgtgaatgatacacataactccattaccttaaatgcagtatgagatttgctagtgttcttaagctttattgcgctgcgaacttgttttccaggttcatctgaaacaaacacaaatccacaaattctaacttcgttctctaacaatggaaatccaaatcaatcacttccagagagcctatgttaatcacttcgattctctaatcagaatccataaccaaatcaatcaatttccagagaactatgactatttctgaatcaagctaaatcgacggcagaaacttaaataaagaagacgtacaagggaaatacagataactagaaggatctagtcggagacgacggcgagctggaagaagtgatctggcgacggaagacatagtcaacggaggcttagagacggcggaaatatctgtattccgatttccatggcggctacggtagttttggtttggattctgtgttgaagatgaagaagtggtgcttctcctctgccaaaacggacatagcctgaagaggttcttcttcttctccacactcggattctgacggtcacctattggcatcggaaataatcaattttccggtgaccggatgatactttcccgagtttcgaataatcttttgtttctctaggaagagagacaaattggtgtgaatttcaaaggaggacgacgaagaatcgacaaaaaatggcgttttgttttggcgttttacttctgcgtctgcgagagggtcacgtgtttttctttaaaatcggatttagatgaatttataaattttagtagtttataagttttctgttaagtccgtgtgaaaacgtgttttgacaaataaaagtccaatggatgtttctttcggggttggaatttatataatggaattgaaaatcagtgattattggttagttggtttggttggtcgtgaatttatctttggattctttcttgtctttgcatttggttggtaggcttatatatatcacatctcaacacaagtcatcatgtaaacttttggatttgttcaaaagtgttttttggtatatggattttttttctttttttctacgcatataaatatcattattaggttttacagacttgctaaatattggagataagtagtactagtgggctgcgtttgtatattgggcttagccgacttagaacttacttggtcggtaagtctcgtctagggttttggggttaagtcatgtgtacaaatacgttgtacagccgttcattgtaaagcaagcaattgaataacaatcactttcttttcttacactaaacctaaacaattgaagttttggcaaaaatcaaaattaaagcaaagaattcagtaaaatctgagagaagcttttggtagaatttaacgcagccaaagtgtcattaatttgcggaaatgaccgttcttctttctcgatgtgatgatgtttctgatgtcgcggtcaatgcatattcttgatattcagaacaatgatgttcttgatgtcgcgaattttatgcatgtatgttattactaataatagaataattatgcgaatttaaagatttgaaatcaatcacataacgttatactcagtattaaaaatgtcagtttatatggtgtttgtattgatattccttgaaacttcacgtcaaaactagtttgaattcttcttcgaattgtattaaaaacagttttaaacatattaaaaaaaaaaaaaaaaagagtttgtaactgaggaagtttgggctttaaaagtccatacatcattttggcctggggacaaaacattttatacaatctttcctttcaagccagactcaaacatgattgtgtgactaattgtgcgtctacagattttggattcgtaaatttcgttatgttcgtaaaataactgtaattatggtaactaactaacgttcgaacataactttctttcccttctaaattaccaaaatgttgaacacattttaaaaagggaaagtaagattgttaaactcatctagaaacggaagctttaatgtaataagattcttcaaatcatatgattttatattactgtatgttatatgaaccaatgcaagatcttacaaaaacatatgttaccattttcccaaggaggaaacacatgtgacatacttatcttataattaacacatgtcgtaaccttattattagacaacataacacaggtttattcatcaagtcttagggtttttattagcctatacaaattcgtgataagcaagaaaaacaaaaacctctgtttgactcttccccaagtttttttttaaaacctcttcttcaagtaaattttgattattatataagtcaaccgattaaactatagttcaaaaaaaaaaagatttaagaggtttttctctggatttcctcttctccacgttctcagagttagttacacagctttcaacgatg

SEQ ID NO: 33051 - DNA, 3000 bp, Unknown; identical to SEQ ID NO: 1884
  misc_feature (1)..( 3000): 2750-1469P.txt file - cDNA_ID_3064926; gDNA_ID_1620462; Annot_ID_157783

SEQ ID NO: 33052 - DNA, 3000 bp, Unknown
  misc_feature (1)..( 3000): 2750-1469P.txt file - cDNA_ID_3064930; gDNA_ID_1620462; Annot_ID_157782
aaattttgtataggtctgtattagccgactggttgaagaactggatggagcctaaaactaagaaactacttaatgtgaaggtttttgctcaatcttctcccaacgacaaccttctgcttgtccaagcactgaagaaaagaggccatatagttgcagccactggaatgggaatacatgatccaaaaacactacgcgaggtccgtagttatcttattaaaactctaaaaactcatcgcactatttcaaagagaatatgaattgtaaatatagaaagacatatttatcatcactacaacctatgattcgtgttttccttgcacaggctgatgttagccttgcaatgggagttggagggaccgcagcagcaaaagagaattccgatttcattatactagatgataattttgctacgattgtcaaggttggtttattatatgcatggttgaaatggcgaacttgggcagtagcagtttatagaatgcatacaaaaatgatgagcaaacgttgaccttttggcagtttaaatcattttgataagatactagaggcttgtttggataatgcagtgtatcatatggtctcgatctctgtacaacaatgtccagaaatctatcctattccgcctcactgtcagtgtatcagcattggctgtctgtgtggttgaggttgtagtttatgatgcatttccccttaacgccgtgcaggttcaaaatgttatccctttgttacttcatcatcttgttatccagcttttccaagattggaaaccttttccctaacccagtttttgctttttcctgatgcagtttctgttggttaatctaattatcgacatcttaggagcattagctttggcatacagaccaagatctgatcaccacctaatgggaaagccaccggttggtataaggtacaaattctgaataggatcaaggataagatttgattattaagtcaatatagagttggcttagaaagagacattaatgtattgatgctgaaggttttgaagaaactgttggttttgcaattcttgttaaaacacactatctgttctaggtgaatatacacaaactgatagtacatatgcatgtgtacattttttgtttttcagagatcctcttataaccaagacgatgtggtccaagatgataattcaggtatgtagggtaaaatcctcgattgatcatgtgtggacgttaatgtcagattaagtatttcacaccttcatagtttccaaggagcaaatacaattccttggtgatattaaactaattaattatttagattagagacaaacacactggtttggagacctctaataatgcttgtgtcatgaaataccttcctccaggtattttacctagtgctctcgctggtactcataaattctgagaagctactgaagctgaagcatggtcagacgggcaatgccgaaaaaatgatgaacacattgatattcaattcctttgtcttctacctggtaatatctgattttttcccactcttctaattagagttcatatgttgatcatctctctatctttctaaaataacgcaggtttttaatgagtttgaaatccaaagtgtagaccaaaccttcaaagaagtccttagagagaatatgtttctcgttacaataacctcaactatcatatctcaggtaagtcctctttacaagtgaacacaacatttgtcttttcttatatatccctaaaccatatatactctctttctgttctttcatatcagataatcgtgatcaagttcgcaggcattttcattgacttgaaaaaatgggtgacgacaagtcttttggggttactcaggttctgctcataaacatcctcaactactttctttaattttttactcttcacattttttctcaatacgtaaatttaaccttttttcagccaagtcgccactcgctacccttacccagccatccaatatcatcgtaactgagatttctcttgccgtatggctcaattctcgtaagaagtaagaaccattcactcccaaagtctcctaatgaatcgcatatgactatcttattttagatctggcaagtagtttctctcaacttgcagttctcatctcaggtcaacttttgaagcatccctctagctttggtcgcttaggaggctgttgttctctgcgcgggtgtgcgtgagagattaaataatgcggattattgtgctgtgtatatagcatactacagtttattcagtcaattcattttcctcttgaagatatgtcgagtgaaatgcgtgaaagtcaaacatttaagttctgtatccatttccctttcaagctatgtagactgtaatgggtgacagtcatatatagtatatatagtaagctctgttcaatcaatgcacctcttcgttttcgattcatgaattgtttgttggatgttcctaaatctttggatccagctgattcaccgcgattgaggtggctttagttatcggtatccaccattccttactgctataggtcgatcgaatcaataacactacgacaattcgggctgcttagacagcgggtgcgatactagtttattcatactcctactcgtacaaaaatcaagaaaatttcatctccattcaaattaagaaaaaaaacagtaaacattcatataccatagccacaatcacattcgtggcggttttacactacacccgccgcacctgatctttgacttgatatttttatacaactgagtcggtttttgacttttgaggttgtggacagatctaacggctaatagaattcgagttatctacttcacctgacgcggcaaaatctcaaccgtcccttataaagctcttcgcggttaacattttctctcctctgtctgtgtgtactcgtggtaaattagtcagatttcgatttggaaccctaaaaaaattcaaaagacgatcctcttctcgaagaaactcgattcttgtggattcgatttcattaaggaattttgaattgttgcctgtgatg

SEQ ID NO: 33053 - DNA, 3003 bp, Unknown
  misc_feature (1)..( 3003): 2750-1469P.txt file - cDNA_ID_3064934; gDNA_ID_1620462; Annot_ID_157777
gatcgaagttcatatcctttaaccgcgtcgatggcgcgtttgagagagacgagtgtagggttaggaaggtcaaatgaaagcggagaagatgaaattgagagtgacgagagctttgaggatgataagagagaagaaagagaagaaaagaagaatttgaaagagaagagagaagcagataaaggaggaaataagagaagcttctcggcggcggagatcacgacggctaggtattgctccgaattgggtttgatcagaagcggattaagatctatcaaaagcacaaaacgctgcgttttggcgtataacaaatctccagccattgaaatgaagcagagagagagaagattcgattttggttttgaggttgaagaagagaggagggagtgagctacgaggttatgtttttggcgggaaacatattgccacgtcattagattgtcaatttattgggtcttgcttactactacatcataaggccattaatggcccaacaagagttttaatttggtgacgtggcaaaattgaagatagaacaaagattacgaaaacttcctccgcttcagatttttcctttctgcaagaattttcctgggaaaatcaggaattttctcggagaaaattctcgtaatcatgaactgtgtttctgcatttgaatttgttccttcaagtgctctatttccatgtgcacaatcatcaatccctgcgaaatttcttcacattttgagctcaaaagcctcgatttctcccagatgtcgtagtttcgcttcttcttcttcttccacaattcggaggaagcctctaactctagtatcttcaaaatcttcagacgcggaggaggtgtcagatacggaggacgaatggctgaagaagctaccagagaagaacaagccactgtattcgcatagcttaccttgtatcgaagcgtggctgaggaaattagggttttaccaaagtaaagacgatagagctgtttggttgattcagaaacctgattggcatgctcaactatctcttgatgtcactgatctctgcattaggtatgaagctgattgcttttgtagtttcattgagttcctgaagttctcagctctgagatgttgttgataaattcctgtttttagtatcctaaatgaatgatttcttaactagtttaagtgtttgtgattgtgtagttaaagctagttgtgttaacaatgaggatattgatgttgagaagaagagtttgtttttagcttggataagtataaaagtatagcatagtgtgatgaattaacctcttgaagatgattgtgaagtgaatcctagttcagtatttgtagtgcggaaccgattgttatgcggttggttgcatccgctgttggtgctatctaatcttgatgttttagtccaaggagttgagaattagaagctaatttaatgtctctgtgtatcaatccaacagaccaaataagttgatgcattgccatgttctctgatcatttcctttggagtttctctatgtgtaatcccgccaagttggactaactagattgcttgttatgtaggtacatgaaaagtgggccgggaaatctagagagagacatggaaagaaggtttagctatgcgttgagtagagaagataccgagaatgccatacttggaggaccttaaagaataaaaagagtttgtttgagtatctttgttcttaaactttgctttttcagtagtttctcgttatatgatgcatttgcttgtttgatccgaaaaccatttttatcacaattctttagcaggtacggtctttcaaaacttgaacaatgaatgtgaaaattatacgcatttggaaccagtaggtagataatcttactgcatcccacatgaagaacctatgcattatctaagctattactaatatgtgaaatttggtgtgtaggcatcggtgactttatttactgatgcataactttcacatcttctgtttcaaacctttagcaagactacatttacgttagtcaactcaaagtaatgagagaaaattaatacatcaaacttaaacatgagttacatattgaacacagaattaaaagtgatatgttactcttgatttatcaaataaagccttgtttcctgatactataaattctaagtttcttccgatatccaaaaccatcccaagcatctaagtctaacataaaaccaaaaagaaagaaagaaatacgtagaaaaaggattaacaagaaagatggcaaccaaaacttttctctcaatctctttaatggtttccctttgtgctgccatttttgtctctcaaggagtagctcatatgcaaacaccaccaacggttccaggacttctcctacctggcttacctattgatcttgtaaaatgttggtcgtctctcttcaatgttgaaggatgtgtgctcgagatcgccaaatcaattttctctggaaaattcgaaaatgtcgaagccgcatgttgcaaggcgttttcaaccttagatgctaactgttggccccatatgtttccgttgaatccatttttccctcctctcctcaaggacaactgcgctcgcattgtccccaactcccctacacacaactaagaacaagaattattgctggtctacgcttttaaattagtcattagctccaaagtctaataagtttcaatgtttattttgttagcaaaatgtgaactatatcttggaagagttctctttttatagtttttctcaatgacataaaatttcaatattttccttttatataataactcttataaatgtgttttgttggttgcacaaaagaaaaacattggaaccgaccaaaaaaaaaaaacattggaaccgaccaaaaaaaaaaacattggaaaatcgtacctcaaaatgcaataaccaaacaaaccttctcatatggatcctatagtatggttatttccggtttagttggttcggttctgtaccgaaattatatcgagcgttttaacgttatccagaacgaagcagagtaacgaagagtcatg

SEQ ID NO: 33054 - DNA, 3003 bp, Unknown
  misc_feature (1)..( 3003): 2750-1469P.txt file - cDNA_ID_3064981; gDNA_ID_1620463; Annot_ID_157826
ggctaataatattcatgccaattgttaatttctggtggagggttaacacttgtacataaatacttaatttttctttttgcagtttttgtatagatatccatccttatataaatagaaaaatataaggaaattgtaatgatttagcataagacaattggataatcacaaatgcattaaacctattaactagtctatatagaaagagttattagttacagctatactatttgtggtggcattaatatatagtaacttatttaagatatatgtcataatgttaaaaagaaatcacagagaaagctgttattttttttaatcctaaatttaaaactttggatattgagattagcctgtaatacatctttttccaaaaaatttatacaaaaatggccattaataattaatagtaatagctagttggacttcttagttcaaagtaattcaacattttttctaaaataaatcttctaataatagaacacgttggattgactaattaagtcaaatatgaaatatggaaaaggaaaaaaatccaccaacgatacaccaaataatttccgatttttatatatataaataaacatactaagagcaaaagaaaaacaaactgaaaataaaaaaaataaataaataaaaaaaaaaatccggccagataaatcgaatttatgtaataaatccgaccagataaactgatattattgtctttcttccgctcctttgtctctctatctctttctcacaattagattctgtgcttcttctgcgatcaactaagatccgatccgcgagcgtttcagacttcgatcagatccgattaagagaagcaaatcgggtcgggtatgactcgtcgatgttctcactgcaatcacaatggccacaactctcggacttgtcccaatcgcggcgtgaagctctttggtgttcggctcaccgaaggttcgatccggaaaagtgcaagtatgggtaatcttagccattacacgggttctggatcgggtgggcatggaaccgggtccaacactccgggttctccgggtgatgtccctgaccatgtcgctggtgatggttacgcttctgaggatttcgttgctggctcttcctctagccgcgagagaaagaaaggtatcttcgtttgatttctgagattaaattttttatcaaattccaaatttttgtaattgagtttattttgcatcaaagtcgttgattgcattatgtaacaagtggtgatctggtttatgtaacaagattttgatgtgtgtttgatattggttttgttgtaggaactccatggacagaggaagaacacaggatgttcttattaggtttacagaagctgggtaaaggtgattggagaggtatctcaagaaactatgtgaccactaggacacctacacaagttgctagccatgctcagaagtatttcatcagacaatccaatgtctctcgtcgcaaaagacgttctagtctctttgatatggttcctgatgaggtttgttccttcttcattcaaaaacaccatttttatttatattggagtggttacaaaatgtgttgagatactgatttaaaggattcagaagcttattaggtggattggtttgccttctacatttcaatatgaaaagttgaagtctgttggggttctaattgatatgcttgaggatatcattttgtagccaatcctgcttaagcattttggtcttctcatgggaatgtgatcttgaaatgtaattctctttctttattctgcttatgctgtgtgatttgtccttgtaggttggagatattcccatggatttgcaagaaccagaggaagataatattcctgtggaaactgaaatgcaaggtgctgactctattcatcagacacttgctcctagctcacttcacgcaccgtcaatcttggaaatcgaagaatgtgaatcaatggactccacaaactctaccaccggggaaccaaccgcaactgccgctgctgcttcttcttcttccagactagaagaaaccacacaactgcaatcacaactgcaaccgcagccgcaactacctggctcattccccatactatatccgacctacttttcaccatattacccgtttccattcccaatatggcctgctggttatgttcctgaaccacccaagaaagaggaaactcatgaaattctcagaccaactgctgtgcactcgaaagctcctatcaatgttgacgagcttcttggtatgtctaagctcagccttgcagagtccaacaaacatggagaatccgatcagtctctttcattgaagctaggtggcgggtcatcttcaagacaatcagcatttcacccgaatcctagctctgatagttcagacatcaaaagcgtgatacacgctttataaaagacctgaggaagtgatggtctaaaatgggatctggtttggggtttacaggttagttgttggtcacagtaacttaaataagtttttctttgttaggttgtttaacttgggtaggatgttttagttcagctttgatcattagggaaaagaaaaaagaaaaaaaaaagggagaaaaacaaattattattttttgcttacatttctttatatttgtatgcttttattttgactctaggatgcgttaattttcgtttaatctgtactaaaaattagaatttattagttttgaataaataaaatcacagtttgtttatcctctgaccaaaaactataactggattgaaaacggaaattaaaccaagacgaaccggatttaaccggactccagtgttgtaagagaaagtaaacaagttcccaagcgtttcgtaagtaaaaaaacgaatgggctaaacaattagtctaaatgggccttaaaagagtgaataacgtgtcataatcaggagcgttaaatttagggcgatgagtgtcgagagtgttcccgcgttcaccgattcactccactctttggttaaaaagtccactgtcatggaaaattaatcgcggtgatttacacagatg

SEQ ID NO: 33055 - DNA, 3003 bp, Unknown
  misc_feature (1)..( 3003): 2750-1469P.txt file - cDNA_ID_3064989; gDNA_ID_1620463; Annot_ID_157821
tgtgtattcttgctatataagacgtgcaaagtgactacttatttttgttttatatagcatgaacaagatgatgtatttggtttgatctgattcttgttttttttttggtaatggaatccagagaaattggaaatggagtaataaattcaatgttcttgccacttacacaacaagcagaaatagcatgtgagaatgtgaaggaaatgaaagagttgagtcaaggatacaacattgttggaagatctcaggttcttgatacactttcttgaaaaccctaaaataggttttttgatcactataacacgtttcagtttcatggatgtttgatgaatgatggaacaggggaacctagtggctcgaggcttgatcgagttctgcgacggtggacctcctgttttcaactatatatccttagctggtcctcatgctggcatttcttctcttcctaggggtctttgtggtgtaagctttttttatttttcctcaaattatctaaaacttttatctgtaatttaattttaatcaatcaaggtaacaacaacgattgttttgttttgtttcttttcttttaagttaacgtccgatccagcatgtaagaaatttaatgagttgatcaagggagctctctatagcgagaccattcaagtatatatatctctttctctatatatatcatgattaaagactcaattagaaaataataaaaaatcttcaatgactctgcaggatcatcttgctcctagtggttactacaaaatccctaatgtaagtccattcaccatttgtttataagaaaacttgcaaaatcaacaaataagtgattgatgatcaaaacaacaacataaagttttaacaaaatctttgtttttcttttatttattctcaggatatgaaacagtacttggaaagatctaagtatctacctaagcttaacaacgagataccaaaccaaagaaaccaaacttacaaagaccgtttcaccagtttacacaacctggttcttgtcaaggtttggtctcatcaaaaccatctagacttttcaactatcttctcattcctttcttgatgactctgttttttttttttacagtttcaggacgatgaggttattactccaaatgattcaacttggtttgggttttatccggatggtgagttcgaaactcttctctctgctaaccagacaaagctctatacagaggattggatcggtctgaaaacattggatgatgctggaaaagtgaagtttgtgagtgtacccggtggacatgtcagaatggcagaagaagatgtcgtcaaatacgttgtaccttatctccagaaccaacagcctgccgcacaaagcttcaaccgcaagaccaaggagcccttgcatccttaaaacagagcaaaaacctcaattgttatacttatacttagcaaaaaaaaattgttatacttgttcatgcaatatcgaaaaagcctagtgatgactttgtagaacaagaatccttattattgatatattgatatatacatacctatatgaattgtcgaattaatccgttgagaaacgacgaatgaggtcttcatcaccagttttcttcaagacttcaatgattatctcaacatgagaaacttccaactaatctcattttcttatcaagcatcggtttcacaagcttatagctagcagcttcccaagaaagcccatttataaattaactttggccaatcttttgcaacatcttcaatatacataaactaaccaatataatgcatcttctcgatgcttgttgaagcagtattgatcagagtcatcaataacttatattgtctgcttacagaagtgagtcaatgtgtccattgtaagtattatttctatctaaaaaatatttagagattttattctttacagaaggagcaaatttatttgtatatttagttgtcaaattaaaatttagtctatacattatacaaggcgcaagtttgtggatttaagaattatataaaaacttgaaatatatagtttttatgcattctcctcttgtgtaatacataaaccaaatatgagataggttaatctgtatttcagataatattaaattccaaacaatatttttacttgttataagaaggcaattaatatctctctgttaatggcaagtggtaccaagtagtattaaactattaatgcaatggaagagtactgttggaaattataatcctctatcacacattcaaacagatctcctgaaatcttctcttccaaacttgtacttctctgatccaaatgtaggctccaaaatatagacatttaccatttactaagtccacaactcctttcttgtctccttcaaaaatgactcttgtgtaaccatcatatgactccgacagttcggcattgccatgatgagagcttaaaaattcaccttcctgagcatttcaagtcttcactcccttagcttgacctgaaccaagataaaatgcctttgtcgtcccgtaatatccatcctgctttggacggcatcatagttacattcgatccatcctatttacaatgttattttagtattaaaaacatgacaataaatttgttgttaaacatattcaaatacaatatgattggatttataagtaattgtaatatgaaatgtccttagtaatatgttaaaaaatacatagatacacacacgtactaaaagaggcaacgcgggagatgtcattagaggaagaactaggaagcagagcgttcatgcaaaatgctaccaaaaacgttaatgcaatatctcaactaatcagcacagtccatttcatactgagaatgtaaaaaccaatcagcatcgtccattttttcatctaattatttgttaactcttaattggccacaacttccaaccacatgacgctctttctattccctttatatattcccatctcaaatgttcttggagacacaaaatatcataaacatataaacataaacgccaatcgcagcttttgtacttttggcggtttacaatg

SEQ ID NO: 33056 - DNA, 3003 bp, Unknown
  misc_feature (1)..( 3003): 2750-1469P.txt file - cDNA_ID_3064993; gDNA_ID_1620463; Annot_ID_157820
ctagaaatgtgattggctaacgaaagaagcacaataagttaacaagtgacagtgacaatttatccctcgacaacaacacacattcacatatatctttttattttattatttttctgtgtgtctttaaagtttacagcacaagtagtttctaaatcttataatcaattttcattgataaacagaaatttaaaatatttaaatagacaaataaatgatcaaatctatatttctatacaagagttaattcacaaaaatttgttgtgaaacaaactctttctatatttctatacaagagttaacatatttctatataagttattgtaaagatcaaaatatgaaaattatggtataaatgcatagacacatatatacgtgccctattaaaagaggcagcgagaagataatataggaggaagaggaagaagaagaagatggtgaagaagagagttaatgcaactgcaagaagatagtaactaatcagcaccgtccatttttgtcatctaattctttcttacttggccgcaacttccaaccacatcacacactctttctattcccttatatattcccatctcaaaagttcttggagacacataaacattaaaaaaagaaaaagaaaaaaactataaacataaacgccaatcgcaactttcttgtctttcaatgggagagaaaggtttgaagcggtctggtgttgcggtggtggttgcattactagccatggttcatgtctctgtttcagttccgttcataatgcttcatgggatctcagctcaatgttctaatgctagggatgctaacttcacacagcttctcactaacctctctggctctcctggcttttgcttgtaagtcaatccacaaaatagtttatgcgttttgataaccaaaagatcgggacatgtagaagaagagttatgtattcttgctatctataagacgataacgtccaaagtggctcaactatgttgatggatttgttctaatgaatccagagaaattggaaatggagttgccgattcatggttaatgccgcttacacgacaagcggaaatagcgtgtgagaaggtgaagcaaatgaaagagttgagtcaaggatacaacattgttggaagatctcaggttcttgatacactttcttgaaaatcctaaaataggttcttgatcattatttacatagtgtttaagtttcatggatgttgattaataatggaacaggggaacctagtggctcgaggcttgatcgagttctgtgacggtggccctccggtttacaactatatatccttggccggtcctcatgctggcatctcctctgttcctatgtgtggtgtaagttttttttataaatcttttttctctaaatattttttctatgattttaatttaatcaatcaatcacagtaacaacattgtctttttcttgttaaagtctggtttattctgtaagttagcagatgagctaatcaagggagatatctatagcgacttcattcaagtataaatctctttctgtcttttttaggattaaatcctcagtagttacaaattaattaacatatatctttaataaccctgcaggatcatcttgctcctagtggttatctcaaaattcctactgtatgtctactcaccaaatatattttgatgataaaaaaactacttcaaaatttgagatatcacaaaatctttgtttttgatttatcaggatatgacaaagtacttgggaagctctaagtatttacctaagcttaacaatgagataccagaccaaagaaaccaaacttacaaagaccgtttcaccagtttacataacttggttcttatcaaggtttggtctcctaaaaaccatctagacttttcaattatcttttgattcctctcttgatgattcggtttttgtttgttttacagtttcagggcgacaaggttatagttccaaaagattcatcttggttcgggttttatccggatggtgaattcgaacctcttctctctgctcaacagacaaagctctatacagaggattggatcggtctgaaaacattggatgatgcgggaaaagtgaagtttgtgagtgtagccggtgaacatatcagaatggtagatgaagatgtcgtcaaacacgttgtaccttatctccaggaccaaccgtcttcggtgcaaagcttcaaccgcaagacgaagcagcccttgcatgcttaaaaatagcaaataccacaatagttatacttattcatgcaatatatgtcgaaaaagcttagtgatgattttgtagaatccttattcttatagaaatatatacatacttatctgaaaaatcgaattaatcagtagagaaacgactcatgagatcttcatcaccacatttgtatcaaggcttcaatggttttctcaacatgagaaacttccaatctcatttttttttgtttttgttgttgtagaagtctcccaaaatgactcgaagttttttcctttttggttctttagtctcaccaaattacatattatttttaaataatctaacaattctccaaatatcctaaaaactaattcatatctctccaaatctaaaatttcctaaattccaccaaattttctaaaatcatgaatccaatacactccctgattcaaatctctccaaatctaaaatttcctaagttccaccagataatgaatccaatacacacccctaagagaggcaacgcggagatgtcattagaggaggaactaggaagcagagcgttaatgcaaaatgttaccaaaaacgttaatgcaagatatcaactgatcagcaccgtccatttcaaactgagaatgtaaaaaccaatcacaatcgtacattttttcatctagttcttcgttcttggccacaacgtccaaccacatgacgctctttctactcactttatatattcccatctcaaaagttcttggagacacaaaatatcataaacatataaacgccaattagaacttttttacttgtggcggtttacaatg

SEQ ID NO: 33057 - DNA, 3003 bp, Unknown
  misc_feature (1)..( 3003): 2750-1469P.txt file - cDNA_ID_3064997; gDNA_ID_1620463; Annot_ID_157818
gcattgtccctttcccttttcgtatccgccggaaaaaaataacgtctttttttttttcttccaatctctctgtctctctccccaattcccagattctcatgtaagctctctccaaggatttgatttctgtataatgtttgcgaattgagactaagagccctctcgatttcgatttttgttcgtctggatcctttgcgttaggttttttcttctcgtataattagggcttccgatttgtttacccttagttcattttctctaaattttggtttttgattgatgggttttcttgatttagcaatttttaagatttacttgaaagattccgtaattttgttctgattcggattctttgatctgtgctcactagctctctaccaaagcagcttccttttctgatccctagtgttcaattatgtgaacagattgtttactttagcttctcttccttttcattctagttttgcagagattttaggaggaacatgattgtttgaattgggagagacattggttcgtgtaaaatgcgggtgcttggtttgagctcaagcttatgctctggtgaggataaggaagaagaagagattaatggagaaggctctctcacgcctgtttatctcaacgtctatgatctaactcctgtcaacaattatctctattggttcggccttggcatatttcactctggcattgagggtaattgtggcttcttctctattacttacttgacctaactaaatttttctttgtcattgctttctatttgctttcatccatatctggtttatcatgttatcaaagtacttctagccttgaataggaacaatgatattcctcaattgttctccacaagttgtgatttattattcattaggtgaaaatggtgtttattatattagctatggaatacattattagaaggaaaaagtggaacaagttttgaggaatctagaatggaatgctttttcaaatcctgccttattgtctgaagcattctctttcaataattagaacttgcctgatgagttatataactgtacttctgctgaaactgttattgttgctaaatgttcatctaatgtggagttttttttcactttgccatgtgtactactagctcatggtttcgaatatggatatggagctcatgagtattcgagcagtggggtatttgaggttgaacctaggagctgtccaggtttcatctttaggcgctcagttttgttgggaaccaccagcatgtctcgctctgatttccgctccttcatggagaagctttcgagaaagtatcatggggacacataccatttgattgccaaaaactgtaaccatttcactgaagaagtatgcttgcaggtaacaggaaagcctattcctggatggattaataggatggctcgagttggtaagataactttcttattccagcttattatttctttactggttcttgttgtttggcatatctttttacatggttgcttgttcttgaattttttcaggttcgttctgtaactgtatccttccagaaagcatacagctctcatcggttaatcatcctgaagccctcgagttctctggtaagttaatcatgttcgctcttcttcacctaaaaaaaactgcaataggcatttggatttcggataaaccagttgtgtttcatctccattgtagatgataacgatggatcagaagaatcagttgcatcttctgtgtcatacgaaacagatggagaaggatcggatcatcatctcataacagcaccaaacagcgatattgcgtatctacaggacagaccagtgagacttgcccgtgagctcctccaagaaccaaccgatgatacatctccgcagtacttgttgaagcggtcctgatcatcacaagcatcaacaacttgtgttgtctgtaaacagtgaggcaatgggtccatatattgagtattctttggatctataagtgtaaaaaaagatttaagatttaaatcagaacccatctgagatgttggattgtagtgtaagatttagagacaaatggtgtgacaaaaattgtgccttcttcttctcccaatgtgagttcacatttcagtgtcataattcgtaagatttgcgagactaataattagttttgatttttctattcaatttacagacagttaatggttatggattttcagacattctttgttcttcggttcactcttcgcagctatattttattggaggcggtaacataacttattgggctagcctgggaaaataattatacattgggcccattattttaaataaccttcatcggcccagtttgtgtgtaaacagttatgatcagatccagaccgtccaaaaatagggaggggtgactctcgaacacgatgctctgaagactgaaaaaggcgtaaacttttttcacctggctagggttcttggtcgtcgttaactggtacgtttcaatggtctctctgtactatcatttctgcgaaatgggtcttctctttggaggctaatcgacgttgtgcttaatctaattgctcttttaggttgtttagaggaatatatcacaggttttcaattagattgatctgcttagttttgtaatcagtgtaggttaccagtgaatcatgaacttccgttagggttataagctctctgtttcttttcctgacttatcaatgtcactaatttagatttgatgcgtagtttagcttttgaagatcagggaactgaatatatctggtttaaggaagctttgaattttctgcttgccatggacattcgacttatcagtatttttgtacattttggttaatgtttatcgaattggtttgatcagtctgtggattttaactttacaagttaagatgctattcttttaggtctagttgataggtcatggatttgttgttatatggagtctagacattttgccactgctttagtgttcttagcttctaagggtttcgttgatatattgtactgggtttatcgtttccaggcatctagtatg

SEQ ID NO: 33058 - DNA, 3003 bp, Unknown
  misc_feature (1)..( 3003): 2750-1469P.txt file - cDNA_ID_3065005; gDNA_ID_1620463; Annot_ID_157811
gaagacggaacagagcgttgacgttaacggtggagagacgtttccgtttgtaacgtcgaatttaacggaattatgtgactgggatttaacggggtttcttaactttccgcttctgtcgccgttatctcctcatccaccgtttggttattcccagttgaccgttgtttgattagttttttttgagtttttgaacgatgtgtatgctgacgtggacgtacacgtaggtgcatgcgatgaaaaaaacatctatttgttcatatttttgcgtttttctatttgttcattctttttcacaattcacaatacattatttcagttaatgattacggataatttagctttacgttaatttattatgagtactagaagaaatcggagtaattcaacatatagattatactagtataaatgtcaattgcattgacattaattgaggaattatagtagaacctagtataaaaagaatgattcaaacatgagatattgaccggcgttatgtgaagttgttcagacaataaatgcataaccgtgattctgtctgaacaagtcgattcttaggataaaaaatggataaacttagtcaaaatatttcccacgtggttagacttttgcttagttacatgacgaatgtgaaagccatccatgcatgtatccagaagaatatatcttgcacggcgaattctctacgtattttagtattttagatttgacgacatctaattttcttttggtatttcgggtttgacatctaatctgctaagaaccttttcttataatcgaagaattttgttgggtcgtcttgtaagatattattttcagtacacactatctaatcattcatcaaggtcactaatgggccttgtggtctaaactttgaatatatactttcacctatgaaatccagaagttctggctgggtaagttctaaaccaacctatcttatacatcgaaacacaaaagataattggaactacaaacaaactttacccaaaaattattagtttgtttttatctccgtagatgaaattgggttttctaaatcgttttcgaagatgaacgctaatcaaacaaaagtggtataacacagtttgttacgaaattttgttaggaaaataaatgaagtatgtgttttgcgtcgacctcaaaataaaatacatattaaatcttgcatgctaatattattgtatagaataccaatcaggtaagaatcgctcgtcatcatacgactattcaatatccaaacatatttatttggaaaacccgaccacgaataatggttagctttacatcattatccacacatactcaaatggttaaattttctagaattgtaatggaagacacaatgttatcacgaatgaggatcatcatgcacttcaggttacctaattatcctacgtggacaatacctaatccttccatgattttcaattattgcagataatttttctgaacgtcatcatttcccataacgaataatcatttcctcaatcaacgcaaacctaactatctatgtcatttacatgtttatgtggtaaaaatctgcttagaataagtaaaccttcacatatatattgtaacaaaataattgaggttaatgttattcaatgcgaaaaaatgtaaacacttgctaatgagtcgtaataaccctatattatttttccaaaacatgtttctattgaagttacaaattaagtttccactctatttggatggagcgtactagtcgtagacacggagagcttccaagtccatcggatcaacttatcaaacttatcgaccttttggtccacaacaagatatcttttgtccatcttcatcatggctctcgcaagaggatgggttacatatatggtttgctttattgcttaatagggattaatttctctaatacttttgattagcttttcgcaaacatttttcagcataaggacgcatctgacgtacaaattaaaaatccaaatgaactaaaatacttttaaacagaaaggacaaggaatctaagccatcaaggcccatctccacgtagctccagcaacgacaagatgctttattatcccattctcgtggatacttgtgtgagatacacgcttcagataaatcaacggacgaaattgtaaaaagcgtgaggaagagagagcctctttccaaaggagagggattggatcattgagatatatccgtttatccatccttgaactcctgaagattccttcgcacagacaactctctcgaacatgttaaagattctctgatacctaactattgattcctttttccctgcatttttcgttcactatttttgcttataactttttgtactaaaattaaaaatcatgccaccatcctgtatttcatatccaaaagctttggattattttataatatatcattggcttgatgtgattgatatttaccaaaaatctattctagtttctttttgtaacaccaaatgttatttaaaatttgtattggaaaaatgattcatttatataagttattatatccctcttaaaaattgtataaaatctctaagacattattaattgtaaaagatagacacaacacgtagctatatgtctatatccaaaaataaaacacgtagctatatgtaatattataaaaatgtacatatattattagggttgtaatatttggtcggttgaaaattgaaatcgcagctcaattggaaattcacgtgtattttgtctttgattgtaagatattaaaactgttcttcgctttccttttctcatttctcacttaaccactcgatccactttaaaccacacattataagtgtgcctcaaaaaaatctaacattactctctcaacacatctctctttcttctccatttccttcttctctttcattctcttatttaagatttaaatctgctcaaatgcttgtaaacaaatttcaagttctttaaacgatttccttttcaagaaaaatccttctccttcttctttttaccacatagatcttcttgatctacaatg

SEQ ID NO: 33059 - DNA, 3003 bp, Unknown
  misc_feature (1)..( 3003): 2750-1469P.txt file - cDNA_ID_3065013; gDNA_ID_1620463; Annot_ID_157805
agatcaaaacaatcaacattgatttacttttcttaaattactgttactgtaaattacatgaaaagaaatgaaatccaaaagacgaaacaaacaaacaattattacaagagaaaagagagtagctagctacctttggagattgaagacaacacaagacaagactggtgttgggtttggtgatcatttaaaagttgagagacgaggaagtttgtccctcagatagtaaagtcttgctcttctcactttcctgtgacttaccacttttatctcctttatgttgggagagtatctgttaaattcaaaacacacatcacatcagatacatattctaaaccaagatcaaaacatattacttgattgtgtagattagtatctgttcaagatcaaaacatatcagttacatattacttcattgtagaatcagccaatagtactggaaagttcatagggactagtatgttatgataacggctagactctagagtgattaagattaaaggttggtgcgcgtttctgtagtaaataagcacaaagcttggtgacctataatgctaagacttccagcatttatgtactagttcctatagtatcatacttggagtagcaattatttccttttttcgtgaagaaagctaatacatatgatcagatatagaattgtaaatctcttaagttctcaagaagcgaagactatgactgttcacgataaaagaagctaattccggtttgttttagagttcctaaaatctctctcaaagccaaaagactccttaacaaggtcaaagacccttaactctgactatctaatactatttacatttatacttatcaatatacccgagtaagtgtgtgataataggatagttaaggaagaataaacttacatgggaaagacgatttcaacaccaatgcctgcaataatcctccggatacggatagtagtgtggatgcctgcattttgtctagacatcacaatacctttgtagatagatagcctacgtttgttctcaggaacttcctgtaaaatcaaacccaccatgtcgtatcaaaatcttgcagttaaatgcataaattgcataagattatacggggacaatgagttttaccagtttgatttctacaatatccccagtcctaagtccaggaaccggtcttacagtctctgcaacctcaatagctttcttgttcagtagctacagaaacaaaaagcaaatcaacatttcatttctccaatgcctaaaagataactgatgatttaagaacaggagccaaaacaactacagtatcagacatgtataatcagattcagagccaaaacaaaacactagacaatctcatagaatcacattggataatgaactaacccccatgatatctccgagcttgactctcgtcttccacggaggtttagcttcctccgccgcaacagtggcttctccttctccttccgcttcagtttcaacagcattctccacaacagcctcagtttcaccttcagtactctcttcagctttagcgataaactcttttctcttcttggaatcgatggcgaaaccaaaattggagctcgaatgattgagaaaaaccctagaaactgatagtcttgagttcactgatgatgctcgtggtagaattgaagaaacccctaaattcttcgacgagaaagaaggggttctcggtatcatatgcaatgcctggttccataaatggtagataaatacagaattcaaagaagcataagtatgaaaatgtgattgagcgtgagagagtgaagaagaagaacctgaggaagaagatgagagctcgtcgccatgtttgcacaacccaaactcgaaaccagagtaaagaagagccttatcgcttatccgctccgtgtatttcaatttatgggccatttactaattttatgggcctagacatttaggcccatattcaattgatataacaagaaacccattaccaaagctggttctaccagtctaccaccacgaaccaaggcttgtccaagtacactaatgtagaaccaaaaatggtttaaataaagagtttctgttacaaacaaatgtatgtttatgtgtccttaaattgatagctctaaataatctactttgggccttttaaaagttatgattgacgaataaatttctgctggagttgaaatattattctatgtgactatgttgtatattcaagtcgtctacatgttcacgttacattgacttacaccgcaagcgatgaaaagctattatatgttagtttaatcagaataccaaaaagataataatcaaaatattccatcttctttctttgtgaaacgaatatatattctcttacaggtggtttaattaaaagcttgacaacagtacgtaatattagcatacatataaaaagttacattaattggatacgaaattttaatctcctaaagatagttattctccgattgtatagaatcaaaaaagaaaagaacaaaaatcgacaaagaagaagaaaaaagattgattgattcttttgtcctccacgcatctctctgagttggctcggccacgtcagcattcaaacatcaaaaccaaaacgcatttaaatgtcgaaaagagtgggtccctttttttcttttttcttaaccgtgtcattgacaaaaagagcacttaataagccaaagccacatagaagaaaaaaaaaagaacattcacgtctctctcgtttttttggccgacgacgatcgctgaattgactgccggagattcctttaatcgtcagattctcgttgagggataatgaatcctgaatagtaagaaacttgtcttctcgttgtttcatgtatctattgtttcggatcgatccgcgttttttattttttgatgtgtttggtgatttggtttttgttcgattttgctttggatctttgttggttgttaggtttgtgaattgaatctacctaattttgctcgtttaaggtattttgtattagaattttgtatagatttggattttcgttccatg

SEQ ID NO: 33060 - DNA, 3003 bp, Unknown
  misc_feature (1)..( 3003): 2750-1469P.txt file - cDNA_ID_3065047; gDNA_ID_1620464; Annot_ID_157851
tttatgtagtgtaattgtaaatgttagatatgtaaatggggtttggagaagttcactaaactaaaatacttgttaattattgatgatataatactagtttggtagatcgaccctattttgtcaaaaaaaaaaacggtttggtttgtttgaattgaagtacctgtgcaatgtgtttggcagatataagctcaaccataacaaaggaagcatgccatccttgctttaacccaaagatctcaagtagtccatcatcggcttgtgcctccacaaaacctctctgttacgtacaacacaagcaaccgttaataagaaggagaattgataagtagatttgtgaagtgacgaaaaaatgagctttgttttactttttcaagataatcttgtttgagatttccccaagggtttcttccacttccatagctatgtagattcaatgcaacaactgctcttacactgtcccaaaaacaagcaaacacacatctttcattagaaacccaattatgagatttaaaagtgttctgtctcatttgtgttcttgtttctattctgtagataccttttgggaactggtactttctcccactcggatgagtccaacttttttatatgcaatgtcataatgttcttgagacccctaaaaccagataattacaaacgtgttaagaccacaatttgaggttgtaagttgtaacatttgttgtcttggtgttagtatataccttaaacctgggtcatttatgcagtgagtgaggaaccaaccctgagagcaaccatatcccgagtatataatctgcaacaacaaaatgttagctttctttcttgatataaaaaaaaaagtcttagagaaaattatcattctcaagagaatttggtaaaaccttattggcgatagggccatttgcaaggtaaggcttttcgttgcgcaaatggtgaaaaccgtaagccacttgagcatccatacctatactaaagtaattgtagaagactccttcatagccattcgtcgatggagggatctctccctctatctccaaattctgcaacacaaaaattaactcattaaaaccaaagactaataatcacaaaagaatttcaattttgtgtactaatgaaattataaacctggtcaatgtaacattcttgtgtagcctttaaagaataaggaggatccacaatttcaccagaaggcattgtaatcagaatattccaactacatcaagatttcaacatcaaaagattaagcagagagctcaagaaacaaagtgttcatatcacgctttttcgcggtactaattttacctatctaaacggcttataggagcaacacttgctctatgaagtgttcgttttatcgcagatttccacgcaaatgggaatgaacctccctaagaaaaccaacataaaccctaattagaacagagtattttataagattaaagatacaaaaaaagacaataagatctctttttcacccatccgaaacttcttgaaagatcgtttcccgttccgagtggcattatcgaaaccggaggaacgggtaaccggttttgtaaattaagttcaccgagacatcctagaacccaaccaacggttccatctccacctgcaacctgtaatgagtgatcaaaccagtggcaataacaaaaaaaaaaacacattttcaaatctttgattgtagatcaagcaatggaaaaaagtaccacaattctcatcttttcacgaatctctttagcacattcgtctcctcgagacgcaaatgcctctaagcatcccaatccatatcgaataaactcattaggcttcacttccgttaaatcatacacctgttcttcgctaataagattctggagacgttctttaatgagtggaccttgacgaccaccgcttttgggattaacgaagaccatcaaaggaacttcaggcgtcaacgcgttgttttctaacggtggtgctacagaggaggaagcgtcgaaggaatcgtctttacgaagaatgcaatcgcgtattgcaatgcggagatattgaggaagcataactctttgacgaagctctgctttagagactcttatgctcgcgagattgaccaataaagagactttcattgctccgaatgagtcgagagatgaatgtcgtggaatcatcctcgccgtcaatgaatcaccaatcgacggtgattccatctctttctctctctctctcgctctgccaaaaaagatcgaaactttttatcttcctgaagaatcagtatatgaaaaacagaacaaattgggaattctgggttctttgtgaaaagataagaatctttgttgttgttttttgatgaaagaaagaataaaatctgaaaacgaaaaattcgttagaggagaaaaaggaaaccaaaaattgaaaccgatccgagaggaagagatttgttctgatttttctgtttgttttgtttttttcgaccgttgagcttattttcaggacaaataaaaaccgttcccttctcattaactaccaactttttgttatttatataagcccattgggcttttataggcctgttgtctgtttataaaagcctgtagagttaaatctgcaaatcacaaaggaaaacgttaatggtggatctgagcactgtcaatgtcatcaccaccgaagtagagttgactccactcaacagaaactgaaactggaaagtttgagacttttaaggtaagctcatcttgtattcattgtctatgttttgcattttttcaaaggttaagtttttagggttttgcaaacttgaattctcggaaagacgaaaacttgtaactccgattactatagacttttttctgggaatccgatttggggaaacttgaatgtttacccaatttgacttctttgtaagctaatatggtattgtcttagatcagagcaatgcacatgtgatgttatatctgagatcatggaatttaaagaagaaactttgtatcatgagtaatgttgatatgtttagtgatgaaaagttctcagatg

SEQ ID NO: 33061 - DNA, 3003 bp, Unknown
  misc_feature (1)..( 3003): 2750-1469P.txt file - cDNA_ID_3065059; gDNA_ID_1620464; Annot_ID_157845
gcatgctcatcatattatttatcaacgatacattctttctttatattaatattggctagcttaaaacttataatacttgttgagagttacatattagttatcctagagaaacaactcaccaaatgtgcctttggattatacattctctttatctattttatacatttttcgaaattggaattattatggagacattagacatatatgaatattttgagttatacttattttatattttttataagtagagttacacttatttaacaggttagcattacgagttcaaaaagaagaatttagttttgctgaaataaaagcttgtgtttatgtctttaatagctcgcacaccacctaaatgggatttaaacttagccatacaacgatgataacacttacaaaagatcatttatatatacgagacggatcccgccagtagtatcgggaggaacgcgagaactgtttatgacattgcgacctacacttgtttaaacatcagataacatatgattaatagtctaaactcaacggtttattgaaacagttagtgaaataggccgaatttaacgtgaaaaatacgtaacagaacgttgattaatagttatatatatgtggccgacgcaaagcatgacgttttctgcacgagctgtcacgcaaggtgacgacgtttttaatcaaagtgtttagggactataaacgtataaattaatctgttcgatgttaatagttctgatgccaagatgcggttcggttttctaaaccggatcgaaagtgataatttttaaaaacttaaaccctaactggctaactctttcactgacgacatacataacacatttcactgactaaacttattttgattagtgtaataaaagagtaaagaactccagtattggcgtattgcttacactgattctgtcatctccacattatttatgtcaagcggatatgttgggttcctattatttcccttttatctagtttataaaactgttatgttattattgttatgatgtactatataacatcctcgtttgcggtctcaaaaaaaaaaaagacaacatcctcgattgtggtggaatctgttccgatatattattggttaatttttgattgaggcgaactaattatgtaataagtactcttcttttctaaactttgaatcatatatagtcaaatattgaaaataataaaaaagaagatacagaaaatttattcgcacatgattttaaaattgacgataaaatcttgagatggggtcaaaatacagtgcattttagtgcccaaaacagcaaaacaattttgcgtggatctcatgtcggaagataacaataaagataaatatcattggctatgtaatatatatagatagaactgtgatataaaaatctatcgcaatatttctattgtacaaatatgtttcctctaactctttcgtatacgtggatagataaggattttgatagtgttgccttatatcttttcttttcactctctttttaagtaccaaccgttgcgtttactttgttcttccttttggaactagaccctaggtcaaacgggcctgtgtaaatttttggattatacagtttttagccggtaaacgaaaaagaatgtattttactacctaagaagaacatatcagaaagcaaacattataaaagaaaatatcgtataagtatacttcatcatttaagattattgattagtaaaatatatatcagaaagcaaacattatatcagaaagcaaacattagaaagatttaatattttgagagaaaagataaattataaggtatgatcttatgagaattgaatctcgaacacgttgctttataacacactacaaaatgtatatttttattgataatatattaccgaatcttcattactaaaaccgcaaaaagaaatcttaagtaaagctataccttatgatttctcgaagtcaaagtttctgtaattagaaagaaaaatcaaatttgctttcatgccgaactgtagataaagatttctaaatcatgccgaccatactgtccattttttcaatattatttaaaattccatgaatatccatcctcaaagggccctgtctagaatacgatacaactagtatataataagtctacaactacgtaacggagttatcattctaaaagataatacatatttgacaaaataaatagaaaattaaagtttttaaaaaaatatttgtaaaatttatgaacatagtggtcatttggtcgagaaagaagattttttttttcttttaagatgaaaaaattgtatgggtcattaatatcatcttattatttaaagatgtacaagctttagcttatctcatttaaggatgtacaagttatatgcatacacacgcaaaaataaaaataaatcaaagtttaatatttagtttggtgagaagaatttgagtcattgacataataaattttgaaatcatgtttgaaaaggagactataagctagtatcggtccctagacgaaatgatgcctcaagaacatacgaagtttattaattaaactttatttctattcattaacaaataaaacagccaaaacaaaactaattcaataccgacatgatagataaaatccattcaaaacctcaaacaaatttgttttggagttaacagaaataaaatattttgaatttgtagatactcctacatgaaagaaaaatgaattacgatatcaaggaccagcctaattattttattttgttagcctaattttcatttctacaaaacatatctccatcacgattttattaaaacaaatcccataattcgattttattatgtggatgtcatgtttacacgtgtcatattacaattcgttaaaatacagtgtctcttctctgtccgactgggcatgacagatcatccaagcaaatcaaatacccaactctcacacgttctcaaacaaaaacttcaaagagagagagagagagagttttgtgaactcaagaaaataaaaaaagttatagttaatg

SEQ ID NO: 33062 - DNA, 3003 bp, Unknown
  misc_feature (1)..( 3003): 2750-1469P.txt file - cDNA_ID_3065076; gDNA_ID_1620465; Annot_ID_157892
catattgtatgaatgtaattactatgatttaagggcactgcttttctgttttcacgttgttttcgaaattgctattgcgtgtgatatctgtgttggaccaattattgaaaaggacaaggctgactctggtttttaatgagtagtccccatgggagttatgttcatttaccacacatttttttgtatagtatagtatgagtttttatttgatatcttttatcttcggaaaataaatggttcaaattgtttgtctaaaaatgcacacatgaatatcttgtggtctcacacaattgtaggaaacaaattaatatttgttgcgaaaataatgttattattttatcatacgaaatcctagagaaaatggtggcaaaagaggcaaagactaaactaatgaatttaaaatatgaaaatgatggaatgactggtttaccaatattacagtatattgtaattttataaaaacgaatcctgaagaagagggcaaaccccaagaccacgcaaatcagtctacaaatatgaaaatttccaataactagaaaaacatgtgcatttatctttttccatcattcggatttttacaatggaaattttgaccactgagcgcaagtgttatagtattttattattatccaatattaatatcattattcggatccatgcattctatataactatgtccaccatcttacttgtgtctatgttgcaacttcaacgtcgtatatatatagggattgttgtcacgaatacaatgctaattaaggaagattgtgacttctcggaaaatttagaactaattaagagtggaactaaaatgccaatgaaaatagcctaaatcaaaggagaaccacaaatataaattggaagaccttaaaaaacaattaaacgaggacgaaacaaattttggaatcatcaattatacgaaaaaaagaagaaagaaaaaagaggtttcatgaatcacagtagtgctgacaatcttcgaaccatttgtgggtttcatacaatcgatcaccaatagaacaaaagagaaacagaggaacagaaagaatagaaggagtgggaagtgtatgaggaagctgtgtccgaacatagacaaagacgatggtctggagacggtgttggaagttccgataccggaggagatgttttccggtatgggcaacaacgttgcacttaggtggcaaaatatgatgacgtggatgaaagctcaaacgtctgataaatggtcgcaaccgcttatcgccgctcgtatcaacgagctccggttccttctctacctcgttggctcgcctcttatacctctccaggttcaagtcggtcactctgttcataagcccgtcaaagattgctccattgtaagtcattcaaaatcaatccttatgaaaacataacaaagatgttgaaaatatgattcctcttttttttttctttttttcttttatgatcaaaacccaaaaaagtcattaccctgcttcgtaagtattcaacataaagttgttaatccatgtgttgtactctgcaagtctgcattacattattcatcgtacacagagtcatcaacttcagtttcattgtttttttgcttatgaattacgattgcagcaagcttcaacggcgaaatacattgtacagcagtacatagcagcgacgggaggaccacaggcgttaaacgccgtgaacagcatgtgcgtcacgggacaagtgaagatgacggcgtcggagtttcatcaaggagatgattcgggcgttaatctaaagagcaacgacgaaatgggtggtttcgttttatggcaaaaggatccagatctttggtgtttggagctcgtcgtctccggttgcaaagtgatatgtggaagcaacggtcggctttcatggcgacattcctctaaccagcaaactccggcgtctaccggaacgccaagacctctccgccggtttttacaggtccaatccggttattgattttttttttgatgtaatgtccggttctcaaaatgttgaaccggtggtttatttattgtttgagcaggggttagatcctcgttcgacggcgaatctgtttcttgacgcaacgtgtatcggagagaagataatcaacggtgaggattgctttatcttgaaactggagacgagtccggcggttcgagaagctcaaagcggtccgaattttgagataattcatcacacgatatggggttattttagtcaaagatcgggacttttgattcagttcgaagattcgcggcttttgagaatgaggaccaaggaagacgaagatgtcttctgggagactagtgctgagtcggtgatggatgattaccgatacgttgacaatgtgaacatcgctcacggcgggaaaacatcggtcacggttttccggtacggtgaagcgtcggcgaatcatcggagacagatgacggagaagtggaggatagaagaagttgattttaatgtttggggtctctccgttgatcattttcttcctccggccaatttgcagatcgaaaaatgatttagctttttattaaaaatattgttattcgtttttagccgatatcataactttttgagatacattatcaacacactcgtgcaactgagatattcttgacacaatttttgcatttgaaattggcaattttgtactactcatatagtttgaagcttcaattcactacaaaggttattactaattgtgtcgacaaatccagcagatttaataatgcccattccattaaatgttttttagtttaataataggatgatcatatgaccaaaatcgtaaataagggttaggggtaaacctgtcatttcaagcttcccgcccatgggcgctactcccaatttaataaaaaataagaaaataggcgtaaatatgagagtgtgttttttcaatataccctcggttttgaatttgctctcaaaagcgacggagacgactgtttggctcggtgatttctcccgccgtttgggtttttcttaccggaatttccttctccttcgatg

SEQ ID NO: 33063 - DNA, 3000 bp, Unknown; identical to SEQ ID NO: 1907
  misc_feature (1)..( 3000): 2750-1469P.txt file - cDNA_ID_3065081; gDNA_ID_1620465; Annot_ID_157889

SEQ ID NO: 33064 - DNA, 3003 bp, Unknown
  misc_feature (1)..( 3003): 2750-1469P.txt file - cDNA_ID_3065085; gDNA_ID_1620465; Annot_ID_157885
ctttaattggtaaaaaagaagaagataaaaaacagttcatataatacattatcaaatacgaagtcagaacaagattaagatcgtatcacgtaagacggagatcgactttcttcgttccagccttgacttaccatataacaagttaaatatatttgtctcattagaatcacgggattaatgttacgtaactacggagatagcgtgataagaaatttggttacaaaacattgtatataaaaaaactaaatagagctagttaagtttcaaatctaattttattttttgattaatttgatgatttccttccatagaaccataaataaaattcaatcatttcctctattatgaaatttaattatatattttgttttattagagagcaggaagaatatattacgtaatatcaagaaaatttagtcataagaccatatcataataagcggaattttcaacaacaaacatccaattttgatttactattaactgattattttctctgaccggagtgaccgccattatttagaataatgttctttgaatgaatcaaattttatggcacccaaaagacagaagccacggcatccgtttggcattttatagtgatcttgcattttataattttgatttgtattttcttataaccgctattataagtttaacgtttaaagctctgtatgttcacctgacaaaaatgataagtaaaaaaaaacaataattttcgtgaatctcaatattttcattggtggtcgtaaagccatgtgatggaatagttaccaacgtgagtcgtgatatatgggattagaaaatgtgaccaattggttaccagcaatcaaacaaacgataatccatggttgatgaagaaagtagggttaggtttgtaaaaaaaagaaatggttgtgtggtgatctaataatacatgggctataagtttataattgcattcctgcttattaaggtactttcatcatagaatcaaaacagttactatctttcttttctcctcactttttgtttttcttcttcctttttcgatagaatgtctgaatgtgtatacaattcttttcaccattggaatatgtgctggtcaatattaattactgatttacataaaatataatatcgggcatgtgatccaccatctccaacgtgagcccgatcatgtggtgattaattggtcatttttctatagattcctcagaagatattttatgaaatacatgatcataatattgagttgtatacgacaattgagggggtagctagctcttacgatggaccaatcatctctaagaaaactatatatataattaaagtaaaccaattaattacgattactaaatactaacaaacaaaaccatatatatagggaacgcgaaaaaaatattagatatatatttgattggtttaactttgaatttttaattataacccaaaaaatactcatagttaatttcttttttggtgatatctgtttactttttactctacttcacgttttttttttcttttactctacttcacgttaagttagacaaactcttgttccatttttcattttatacaaaataatataattacattactaatatatgtatcgttatgctgctatgttactcaaaatgtaaacaaaaaaaagagactcggactggtctttacgccagatctaaatagggtcaaccatcgtgctatgcactctgctcaatctgttaaaaaaatacagtctacatacaccgacaataaggtttgtataatatacattatctcaaaaatcaaaaacaggaaacttgggcaaaatctttgaaattttaattatgtatcgttcctacaagttttttttttttaaatggattcaatatgtaacatgttagtcgagtcttaaaaaaatatcatataggtaacagggaaacgatttaacgataataggttccacaaattatataagtttcagctaagttaaataaatcattatgccttttcataattactttatttagtttctgattctaaaagcaacttcattaggggtgtgagaaaggatatctaattctcaaaacaaataaaaattggtttttactaaacaagtttaagaaccatctttcacttgggagattttcagaatcattgagtctcttccttattggttctaattttttattaatcaaaaaatattacttttgttttagctaaaattactattatattgtttagatacttaaccaatggatgctcaaaattagatgagtttctcaatttaatttaaactaaacataatattattctagtaattatacttagtgggtatctaaactaataaagatgctctaatatactatatactaaaacaatatcgacttctacaaacattgatcccataattcaactataaataatgtacagtaatttcttgaccaaacagtatagtgtacctctagaatattgctcaagcatctctgcatatataatattactaatcgccatttagtgtcttcgtaacaccatgtgcacccttagcagacaaaaaaatacaactcacacgcaaaccaaacaagcggttaaactgtataatcgcaattggtatcacttattctagaatgtttccacaccacttctttaacttaattagttttttaaaaaaactaatcaagttttaactacttatttagaaaattacaaaactttaaactaaatatatataattcaatgaagattcagatatgttattgcttttgtctcaatacttaaatttgcctaaaatacaaggtaagaatattagattacatatacagtataattactttatttcattgtttgtctttcaaataatatacaactattaaactacaatttatagtctatatcaatatttttatttataaatgttataaatctgcctataaataagtaagtaacccatatacaacgaccatagaaacacatcattaacaaaacaaagcctctctaaataaaaacaaaaagctaactgaataagaagaagtagtgatg

SEQ ID NO: 33065 - DNA, 3000 bp, Unknown; identical to SEQ ID NO: 1912
  misc_feature (1)..( 3000): 2750-1469P.txt file - cDNA_ID_3065116; gDNA_ID_1620467; Annot_ID_157919

SEQ ID NO: 33066 - DNA, 3003 bp, Unknown
  misc_feature (1)..( 3003): 2750-1469P.txt file - cDNA_ID_3065174; gDNA_ID_1620468; Annot_ID_157955
ttcttgtctggtgttcatggccttcaaggcgagatttgcataaaaccaaacactgattttcctgatttacgtttctctaaggtattcaaaggatagaaatttgaagaaagtttgtgttttttttcttctcttttcttgaaaaacaaatatgtataatttgacatttttttttaccattggcttgattgtttcattagcctggtagaagatggttaaaacaacaattgttgggacaagataagattgatgaggttgaattagtcgaaggaagacctcatcctgcgcagaagagttggattcttaagtttcgagggttggacgatgttgatcaggtagtgtagtgatccatgggagattttaaaagacacatttgaaaatgatttgttacatttgatggggtttccgtttccttcaggtgagacaactcgttggtgcaactctgcttgctgaggacgatgatcgtcctgagcttgatgaaggagaattttactctcgagatcttgtaggcatgagagttcttctcaaggtatatttgggtttttgccttttgtataatatatcgaaaatgggaaagtctggggtctaaatcagttatcatatacaggagaccggtcaacttgttggaactgttgctaatattttcgacaatggaggaaatgatcttctacatgttttgcttgactcatccatggaagtctgcaatgggaatgcaaagaccaatcagcttgtttggataccttttgtagatgcaattgttcctgatgttgatttggaaagaaaggagatgtatataactccaccgaagggactcctcgaggtgaatatgcgagcagatgatcggtccaagaaagaaaggcggcagcttgtgaggcatattcttcttcgctcttcatattgaccagtctttatagactttccagattgatctttcttggtctcttaaactctacgctctggtcatttcaggaatggaaagaaagaaaaaaacagcagaagcgccttattgctgctaaaaagaagttatgtgaaatggagcaaaagcatgtgtttgatggattaaggtttggagaaaagtctcaaaggaatttacttgctgatcatatccttaacgtaaactccacactacttcagaaagctttgcaaagtattgacacctcatcgaagaggtaaattaacttcaagaaatttcccaaccattgcgagaagtgtgtcttctcatttttcatttaaattatgatgaattagatggaatgtaactgaggaaatcaatgcactgagagctagagtatcggaatgtaatctgagtgtgtcacgagaatgccttagttttgatgcaagcaaagagaacatgggtgataacttcagtttccttcaacaagggcaaaatctgttctctgagggtaaagtttctatttgtttggttctcaatgatcacgagaatgaagaaccagaaggtgagaatggtgtagtctcgtaccttcacgcactacttgatgaggagcagaggttcataaaggttagctgatgcatacttaaaagctatgagattttcttgtcatttagttatgattttacaggataactgttgggttatgtgcaggaagaagatcgcgcttgcgtgccacttgtcatagtttcccctgaacataccattgaagctctgcagaagctatttcaggataatgatcattttggatttgagtcagaaaaggttaaggcttgaattcatccaagaatagttttgcatttcggctatcagattctcacaaagtatatgtctttactaatatatagatctggattctcaaagaagaaacgcttccagtagtttgcagctcaccagaggaaccgaaaaagcacaaaattttgatgaaatctccatgggagatacttgagtccccggttggctctggaggagtcttgagcatccttgcttcacatggaactacagactctctttccaccctgggaatcaattatcttcaggtatcgatatctaaagatcatcgcttaatctctttgaacttgactcatatccagaaattgttcctttctggttctctccttcaaatttggtaaaaggcattaagctttacgatgttggcatttttctataggtacacagtattgaaacaaaaccacaaccgtcacaacattacatcaatcccatgcttgttggtttcgtgagcgcaagaggagcagagattgggatccaagtgaccgaagaatctgaactcaagaacttggaaatgacattctcaatgaagtttctgaagagattaaagggaaaaatcgagtttgaagctgtcatgaagatgaattcacatgttcagaatgttgaaaaggagtgggttgagtcagtaccatcagaaccaaactcgtttgagtttcgttctgatatttacagagtcttgagtgaatgttcttcatcagctaagatttgtttgatgaacattaccgtttagaacttgtacattttgctacttagttgtttgtcctcacatctaaaaagcttctagagacgcaatttatgcccgaacacattactcaagcaagagagaacatcattgtagcttttgacaaatcgatgataacaaaaacccaaaccaaagctattgctctttcatagcacaaaaaaatatattttttatcaaatttcaaaaatatatccctctttttgggaaacttaagatccaactgttgatttgcagccaaaaaagatcgaaccgttgattctattgaccaatctctgatctttaacaaaattacatttttgaccatcacacagagaaccctaatttatatatttataagaaacttcagtcttccgaaaaacatcctttcacattgcggcggaggaagctctaatcaccgtaagcttctctctttcactctctctgaatctcatctttctgttagtttatgtatatatatctactgaaatcgatgcttcgtctcacgcataccttttgttgattttgttgaggaagaggagtaaaaatg

SEQ ID NO: 33067 - DNA, 3003 bp, Unknown
  misc_feature (1)..( 3003): 2750-1469P.txt file - cDNA_ID_3065190; gDNA_ID_1620469; Annot_ID_157984
tcttatgactttgttttgtctttcaaataacatccctaagtattaggagatagactagcatttcagttccgtttatttagcagtctgttgcattcttgttatctttgtaacttgatctatttaagatctctatcgtctatgagaataacacacaagttacacatttgttctctgagtcactagttcgtttacaacaattgtaacttagaaacttagtcaacgctgggatatatcctcctttcgagtatcatcaatcttggacaataaagccaaaacaaaacgaggtgaattcttaccaatatgctctgcatcaacaaaactaagtgttctagtataatgcaagtaatcaaagagagctttttgagcttcattcttcatagctctcgaaacccgattcccgaaaacccgtgtaggtgactgagaccaatgtcgtaaagaagatttatccccacagacaaatctaccactctgaaaacatctcactgcactataaacatgacaaagcttcgaccttgaaatgtggttttgatgagcaatggagaagatattgaattgagcaatcctttctagtttttccagaaatcttgagaacatcactgaaaccctaaacactaaggcaaagagaggaatcaaacaccaaccctaaaacccaaggacaaaatgcaaagctatgtaagattcatcaaaaataatttctttccttgagaactcatcaaaataattgatatttaccagagaattaaggactataaggcgattgaatcctccatcttcacctaattttctaaggtttcatcgcacataatttctctgtgccctttgctaaaacctccatctcatggctctttacttctccgactgtgatcttttcactttccaggcaaccccgagatgcaatttactaataggcccctgaattcttccttgtcatattaatgtgaccatatcttttcttcctacttatcagtatttgaaaaaatggtctaattggtcgtatatcggaaacctaaaaagtttctcaaacaaaaaaattattaatatttacttaattaaatttttattttagtgaaaaaattgaaccatttaaaataagagaaatgttatgatgacttgtatagattatctcatagtttttcacttgaaaatttttttacactctctctcttctcttttcattttctaaattattttagtagtgagaaactatcttgaaaatttttttacactctctctcttctcttttcattttctaaattattttagtagtgagaaactatcttgagagactactaatggaaatggtcttagattctgactatacgttcatgtgacgtataaattattactttgaccgcttataataataaaaatattttatgctataatctgttatgttggctaatgcatctttcattggaaaaattctgttaactaaatattttttccttacatgatatagagattctaaaatgagctaattgacatggtacgctctgctcatcattttctaagacgaattcagtttcaaattcagagtctagtagagatgcttcaatcaggagactaaccctagtatgatgacgattcgctgctataggtctaacataaaaattattcccatacctagaatcactaagacaatgaaaaatacccttcagaaagtacgtcatggtaaacttcaaatcctctaaatcctaaaagattatcctagaacgctccttgacactctacatttcttattcgacaattcttaatttgttttcaataaatagttgagttaaattgaactgattggaggtgttgttctagtaaattaaaaaaaaaactaaacaatgttttgagcataaaaaattattacgttgataagatttaacatataacttctaattgtaaaaaatatagtacatgaaaactatacgaaatatctaaaaataataatttatgtcacgtttgtgattagtaattatcaaaagtaatatactttacacagtatcaatacgaggtttccattcaaaactagcattttcgttttttgtattttatataatatccattcaggcccggcttagaggcagtgctggcagtgctaaagcactgggtccaccatttttttctaatttttacaaggttttaagatataaattttttggtggagcggcttacgtgtgaagctccacaaaaatacattttaattggacaacatgcaaaatgatatactactgagtacaatatctatggtgcactcattggtacgtcataaagaaaataatattatctatataattttctgcaactctttatataattggttacatttttaaattaaaaaatgtgatagtttttgaagataaaaaaacttataatatgtttttcgaccaatatatcatatattttaaaacagaaaagcaatatatatttccgaaaattttattttttacactacaacgtataacttactagtgtgtattagtttatgtcatttccttatcatccaaattcaaacttgcataaaatatcctaaatataatcacataatatcaaactatcataataagttttaggttcgcaaaattaactttattccagtgatgattgatgaagtgcggtccattttatgaaaaatgacgtaacttaaaatatcacatggaaaagtacatataaagcttaattagtttaccaacattagttaaatagttaattaactccatttttgattcgctttttccataggtgtttgattccactaagtcgtagtatccgtgtagtaggaattggttataaaacgatcaaatatattaaaagtaaaaaagtttaccaacattttttaaatactaattcttcttccttaattagaaagcacagcaaaattgtttgaataagagttttgaaaccctcgttcatgtctataaataccggaactaacttcacactaaacatatacaaaatcaaacctttcattttacatttgttttctttttcattatctttgtaagctaagcgatg

SEQ ID NO: 33068 - DNA, 3003 bp, Unknown
  misc_feature (1)..( 3003): 2750-1469P.txt file - cDNA_ID_3065206; gDNA_ID_1620470; Annot_ID_157994
cttcacgaatcaaatcataaccggtccttaaccagctccagttgagatcacaaatatattttattttctgttctttgaaagtttgaaacaaatacatcataccaaactacaaaatttattttatatttatcgtatttgttcatcaaataaacaaataagaatggaccggagcaaatcataatgataatcacattcatgagcgcaaacattacaaaaaatgttataccactgacctgttgattttcttaagtaaacaatcaaaagtaatatcaaaagcatctcgaaacttttcaaacttagcattggagtctccatataccaatccaggcaaaagctgttgaactatgtaacttttcatatcctttttctcctttagagtctttgccttcaatatctccaccacatttactctcttttccttcacatcttgttcgcttatatacactgagtacttccgatgatcctcaggaagatgccacgcgtactggtaataagctgtgtacggagtaaagatcaccggaatgcagccggagattagtgaatcaaatactgatctccttgttgcactatctccaggcggctgcagacaaaactctgaatcttgaaacaaatcaaggacattcttgggattcgtgcagctttcgtttgtacaatttaagaaccgacattggttggaagatatgcattgctcgattagcgttgatcggatgttattagggttatcgggtcttgcacctcccgcgaagcttactagattccggcgaagtttactcatgatcttgatctgccagcgggtgatatcatcatctgttcgcggatggaaataagttgggtgaggaatggcgatgtcgttgacctgccatggctgtctttctatgagtagcttggtagggttttgcatttcttgtagctcaaggaaccttgagccccaagggtccttatctctcctaaaatcccaagttatttttcctagaacgaacacatgatctttcccggcgtttctcctccatgattcctttgaattaagccattttaaaacctcgatccccaaacggtccttcacatcttcagaaacattcctatagtgccatctcaaaacatcatacccgccatagtaagggacaaagaagagcttagcttgggtctcgttgtaaaccctacaaggatgcttcaaaaccctagagtgtaagatgggctcaagagaatacatgtgtgtagcaaaccaacctttgccaagattcttaatagcttctccaaagccttcattcttgaagtagctacacaagttaacccctggaagtatatcgttgcatcctaccaacaaatcgctgttgaattttgacggtaaatcataaacgtaaactcctttaccttcacacgatcgcggtttattgaggttttcatctcccggagatagccatgatctttgtaggtaaagatacttgatggctgcccttaacgcatatccctcatcttcactcgtaggtttgatgtatttgctgtattcttcctcggcttttagttcaatgagtgaattgagatcaaccttgttctttgttttgtgttcttgaacaggaactgaattaagaatcttgttgtgatccttagaaactctatctcctgcgatctctccggcgaaagttacattttcttcagaaattatttggaaaccgggtttagaaccagccgtgttacaataagggtcgttgaactttcgagagaagatacacatatggaagttgttgtaggagattccggtggtgaaagataaacaaagataaagaagaaagaagaagagaaataatgcaggaagagtatagtacaagaatctgaagaagacagaacatagatggatacaagaatcttctatagtctttgaagttcttgactttctctttgaaaccatttttctgacttggtcctttacttcttcactttggatatttataaaaactcatttggttacctatgggatttatattgtttactttattttaaccaaaaaatatattttctctactaaaaatagcatagaaaattaatgaatagataaatttaagtattaaattttctaagaaagtagctgaaaatattttcctatctatgtaattttaatattttaactaggggaaaacttactgtttattttatttttatttctattttttcctttcctttcctcttatgttaaatgatgaatttatgttgtataatcagaagagttagaatgaaaatggaaatatatagtgtacaaaattatactaaaacaggtcagttttgttaatatacattatacttttaaacatagaaatatatagtgcacaaaaaaataagggactatattacttttcaaatgcaatagtatacaatgctatttatgatatgtatgccatcaatatatattttagtctagctacatttattgaaatttgcataacttatgtgctacagtacttgaaagaaatatattctcagaaaattatatattcaacatattcagttttataaacttgtgagtaattccaaaactaattaattttgctattagcaaatatgagttgtttctttagaattttcttttttgacacactgttgagttgacttggatactctgctttgctgtgttcattttggatattaaaaaagatcagaactttattttgttaacaaaaaaaaagaagaattatctggcaaagtgtttaatttccgagaaagttgaagcagagaagcagaaagtttcagaattctcttttctccaagtttaacgcttttttagctcaaagctcacacacacgaccactctattcctcctttaacctttgtgtttgtcaatttgtgtttcctcttttgtcgactcatttctcgattcaatctcgattttttttttttttttttttatggaaatctaatgaactttttttatggatttgatctgttaaagtttcgattaagaagatagtggtttaggtttacggttttgtaattgatttattatctgtaatg

SEQ ID NO: 33069 - DNA, 3000 bp, Unknown
  misc_feature (1)..( 3000): 2750-1469P.txt file - cDNA_ID_3065210; gDNA_ID_1620470; Annot_ID_157992
aggaggaatagagtggtcgtgtgtgtgagctttgagctaaaaaagcgttaaacttggagaaaagagaattctgaaactttctgcttctctgcttcaactttctcggaaattaaacactttgccagataattcttctttttttttgttaacaaaataaagttctgatcttttttaatatccaaaatgaacacagcaaagcagagtatccaagtcaactcaacagtgtgtcaaaaaagaaaattctaaagaaacaactcatatttgctaatagcaaaattaattagttttggaattactcacaagtttataaaactgaatatgttgaatatataattttctgagaatatatttctttcaagtactgtagcacataagttatgcaaatttcaataaatgtagctagactaaaatatatattgatggcatacatatcataaatagcattgtatactattgcatttgaaaagtaatatagtcccttatttttttgtgcactatatatttctatgtttaaaagtataatgtatattaacaaaactgacctgttttagtataattttgtacactatatatttccattttcattctaactcttctgattatacaacataaattcatcatttaacataagaggaaaggaaaggaaaaaatagaaataaaaataaaataaacagtaagttttcccctagttaaaatattaaaattacatagataggaaaatattttcagctactttcttagaaaatttaatacttaaatttatctattcattaattttctatgctatttttagtagagaaaatatattttttggttaaaataaagtaaacaatataaatcccataggtaaccaaatgagtttttataaatatccaaagtgaagaagtaaaggaccaagtcagaaaaatggtttcaaagagaaagtcaagaacttcaaagactatagaagattcttgtatccatctatgttctgtcttcttcagattcttgtactatactcttcctgcattatttctcttcttctttcttctttatctttgtttatctttcaccaccggaatctcctacaacaacttccatatgtgtatcttctctcgaaagttcaacgacccttattgtaacacggctggttctaaacccggtttccaaataatttctgaagaaaatgtaactttcgccggagagatcgcaggagatagagtttctaaggatcacaacaagattcttaattcagttcctgttcaagaacacaaaacaaagaacaaggttgatctcaattcactcattgaactaaaagccgaggaagaatacagcaaatacatcaaacctacgagtgaagatgagggatatgcgttaagggcagccatcaagtatctttacctacaaagatcatggctatctccgggagatgaaaacctcaataaaccgcgatcgtgtgaaggtaaaggagtttacgtttatgatttaccgtcaaaattcaacagcgatttgttggtaggatgcaacgatatacttccaggggttaacttgtgtagctacttcaagaatgaaggctttggagaagctattaagaatcttggcaaaggttggtttgctacacacatgtattctcttgagcccatcttacactctagggttttgaagcatccttgtagggtttacaacgagacccaagctaagctcttctttgtcccttactatggcgggtatgatgttttgagatggcactataggaatgtttctgaagatgtgaaggaccgtttggggatcgaggttttaaaatggcttaattcaaaggaatcatggaggagaaacgccgggaaagatcatgtgttcgttctaggaaaaataacttgggattttaggagagataaggacccttggggctcaaggttccttgagctacaagaaatgcaaaaccctaccaagctactcatagaaagacagccatggcaggtcaacgacatcgccattcctcacccaacttatttccatccgcgaacagatgatgatatcacccgctggcagatcaagatcatgagtaaacttcgccggaatctagtaagcttcgcgggaggtgcaagacccgataaccctaataacatccgatcaacgctaatcgagcaatgcatatcttccaaccaatgtcggttcttaaattgtacaaacgaaagctgcacgaatcccaagaatgtccttgatttgtttcaagattcagagttttgtctgcagccgcctggagatagtgcaacaaggagatcagtatttgattcactaatctccggctgcattccggtgatctttactccgtacacagcttattaccagtacgcgtggcatcttcctgaggatcatcggaagtactcagtgtatataagcgaacaagatgtgaaggaaaagagagtaaatgtggtggagatattgaaggcaaagactctaaaggagaaaaaggatatgaaaagttacatagttcaacagcttttgcctggattggtatatggagactccaatgctaagtttgaaaagtttcgagatgcttttgatattacttttgattgtttacttaagaaaatcaacaggtcagtggtataacattttttgtaatgtttgcgctcatgaatgtgattatcattatgatttgctccggtccattcttatttgtttatttgatgaacaaatacgataaatataaaataaattttgtagtttggtatgatgtatttgtttcaaactttcaaagaacagaaaataaaatatatttgtgatctcaactggagctggttaaggaccggttatgatttgattcgtgaagactgaagaaggagcatttggtctaaccagccggttaagagaagtctagaaaaacggcacggcgttttagtctctattgtggaaacagcaaagctaatttggttcttccccagattatcaccgttctgtttgttcatcagtgttctgaaaactttttccgatacacaaaatcggaggaagaagaagatg

SEQ ID NO: 33070 - DNA, 3000 bp, Unknown
  misc_feature (1)..( 3000): 2750-1469P.txt file - cDNA_ID_3065214; gDNA_ID_1620470; Annot_ID_157991
agcagctgctgaagctgagaacatactaacaaactctctgtccactctagagactttttggcttaagggcagtgccaagtttttactcgggggcaagcaaccatctatagctgatctcagccttgtatgtgaacttatgcagctgcaggtacgcaaaaaaatcatcttctttaccaacttttatttgttttattaagtcatcgaaataccaatgtaactaaccatatcaaacattatggagcaaaaaagttgcttccttatctcggttatgacttttgattgtaaaatttattctattttataggttttggatgacaaagatcgtcttagattgcttagccctcataagaaagttgaacaatggattgagagtacgagaaaagcgacaatgcctcactctgatgaggtccatgaggtccttttcagagccaaagatagatttcagaagcagcgagagatggcaaccgcatctaaaccgggtcctcaatctaagatgtaagaacaaaaaacttgaccactttcatcagggtctctatatgagagactccttccccctaaagataagtcattcgagatccaaacactccgtttaatttctcatccagtttcatggatcttccataatacagtatccaatttagtagtattggtgggacgagtgatggtccaaacctcgttcaagacacaaccgatcgtaaagctcgaagacgcaaatggagtccacctgacgatgtcattctcattagtgcttggttaaatactagtaaggatcgtaaagttgtcgtttatgatgaacaacaagcacatactttttggaagagaattggtgcacatgtttcaaatagcgcttcacttgcaaatctaccaaagcgagagtggaatcactgcaggcaaagatggaggaaaattaacgactacgtctgcaaatttgttggatgttatgatcaagctttgaatcaaagagctagtggtcaatctgaagatgatgttttccaagttgcataccaattgtactacaacaattacatgagtaatttcaaacttgagcatgcatggcgggagctccgacacaataaaaaatggtgtagtacatacacctctgaaaattctaaggggggtggaagctcaaagagaacaaagttgaatggaggtggtgtatattcttcaagctgtaatccggagagtgtgcctatagctctagatggagaggagcaagttatggatcgccctcttggtgtgaagtcgtcaaagcaaaaagagaagaaagttgctactaaaacaatgcttgaagaaagggaggccgattctagatcaagacttgagaacttgtgggtactagatgaagaggagcaagttatggatcttcctcttggtgtgaagtcatcgaagcagaaagagaggaaagttgctactaaaacaatgattgaagaaagggaggcagccaattttcgatcaagacttgggaacttgtggctactaaaggagaaagaagaaagggaggcagattcccgatcaagacttgagaacttgtgggcactgaaggagaaagacatagaagagcaaaagaaactaacaaggatggaagtccttaaaagtcttcttggaagaagaacaggtgaaacttctgaaaaggaagaaactttgaagaacaagctcattgatgagatgctctaatctctatgttctcgttgtatttatctctttattttctctatgtttatctcactatcaacttagtgacaggctatagacggcttttctagaaatagatactaactgaatcttccttaactatgttcaacgtttgtttcactctccagttcaggtaggaaacacgttccctctttgtttctccgtaagaagtcgaacattgtaacttcacactctcgctctgtttctctgtaaggtcactgttccctctctgtttcactttaacttaaggtaggaaacttgaaactgtctccttttatcatcacttccctttgatttctctcatgtctcccttttaccatcccctttgatttctatcaaatctctctctttcgtttcttaaactcttcaaacgaacatatgcctaaaaccctctcaataatgttagctggcaagtcaagatgatgaaaaaacctcgcaagaatctaataagttttgctagaggttcaagacctggtaatcctaatagcatccggtcaacgctaatcgaacaatgcacatcattttctgaacatagtcggttcttaaactgtactaacggaagttgcgagaagcctgagaatgtcatagagctatttcaagacttagagtactgtctacaaccgtgaggagatagtccaacgaaaaaatcggtcggttttcgattcactaactcctgttgcattccagtgatatttaattcatacacaacttattatcaatacgcttggcactaaccggagaatcatcaaaaatacttaagtgtatataagccaagaagatgtgaaggtaaagactctaaaggagaaagaggatattagaagttacatagttcatcagcttttgcctggtttggtatatggagactctaatgctaagtttcaaagattttgagatgcttttgatattacttttgatagtttacttgagattttttgtaatgttggctctcatggatgtgattatcattatgatttgctccggtccatgtttatttgttcattagataaaaaaaaatacgataaatataaaacattttgtagtttggtatattgcatgtgtttcatagaaagaaaaatattgtgatttcaactcttctggttaaggaccggttatgatttgttacttcattaatttgatggtgaaggagcatttagcccaaccggccggtttagatgttttactctctattgtggaaacagcaatctaatttggttctgtgagatcactacttgtcttcttcgccagattatcgccgttcgttcagagaaaactttttccgatacacaaaatcggaggaagaagaagatg

SEQ ID NO: 33071 - DNA, 3003 bp, Unknown
  misc_feature (1)..( 3003): 2750-1469P.txt file - cDNA_ID_3065233; gDNA_ID_1620471; Annot_ID_158027
aatccaaaggtttgcatatatgtataggaaaaaaatcaaaaaaaatgatattaattaccaaatcaagtttcacattcagacatttattcctaatatcctaaatttggaagatttttttttggtaaattaaattaaagattaagatacatggttaagaataaattgatatgggaatatgtaatttgtagaaagacagagagagtgaggaaaaactgacgaggaagctgaaaccggtgacggaggcgaaagaggtggcgatggatgcggcggagagaggaagagagccaagatggccaacgaacatgacggagataacttgtagacaaaactgaagaagactcacggcgatgagtgggcctgaaagccatagctgcttcttcacttcttccttgacactacttttctctccgatcaaaggccatgacaaatcaccctctcctctttctctgtcgtccctcatttttttttgagaaatagcaaagctatgacaaagtatcttcctatctttaagggctttgtgtttggtccggtctctctcttctctctcgctttgtccctattgatgtgtgatttgtggtgtgtagggattagtacttttttattttgtcaactttataaatagagtgaatcattacttggctaataatgaaaaatcaaatggattttattccttttaaaatatttattggcagtcgcatacaagagcgggttgaatccagaaaacattggcaaatctattattaataaaatttaaaaatataggaatttgataaaatttcgttttattcggttcggttttctttgtaacactaaaattgcaaaaaaaaactatcatttcaattttataaaaaaaatttcaggtttgtgttctataacttcaaaggtaaaatctaaaattgtcgaagttggtatgtagtattcaattccctcataaatttgtatttttcttccagattctcgatgggcccggcaatggtaaaatgttatgcatcaaagaaacaatgtgtccaatatgttcaaagaagttagaatatgttcccatatagatgtggttttgcaccaaatggtaagagaatatacattcttcatttaaacacaagcgtagacgttgttgaaactctaggcatagactttaagaccgtttctatcacctctctctcttcaagatggaaggttgatatctctctcttcaagattgaagattgaaaatgttcccatatagatgtgactgtcactttctttaaacactttgcattagcaaaaatgtatcttatgagctgtgtctcttcttcgtttcctctatatccatgccacacaaactcctcatctaaatgagccgacaagcatctgggaacagtaccttggttggtaccatgacaatgggagatttccgggtcgatatccacttacctggatgcaagtacataaaaatctatgaggtggaatcaaagaatcagtttatacaacaaggagattgcgttgttacttgttacttacagaagtgatagcaagaaatcttagtttaggagagttgttgagaattagtggaattatatccaaccagagatggccatgtggacatatcactaattttccaagtcgagtgaaggtaaagccacgaaaatccagagccttcaatgactaaatcaaaagccaatataaatcaatgtgatcaaacctaacagccaagaagaaaaaaaacaataataataaaaaggatagataccattggatcttccaaaggtaacacaagatacgtgaccaaggaaatagctttgagaaacttgtcatcagtatgacatacaacgtcgatatgtggcttttcaaggcgaagcttatgcaccttcgcgaaacggtagtcccggttatcactgatggcgaggcccactttcgatcgggcaagaactgagcaacttgatataagcctctctagagaattttcatctttgaacaccacataaaaaaggcgtaatatgttgagtgacgggaggcaaaccgaagaaggaacatccactataatcttgtccgaaagagtcaattccacaagtgttttgcatgtgtaaagactcttaggcaagctggtaggctctgccgtccagtggagctctaactctagcttgcgcacaaagcgatcaactgcatttgcaactaatttcccaacatctacctcaatagaaaatttttaccgagttggatgcacaaagtttctagaaaaggtgccttgtgaagttccaataacttttcaagaaacttccacacgctttcgcattcatcaccaggatcactgtactcgagtttaggcaacaacgtccagacataacgccatcgttttgacaatatcattgtcccaactgcatctttgatcggtacaagcaacaaaatctggataagcaaatcgtcgggcaacgaactgatctcgtctctagaagcaacaacctcttcatcaattctttgacaacgttcggccattagtgatgtaatagctagctgagtttgtgataaagatttcaaatataggtaagcagagacgaggaggagcaagtcgaaccctaaaaactttagatgatcgagaaccttagatatattcgtaatttctctatgagaaattgagaataagtgaataactaactcttcttgtctcacaaaaataaaaccctaacttatcttttccgtgagacataaacaaacccactttgggccaataaaatcggcccattattatcttgacccaatccggatcaaacccaactccatactttggagtttggacccatcgttaccaatgtagtagactaatgtagttaagatatatataatagaagggcctatttataaaatacaagaaatgttaccaaagcataaaccctaaaagccctaaaatcttaatatataaaccaactcacagagactctaaaatcagccaccaccgcacatctctctcctttgccctcgttttttttcggttctcgtctttcgttcttcacttttagacaagcaaatatg

SEQ ID NO: 33072 - DNA, 3003 bp, Unknown
  misc_feature (1)..( 3003): 2750-1469P.txt file - cDNA_ID_3065266; gDNA_ID_1620471; Annot_ID_158005
aagctttcctttagatatgctgagtaacttaagtttatcttctgataaattctctgattcatccttcacaagagttaaatagctcttcacaaattccccaacaagagcctgaatattttctgaagggcgcacactgtgaagtatcatttcctctgtcttcgggtttgggtgcataccaccagatctacatgaagccttcgagtcaatagacatacatttatggttggtagtcttagcagcttcgactctagactcgagattatcttcaatcacagccttcttcggatccatgaaaaaggttaagtcatcaaaagcagacattgatttgaacaacagcgtagccttcttagcattatcatccactgcacaatcccttgctcctgttttttggaaagggttttccaataacccatgcgaagtattaacaggagcatgctcatcaaggttagatataccatagaaaggttcagtgcatttctctacaagtggctcgcagaaagcatcttcagagaaaatgaaatcataaacccatttgtctccttctgaagcttcccagttataatcaatgttgaatgtaactatttcttcaaacggataatcacaatggttgtggtttctttcctcaagaaggttccacggcaagtatatgtcatttgaggcagacaaggattgaggcttgatctttgacaaaacatcctcataaatgagctccagagatcttgtcatctcataatcatgtaaaataggagtaggcaaagacttgaaggcatcatctgtgaaggcaagttcggaactgacaactaattcatcgaaatccttgaagttcatctctttactgaacataccgtaacagatttctggttcaatggctttttgaagacaaaggaagatatcaaaaacatcagagatatccacatccaggatctggaattcctcataagttactggtacagccacctttccctgaaattcctcagcatttgatatttccaggatagtcactatatccatttcagaaaattcatcctctggtaccacatcagattggccactcttgttcaaatagcaatccgtagagagtacatccaatagatcataatcctttgagcctataagctccttagaattgataatgagagaactccctgcattagtgtcttggggttcaatcgtctcaagaacagtaaatactttatcaagcacagataagcttgatagttcgctcaagtttacttcatccacttctagaaggggaaatctggcatctttgaaccatggttgaatcttgcggaagcattcattttctgctacagaagtgttgttctctgtaaagtaatcagaaggaatgtaatcaacagaataaatctgctcttgaatgtcctttgagttctgcaggataatatctgacccctcatatttaacctgcaataagaagactagctaaaatcagatgatgccaagaacaggaaccagctctaccactctacagcaaaagcaaaaactactgttgtgtgtgccaactaaaatcaactcagggatttaccgggtcatttttgatctctagaacttcagagaaacattggagatgatcctcactcgtgcataagagcttgttctcctgtatatcaaaagatgctttatctcgcaatgaaaaagaaaaagctgaactagttcaattagtacaatgcttacacagcttgagcaataccatctcaaaatccaactctggagtctccaactcaataattttaggtgtagctttatccgcaatggcatctccgtcatccttctgcaaatagatcataacttcggttttcaaactccggtaagattcgcttaagctaccaaaatttccaacccaagtatgaatataagatctaagcaacaatcagaaatggaaactgagaaaacacaccacaaatttcgaaaaatctacaaccaatctcactataagaaacaaaggaccgttgacagaaacagtcagcgagactcaggaaattcgaaatttcacctccaggaactgataatatctagatcgaaggaactttacctcgtctgagtaataaactccgagcgaagagtcgtcgatttcaaaaactcgatagtccacactgacgcggtcgggaaccacgtcggaaaggaacttcgacaaagcagcttcaataggcaaatttccgatagggatactaacattttcgatcgagccaaatcggagacggtcttcttctccgttgtagacgatgggtgccgggaaattatcaggagccggaagattgaggaagcctagggtttcaaatacgtgagaaggtggagtagagaagtaatcgatgttgagaaatcgagttcgcatcgtaattttctagatccgtcttgggagctcagactgtatcagtgatgatgatgatgatgaagaagagaacgaattttgaaattggcggttttgaatttttaagaaattaaaaaatatcccccgtcgatttcaagagggagatggagataccaaagcaactctcgccacttgtcgtcttttaattttaattgagtacgttatgccgttttaaatgttcaaaacagcacacagttgatagctgaattgattttttcttttgccgttttgttatatttaaacaacacacagtgcatttgccaaataactacatgatgggccaataaacgtggaccgactaaaactaaataatagaagatacatcgataggcttctctaaagatcggataaaagataatgtcgcatagccacgtagagagcaactggctgagacgtggcaggacgaaacggacgcatcgtacgtgtcagaatcctacagaagtaaagagacagaagccagagagaggtggttcggccatatgtcatcgttctctctataaactttatggaactttgttctgattttctcagagacacgaaaagaaagaaaacaacactagaacaaagagggtttgattgattcacttgaaaaagagaaaacacagctttggaaaatg

SEQ ID NO: 33073 - DNA, 3003 bp, Unknown
  misc_feature (1)..( 3003): 2750-1469P.txt file - cDNA_ID_3065281; gDNA_ID_1620472; Annot_ID_158043
tatctccttgtttcggcaggctaagaattacatatgaactacaactcgagatttatgctttacaattcttctgcttggactgtacaatgttctacagaagtataaacatgaagctcaagtgcttaaccatataatttgtctcatctctaagaatttttccgagtcaagtgtacagccttatccttgttgttattggttgtctgcatagtgggcatgttgtgataacaactccgcattccttgcatgtctttatttgaaataaaaagtatcggagatgtcacaaaatcgatctagaagcagtacagttcatagaacaagtaagagtataattgttcctttgaaattttcacataccgtgtgaccgcagctaaaagccatgtcctttggattcgtcaagcaaatcgggcatacctttttgaaaaacaaaaggaatgtaaatctcagtatcagagaaactgagtatactcattgacaaaagaacagaaacaaaggcagaaataatagagtatttaccggcactgtggaaggagcgagtctgtcacttttctctgcagtttctgtcatctgatttggcaccgatctaacagcattgtcacgctctataacctctggtggtggcgggagtggcttgtggtgctgatgggaactgcgcactggttttctactgttcataagcacaatcaaaggttggtttagttggcaaagaatctaatgcaataagaccataaacagtgagtgatacaagtagtttccaacggtaaattttttattgcatttacttgagacttaatgtagccttgtattgaaaagggatctccatgagagctgcgagtgcgaaagcagcctccttcttagccgcatctttgtgctctgacattatcttcgtgaagtttacaaactgtggaacaaaacacagtttttcatgattcatgtttcaggaacaaaacagagctattcagggttttattatattacctggaagttatcgaattcacggtgaggaatattgtcatcgaattgtttcattgtgtcccatggtccatctcctactccaaccaagactatcgacaatgggtaatggctggaaaatttatatcaaacatcattagtatacatatgaagtctgatcatgaatatgagcttattgaatagttttacctcgctgccattatcgagttcatagtagcttcttcctgtggactaagtcgaccaagcggcacatctggatttcttgtgacctgaccatctgcgataatgacgagaacatggtattgcatattgttctgctcaactatgttgatggcagcatcaataaccggtgcaaacgaggtaggacctgtgagggaagaatacactgattaatctttacgataagagagaacaaaactgctccatttttgaaagttcaaaaataccggacaacttcaaatgtgggacaatctctctatatcttttaactgcgttttccaatccgtcgcagcttttgttctcgggataaaagctgaatacatattgatctcgcgttgttactgcaggaagaagaaaacataaaaccattaagaactttggtttatcttattcattcatcttgaaagcaagaaataagaaactaaccatcgccaaaaccgaaacaaggtataagatcatcttcatcaaagggagacaaagtacgaccaataatcgatattgctttctcatatggattctgtcttttaccaatggcatgaaggctttttctattgaatgaatatctccctgcaatgaaaattcagaacattaaccaaaaccattgaatcttttcgtaaacatgtgtagcattttttatcaaatcaaataattacctgtccactcattgctcttggtaaagtcaattcctagaatcagatttgaagattcaagtccagcttctctcagagaagttatcacctaaaaagcaaagttcacaagaaattcatcactatgaaagagactaaaatcaagaaataactaagtaagtttatgagacctgatccaaactgctgaaatgatcagcaatatacgaaggttgctgattacgtttattgctcatgttcattgaaaaaaccctgcagcacaagaaccttcagaaatccaatctttggagaagaaaccaatcaaaatcaagaataaaagatacagttacacaagtggcaagtatatatcaacctggagtttgttgaaaacacaaaagacttctcggaatctttcttgtaagaaaaaacttttgttggagattatcttctgtaggaagattaaattattaaaaagatggcacaaaagagaaatatgaacatataaaaatactttagcagaaaaaaatgaacatataaaactatagaaagtgggttttgttgaatcttgaaagttagtggaacgtgaccctttgcttgcgccggcaaataatcaaaacgtattttgctctctcacacgccatcatcaatctagaaatcttttttagtcttgtctctgcgtcattaatgatttatccataacccaaaatcatagaccaaatttcaacatgattcatgtggacaacgtggcaaagctgtagctcttgtctgaagaaaattatttgggcttttgattccctcaaaatatattaacccagaaccgtttttattgggcttcttcattcatcaagaagcctttttgtatcttcaccacctataaattcacttatgtttcaaccacaacatccacgtgcgattagcccaaaactcaacaaccaatctacgaagatcactaaagttttttatttttatgattttcaccgtttgtacttgttctttcaattggtgccacatggacccctaaaccaacagagcaaatatggcctttcttgatctaaaataaagtttagggtttaagttcagagaataaataagtacactggtgtaaatgggaaattcaaaaaagtaataataattgtctctgcaatcagaaaatgtgaagacatatatttatcttcttgaaaagcgaatgatg

SEQ ID NO: 33074 - DNA, 3000 bp, Unknown
  misc_feature (1)..( 3000): 2750-1469P.txt file - cDNA_ID_3065320; gDNA_ID_1620473; Annot_ID_158080
atcatattactttgacaactctttaatttgttcggtcgcttttggattattggcacccttttgattcttttcccacatattaccacccttgtatactgttatactgtgtcaagaaaagaaaaaagagtaatgttatacataagctatgctataagtaggcctaattacattattgttatgttggtgatatatatatgtagtaacacccatatatatatatatatatatatatatatatataaagaaataaactgtttgaaattgatattacgatatacatgacattaaaatgactggagagaaagaagtggtctaatagggtttgtgttgataagtcgtgatttgataacatgtcgtgttttacccaggtcccacaattctcctcgctctcttctacttaattattaatcttttaccaatatgttccattaattagtctagtggtacgtacgtgtaggagaactttcgattctaatgggattaattcccgacggaaagtatcgtcacggccggtgaacacttttggtctgtatatgagtttaatatacatcatcattcagatgttattgcgagtttgcgacacgccgacacgttaattaattagaatcgaattcgaaacacatcaaaaccaacaaagaaaagtacatacaatatactaagtagcaaattaagagagactaaacaggtttagagtttgccgagatttaaagaatgtttctctaccaatatacatgttgttttccaaagccataatatcccatgttaccactatgggctcaagtcactctaaattatcaaacacagaaaaaaagtcactcaatcctaaaaaagtggacctcacttcattgaaattgaaaagaaaaaataattaacaaactcgatcgatcaactaacagaattaaaacaaacactccagcaaaagttaataatcaaacaaaagtggacctcgattaatctcaaacaaaaacccttcacgtaaattaaatactatatatatatatatatatatatatatatatatatatatatatgcgtggttcaacttttcaacaatccacgtgagataattttatcttttttgtttgttcttatacatttgattgaagtaattgggagagagctagaatgcaaattgtaagtgatagacaactccacctagtaatagttcgtttgttaacctctcaccatcagttttttttttttttcctttcatgttaaaagaaatctacttttatttccccaacctttgaaaattcaactttttactttttgcaagacaaacgcactgtttttcctctgtgacttaataaaaaattcgaggtgtttatcttgaatttgagttgtaggacgtagataattgattttgtcacgagtatatatgatcaacgatgatattattcgtttttagtggcctagtttctcatctgataaacttttcaaacaacatgtcatatagttgttgcgccataatcagtaattctttctctatcggtgggtgtgggaaccacaaacggatcaaacttataagttatattaattagagtctgaacgaaaaaaatcgcgtaggttatatattatttccattctctaacggttaatttagtggcggccggtgttagacatgtttttgttttctagggttggcaagtacaataacaatacatgttctggagtgaagtgaagtagttgtcaaatagaattttagttttgaacaaattaatccttgatacttttttatgtaactattaattatatgatataaataatgaaaggtgatcaagggctgggaatgtcgtggttgcatgcatggaacttggaaggtcagctgcttctgccaaacttattccccgctcccccagtgatatgacctatctgccctcacattctttcaatcagatcctctatgtccacaattattgtatcaaacaaaactgttgccagatggaaaaccgagattgatcgagcagaatcactaaccgagatatatcaatcaacgttgtagaaagtcctagcagacattgtagatgtaggtagttttgaatatattggttatatttctagctaatgaatgcattttgtaacttcatatttacaagagttcaatacaattattccacaagtcctttcgtattcttagtctcatcaacttatcaatatatcatatccttaacacatgctcatgatgaatttggttttacccaaaaaccggtctagttaatctgatccgaaattaatttgatccatccatcaccttaagagaacacatattagaaatcctacactgaaaacagaatgagaccaaggtaatttatcaatggatatggatcaaacccacttaccagcaataggttttgataggaaacccttcaaatttagcatgtaaaactttagatcgaaccactttggattcaaattagatggcacatattctactactttaatatcatgtaaagattcatttgctttcaaatcaaaaccaatgtgtggattgattagttattttattatcacaactttgaattataattactgtcatctatctataacataaactaaaataataatgtacattactatatatgtttattatatagtatatcgcaaatcttgatatggttatggatatatcaagtttaataatgtatgctcaccttaaaacgtatatactcccgacgaataatgaacattagagttttaatttgtataataagatatgcttggtagaaaacaaaaaagggaaatgtgctgaaaaaagggaaatgtaaacatgcatgaatatggtaaaggtggcgtaattaaggagtaaggacccagtaatatagtggatattcgagaaaaacttttctacgtgaacaaaaataacctacgtgtaagttatcctctctataaagccctcatcaagtctctgagtccttcaacgactcataactcatagctatatcttgtcttaaaaagaagaagcaaagagaattagtggagtacgataagcagagaagtatg

SEQ ID NO: 33075 - DNA, 3000 bp, Unknown; identical to SEQ ID NO: 1961
  misc_feature (1)..( 3000): 2750-1469P.txt file - cDNA_ID_3065332; gDNA_ID_1620473; Annot_ID_158072

SEQ ID NO: 33076 - DNA, 3003 bp, Unknown
  misc_feature (1)..( 3003): 2750-1469P.txt file - cDNA_ID_3065336; gDNA_ID_1620473; Annot_ID_158071
tgtgtagctcaagtgcctgaggtacgacccaccatggatgatgttgttagaatgattgaagagatacgagtttcagactctgagaccactcggccatcttcagatgacaatagcaaacccaaggactccaacgtccaagtttaaatcaccccttggatctcattccctttttatctatgtttttgagtttgtatgtcttataaggctttatgttgattgtttgaacaccactcgcctgagtaataccgcagttggaggcgcggtaacatttacatagcaattattattgtaggctcctttttctgtatctcataatatatatgaatatgattcagttttatgcaagctaagtaagtatccaaaagatggatttaaaagagttccagagagacataaatatcagggagaaagagatgaggctgcttgaaggaggaattgatagagttcttgaggttgggagaaaaaagcagagtggtcactgtccggaagaaggaaggtgtgagcaggaggccacagggccaacattacctcttgaagaactggttcgaacaaatggtccttgcctgtcttcacgtacactcttgggattttgtcagtctctggagctcccggaatatccattatgcctatgaatgccatgacaggggccggacgcagaagtgtggttgccagtgtgtaatcctgatcagaatgaataaatgaatgatgatgattctctacaaaaaaaattgaggcagagatgagaacagagttggtaataaaggacacacctccatggggctctcgttgtaaaacttgtcccgaacatactcaggtttcatcatgatgcttgttgggagattttgtggtccatttccgaaagtaaagtcccatatcttctcagtttcctcctctatcaatcctgaacatatcttcattacatttttgagtctttcaggaatcaaggtaccaggtttgaccatggctgctgcgacgtaaaccgccaaggaaactttggaaggaaagaggcacatggcagccgtcatgctccctcctccaacgctgtggctcacaagaatgaccttttgatcgttgggaagttgggagaggaaggcatagagaggctcgtcgtagtcatccaaagaagagacagtgtttggatcagttgggttgataccagcacccttgaggtctatacatgtagccttatgtccattatccctcagtgaattagccagcttgtaccaacaccatcctccatgccctgcaccatgcacaaacacaaaatgatgctcactcatctttaatcctcttctcgtacatcacattccttgcactatcttttgtagttagtgtgatatttctgtatggctgtaatgttttcatgatcatgatcatgttctttaaatgaacgatgtaaacggcagctttgtccaaaactcacaaagattacatctaaaagactgccattaccagtctttgatgtgtactgggtcaactttgaaggcccaaacacatattctatagtgaggcccaaatcaagatagataccgtcttcttctttttttaatttcttaagaaaatatgtaccgtacatgttttttgtttttttgaattgagatttactccttcaactaatgagtccacaccactgacacttcttattttctacgctataagttttttttattgagatttctagttttcaaaaattacataagaagaatagacagtgaaactgaaataaagactcttacatgttgcatctatagatttccttttaaatataaaatatagattttaatatgaaaacttgatagttacaaatctacttaattttaattatatgattctaactagaagatattgagatttgcaagataatattctctatttgtgtgtatgaaataaaacagatttttaattatatttattcaaaaagtctaatagctctaataacatttgttgaacaatgtctgtttggtgaaaaagaaattaaaatcaggtgttgacaacttcatgaaaaagaaatgtaatctaaaatctagtcgcttacacattggcagaataattttctttgtgtttacatcatcttcatatatcttagagatatctctttataaaaagttatagtatatatattttgtttggtcaacatacgtaattttatatcaataattaatgatatagaatgacattttaaatgcattaaatttgaaatgaaatgaaaaagctagagaagtggagcgccacaaattgaaaaggtgatagaaagtgttggcctctcgagactaattaataacgtggattactccaaaacccttaaaagtattacatttaggaaggagaaaagccatttcaagttttcaatgactgtataaatctgatcttttgactgcatgagccttcaagtattcaaatggcaacagaattaaaacgagagagaaatagtcacgacggccattaatcttgtgaatggtcggttttgattagtggagaaggagaggtcaatgactctctataatacgattctctcaccacgtggacacagcggaattagtcccttaattacatattttaattacagagagacaacctaatcacttggccacgttgaaattgctaggtactagttaagacttgttccgcaatatctgtcttaaaggtaagtgtataaattcatttgactatattttattttcacggtttttcttcattctaaaaagtagtttcatcttcttccctcatccatcatcattcatcatcatatcttctacttcttcttcttctcaggttctcttttttgtcctcttttgtgtaaatacgttttgtcatgattctctgtgaacagtaccgatcgtttttttttgggattagcgaaaaataaaaataaccgacgttttttgtattatttgtctgacagacagaatctgtattattttgtcatcttttttcaatagtctcatgattgtctcttgtgtgtttccagctttcccatagggtccattgatttttgcagccatg

SEQ ID NO: 33077 - DNA, 3003 bp, Unknown
  misc_feature (1)..( 3003): 2750-1469P.txt file - cDNA_ID_3065340; gDNA_ID_1620473; Annot_ID_158069
tgttacgagcacaagaagaggtcaaacgaattcaatccgtgcctttggtgataggtcagttcatggagatggtagatcagaacaacggcatcgtcggatctactactggctccaattactatgtcagaattctcagcacaatcaatagagaactcttaaagccttctgcttccgtcgctcttcaccgtcactccaacgcccttgttgatgttttgcctccggaggctgattctagcatctcccttctcagccaatctgagaagcctgacgtctcctacaatgtaatgtttccttttttccaaatctcgactctgttttctgaattaaagttagggtttttgaaacgatctttggtttcttatgtggtgctttatctttttgtgtaggatattggaggatgcgatattcagaaacaggaaattcgtgaggctgttgaattgcctcttacccaccacgagctttacaaacagattggtattgacccacctcgtggagtcttgctctatggacctcctggtactggaaagactatgttggctaaggctgttgccaatcacacaactgctgccttcattagggttgttggatccgagtttgtgcaaaagtatctcggcgaggtattaaaaatcatagctttattgaaggtttaggtcctattgagcgattctatttggtgactaactggttttttaattgcagggacctcgtatggttcgtgatgtcttccgtcttgccaaggaaaatgctccagctatcatcttcattgatgaggtagatgccatcgctactgctaggtttgatgctcaaacaggagccgatagggaagttcagcgtattctcatggagcttcttaatcaggtgagaacaaataatgaattttagttgtaattcagatcttatgttgtagaataatggattttagttgtgtccttaacttattgtgttgaattcgatgtagatggatggatttgaccagaccgtgaatgtcaaggtcataatggcaacaaacagggcagacactctagatcctgctctcttacgtcctggaagacttgatcgtaagattgagttcccccttcctgatagacgtcaaaagaggcttgttttccaggtaagttaattactacaagcacttaaataactagttaaagagatatgaaaccaaatgttttctcaaaagaaagttttgactgatatcttagtttctgtcttattgattggtttttccttgtgtaggtatgcacctccaaaatgaaccttagcgatgaggttgacttggaagactatgtttcacggcctgataaaattagcgctgctgaggttagtttattttgcttaccattctattcttcccgctatagtttacttttaccatgatatatcctccagtgtttctgggtcaccacctaatgatgttcttcaaaatatgcacttgagcataatcatactgtttcaagcattatgtatgaatgttagctgagtcgtttgttaatcattgtcctgaactgaattgttgagaaatcaattgttggcagtaatatggtttgattttatcatgtacatgggaattgttcctaaaaagattgcatgtaatgatgatagttattaatgacactattttgattttatgttgaacaatgcagatagcagcaatttgccaggaagctggtatgcatgcggtgcgaaagaacagatatgtgatactacctaaggatttcgagaagggctaccgcgcaaatgttaagaagccagacacggactttgagttttacaagtgaagagaaagcagaagtggaaccagattatggctgttgttaaaattccagtgtgttttgagaattattaaggacatggaatcaaatttgcagttaaattaagaactaagttgcatctcctaatttctgtaactcgagttcacatttgtttttagtctatcagctttttacagtttaatgtataagaaaaactggggatggtgtccttagaattgccagagcatggtaataattatgtctcctctgattaaaaagacaacaaaaatagtgatgatattaggagcacgctgcactgctcaatgttcatagaaaacttcagacttcaataatgcctaaatgtgttggatcttgttttggagttggtgatagatgatgaaatgaccagtattactattacatagtatccgcaaatcaagaatgatgcaaatcaagagaaaacagtagcaagagtggttggacaggtaagaactattaccatatctaaatgattactttaaaaataacaacttggatcaagatggtttttgttttcatgtatttgtcattttgctatctcataagaatcttaagcttggtcagtctctgggtctctctacattagcgtttgttgcggtgtttacacaccaatatgatttgatctaaagactccttttgaagactgtcttacccttaacgaatacgcctcttttgtttaacttcaccacactctctctctctttcttcttcttcttcttcttcttcttcttcttcttcttcttcttctccactagtccccacatacattgccttttcttctttcttctctttcaccatttcaagattgtgttatagtccgctcaatgcagtagagtgcagaggtctgagcgctccatctgcataagttcttcttcctctattgctgagttcttcagtgcccacaattttcttacttcgctagcttacctctctactcccaggttctctttctctcttcttcttctttttggtttttgtatttttccttttaactttctgtaattgtctgtctctcattgttgggaattatacttaaaaatcgccattttctccggctaggtgggtaggaaactttcaagactttagatacaggctagtgacgtggtatattagttccaattcgctggctacacgttgtttgttcaacaactccgataaaaatcagacactcaaaactcatctttatttacttagtgacattgtccacatgatg

SEQ ID NO: 33078 - DNA, 3000 bp, Unknown
  misc_feature (1)..( 3000): 2750-1469P.txt file - cDNA_ID_3065346; gDNA_ID_1620473; Annot_ID_158062
ctgatgtaattggagaaaccattatgaagacgataatcagagcgaagactgtaggaaaaagatgggattttgggttgaggttgaagattaacgcgacagagtaagagcccaggagccctaacgaatcgagatcctctcgacatcccttcttctccgaaagtttcacagactgaattttgctccggcgagctagctaacaatgtcacgacgttcggcggtgcttaatgggcctaataaataaagcccaatacattttaagcccattaatgtctatccctttgtggagtgagtcgtcgtttctccaccattctttcatcatcatcgtcgtcaagcaatgtttattatgagctacttccacaagaagtcattgttagtaaagaaatgggaagccgtgcaatatgtatacaacgtgtggcaccaccgtgttttgaagcctcgcaagtgaagaagatcaaaacagttggttcctttttggtgaatactaggagtaagagaagaagaagcactggtgtgaaatgtagcagcatagctgactacatcggaggtgacttggtgaagccggacatcggacaatggcttcaagacgtggaagaacacaaggcaatcgccatttacgctcctcatgagggtggttacgaaggtcgttatcttaaccgtctcaaaatgcagggctactactttcttgacatctctgctcgtggccttggtgaccctgagactacccttctcaagaactaccctgtttgccctgtatgtctactttcatccatcttctactttaatcttgtttcaatataattttgtgtgaaccatgtatcttctcttcttttaggctcatcttgggaaacaacctatagcaagatggtattatccaccagaagttgattacaggctcgctgctcttccccctagtgccaagggtcttgttgtatgggtcctcgaagcaaaggtttgagtttctctcatttgatctgttctcccacatgctctttctcatatttccatttcactcaggtcctctcaaaatcggagcttcaatttctcgctttacttccctctcttcgtcctaacgtcagggttattgctgaatgtggcaactggtgagtatatcattccttaccatacacactaatcatctatgtttgcaatttgcatgaccattaccaattcccctgcaggagaaagttcgtgtggaagcctctagcagaaattgcaaatctagctgcacaagagtaacttaatggcacaagtggagctaccagtgtatagtttttcatgaatgcatctcccgcaagtgtagcaatactcatcccatagtaaaagttaaaatctgtatttgtaacttggtagtatattcccatggagtagttaaagataatttctgactctgctttgtcacaaataaaagtatgtataatcagtaagattgataggacacgcttagatacagactacagagcaatccagaagtacaacatagaacacttgattcagcagaaacatgtgcaacttactttgatcaactccagtcactagacctaacgagtaacaacatgttccgagtccacaaatcgttttgaaaaccaaaaaattcagatcttttgcaaagttcttcagcgagtaggcatattgccctcctgtgactagacaacttaatacctagagctttaactgaaggttcttgccaatattctcgtgagaaatcaacaaatatggtcacccttaagactttgatggagctaaatgtgaggatgctttttgttgtctagttctatgcttaaccttgagtcagtgacgtatcaaacaggcaactttgagtaatagaagctacactaggaaagatatagacttggataatgagctcagtagtacaaaactttgaagcactaagacaaagctgagattggagaatgcaaaaacaagacaaaaagcaaagttctatactgcagattcttgggttactttaggcaagaaggtatcccaccatccaggttcatacttggggtatggcgccacccaatttttaggcttatcgaactcaagagtggtaggattggaggccaaagcttcatcaagagaggtagcttcaaaggaatcatacagaacacgatccaatcttaacttcataaacctgccataaaacaacaaattgcaaaacacaaatgcgttagataaggagggagtgaggaacgtaattttgaaaagagagagattgggattagggttctaacgtgatccaggtgccattggtggaaacaagagcaacagcaggacgacgaagtctttgagtaattttggggaaattgtcaaggaatttaggctcaatgacaagccagaagtcttgcactaattcacgctcaccgaagtaacggagacgttcaaacaattgctcctggaagtgctcctcttcgtcaagcatgaatttagcgtttgctaccaggaaatggtacttggtgctctctccctgcaatcatccagaaaacgtaagctgtttggtttgattggtcaagaggaaaagagagagagagaaagaaaagagaaaccttgttaacagaagactgttgctcgatggaggtagctgcggttttgaaagaggaggagaaatgtgatgatggtagagacagagaaggcgaagagagatggagtttctttgtctgcttgggaaaggaagaggagatgagaaagggtttcgtacggcaagcggcggcggtaggcggcaccgccacagtcaatgctccggtgacgctccacatttgctgctgattagagtctgttgatcgaggcagaatctgtaaaaatcttatcttttttgccgggggtcatccattattatcatcactctctctctccctttctcaactcaatttttaattgattttaatgttatttgggcttcagtaatggcccaataaggtgttatgggtttcttcaagcccgtaagaaagaaaagggaaaggcgttaactgtgactttcatggcgacggaggcggagctgagatg

SEQ ID NO: 33079 - DNA, 3003 bp, Unknown
  misc_feature (1)..( 3003): 2750-1469P.txt file - cDNA_ID_3065350; gDNA_ID_1620473; Annot_ID_158061
gctttggtggagtcctttgtcaacgagtaattctttctccatcgattagttttcccatattctgtagaggttcacatgtcaactagatagcaatatgtgcagctgtatgaatctcaaggtcctgaacataggtactgtttgtttgcagatacagagcaactaatgctggtagattcccttcattggatgctactcacaagcaagtgggaggctcttattacattgtcagggacatctttcaagagctgaaactcaaaccaaaagcacatatgccaatcgtagctaaagccctctcagaagtctcttcttctgtaccaggtgatgcttcctcacactcctctccagcacctgtgccaaccgttgaagctaaagccctctcagaagtctctccttctgtaccagctgatgcttcctcacacttgtctccatcacctgtgccaatcgtagaagctaaagccctctcagaagtctctccttccgtaccagctgatacttcctcgcacttctctccagcacctgtgccaatcgtagaagcagaagccctctcagtagtctctccttctgtaccagctgatacttcctcacacttctctccagcacctgtgccaatcgtagaagctaaaaccctctcagaagtctctccctctgtaccagatgatgcttcctcacacttctctcctgtggttgttgaacctgagtttcaagtaaagaaaaaatcttgctttggtgtgatcagtttaatttccttaggcttcagttatcaattggcttagttatccttgtttctgtttcacaggctggcagtgtggatattgagataggaagtgagcagaggccggatataatagatacttctcactctaattctgatgatgaaagtaatttccagggcaacaaccttgtcattactgcaaaagatgacaaaagagaaacagaggcaactcagggaatagaaaactcggagactgatgaagagaggaacttgacgcacttaggcaatcaagagtcaaaagcagaccatcttgaaggagctgatgtttcagcagatgttgtgcctactgagaccaggtatcaaatgcatacaactaggtctcttctttactggtccgatccttatattaggataatttacttcattgatggatctcttgtttttgagtaatagaaaaagtcattcaagttgatcatattggcaccacttcagtttgaattcttatatcttttgtttttacagacaaatttcagagacaggagccggtgaggtgaaagagacggaaactggtgaggtgaaagaaaggtcaagttcgtggagcaacataatgtcatttgcgaaagaatttgcgaacttttggagatgagggtagatatagccagggagctttagacacgctcaggaagggtaggtagaggtgtgtaaagtataccagtagaagctgttttgttttgacattttgcgcaaaggtttggaatcgaccaagatgtcttaatctagactattattgtcctgctggctatgagtctagattaaaacacacaacagttttagaggcttgttttgtgatcgaccattttgtacaaaggtatagaatctcccaagatgtttaacatggtaatctatactatcgttgtcctactcacaatgagtctagatcaaagctcgtattttcgctaattcattgtttgttctacagaactacaaatccaaataaatactcgaatagacattatttcatagcaatttttatacatgtcgaataaagacttcatttcatagcaattttgatacatgttcccgtagtggtacaaccaaaacaaaatgtgttggaaagttggtgccgcagacagcagtagcatagctctagctcccacggtatgtggagaaagaaaaaggtgcaagcaacagtgggacatggaaatgctcccatttctgtgattctgtaacctgaaatacaatggaaacatagggaaagaagcagcctggggaatactttgcagtgtcgaagctaatcctatatgtccctggattcaaagcgtcaaccaaatccatcagtggcccactgcgcccatctctatcagtagctgatgtgcccacactggaccagaccccaccacctccatgaacaaaggaaggaccggtagtaccactccacacttctaagtgcacttcaacacctgcagctggagcaccacgtgagacgtctaagacatgagtcgtgatcggtggcctacttctcttgggagcttttgcttcagctgcaacattcaaatgccctccaatgattctcagacgatcttacaaagcgagaaagtagaaaaggtcacacagataacaaagatagccataagggtaaatccttgtattccaaaagacacatacttgatatcatactgaatcctaacaggttcaaacccacacagtcaaacacaaaactttgacaaggaaaagatttggtaaatcatcaatataccttgaggttttgttgaaacaggagagctagagctgtcagtttctgatataactttagccttatcggagaacagctttgccattcgtagctctgttattttcatttgttccatagcagcaatctcaagctccactattggcctattttcatacctttcctgaaaaagagacgatttgatgaatatgtaactttctcattcactcacactcaacaaaaactgatttggaaatgcaaaagttgacctttaacgcatggagcatctcagcgtgagtcctgccagaagcgcaaataatgaagataaagccaaacttctttttgtaaagtacattccattcggcaagctcctaagaaattgaaaacaattgatcatcagaagaagaaatcactgaagagatgaaggaaaaaaaaagtgaagatccatcacctgtaaagcagaagcagaagttgtggcaaaggcggttgactgttctgatacgctccgacgagcaaaatcggagttgatagaaggtgaaggagtattcccaatctgaggatg

SEQ ID NO: 33080 - DNA, 3003 bp, Unknown
  misc_feature (1)..( 3003): 2750-1469P.txt file - cDNA_ID_3065358; gDNA_ID_1620473; Annot_ID_158058
ttctgacgagatatgttgacttctctcgcaggggaaagaccagtgatggctgataatggcgtccaacaggtaatttaattcaatcttcttcttcttcttcttctattttgaattattgtaaaaccaccatcctaggtttaaaatgcgttgttcctttcaccaccagcaggtttctcacgacgatggaaggaacattgtttcttcgtcttatagttcttccgtggttccttctcctgatcccgctccttattataacgttcttcaaacccctaccaatctctatcactacgattgggatatcgcaaattctggtaattttttgtcttcttctctcttctaataaatcaaacaaaatctgtaagtgctcattgcattgttgtgttttctctaggctatgcacaaggcatcaatacttgggatggatatccacgatatgctactactacccctgaagccatgcatgtgccaccggttagtatgacttgccctatttatgttctatcttcctcttgctacttaattaacttagttattctttatcctcaggttgtctacaatgacaattcatctcttatgtaccaatatcctggttatggatttaacccttatccttctgtaatgttggagggacaaattccagtctccccagcttattacccacaaccttttggtgcaccttctgcaatgcattatttaccctcagatattgacccaacatctgctgcttatatgattccttacgggcaatatggtggagggaattattccggaaatcaaggggacatctctttaacatctcatataccttatcctcaaacgatgggtatacttgggccatacgaccataatgcttcacaggttaatactcttccctctttagttttaactattatgggcttatgtacataacctttatttggtttggttcggtaaacatttgcttactaggaataaaactgcataaaagtgccactggttattagtatcactagttttttgtgagtccatctctttagctttgtcgtgcaagataatgaatacatgctgacacactggaagagccatgatattttctcatatatgattgaactttcagttttgttcttccctgtaatggttttggggaatagaggtgtctttggcatacgccttggattcaaatcagttcactgttttattggcttatcacatttctttggcaccttttatcaggtagcgttgcatgggagcggggttgcttcaagctcttctttgggaggttattatcatgtaggatcttaccagaatcctagctctaccccctcatattatggagttgataatcgagtcagattaacccctgacataggtaaaagacgagagaaggatcagggctctatatctagcaccagtgatctgtatggtaatcgaggaccacgggcatcaagcagggtaaagagcaagaacagctccaaaccttgctctactattggtgattcagcaagcgattcaagtacagctggaccaaatcccagtttgtacaaccatccagaatttgtgacagattataagaatgccaaattctttatcgtcaagtcatttagtgaagacaatgtccacagaagtatcaagtacaatgtctgggccagtacaccgcatggcaacaaaaaattagacactgcttatcgggatgctgagaagatgggaggaaagtgtccaatctttctgttcttttcggtatggcttttccactgtccaatctctctgttttctttctgtatggttttttttcgatgtagtagtatatataattcctgggaataaccaaaagcgtaattgataagctgcttcaatgaaacagtaagcttaaccaaagtttaaaatcttgcaggtaaatgctagtggacaattctgtggggtgtcagaaatggttggacctgtagattttgaaaaggatgctggttactggcagcaagacaggtggagtgggcagttcccagtgaaatggcatattgtgaaagatataccgaataaccgattttgtcatattcttttacaaaacaatgacaacaagccggtaacgcacagccgagattctcaggaggtgggcattacttatttttttgtcttatgatcattgattcaatgctctcttggttgcggtgccatagtgatatttgtcttggtgtcactgtgttaggttttatgtggacaagtcttgggcaatttcacattatcatgtatgactaggtgtatatacccagtaatagggaaatccttgcatatgtgtattaggtcaaacgttaatagttggtatagggatttggaagctacttaattatgaggtacttgaaagttatactttatagtctcccagggaattaaagcttgcactttttgcgttgggttttcttgagtgggatattaagcaaaaaatggaacatagaagagtaagtttttgtggtagggagagagatttggaacgcattaattggatgttgcatggatttataactaaattgattgatgaactgtaacaggtgaagctacgccaggggattgagatgcttagaattttcaaagaatacgaggcacacacatcaatccttgatgatttcggctactatgatgagttagaggggcaaaaggtgggagaagatggaacaaggaaaaaagctggggaagaagagacctccgtggagcaattatcagagcgccttcaagctgtcaaagtagaagatgggaaggaggaggaaaaaaaagagttaatagctgattgatacagtaatagtcagtagaaggagacattcttttggtaacaataagcaatggggttctcttttttctatttgggtggggatgtatactagaatggtcgggacaaaaaaaatccaattccttgtaggcttgtaagcaattattgcttttgtagcattgtatcgtaaaacggcaacgtttcgccttttaacaagagactcgggttatataacaaaaaataaatataagtcttcttcttctccaatg

SEQ ID NO: 33081 - DNA, 3000 bp, Unknown; identical to SEQ ID NO: 1971
  misc_feature (1)..( 3000): 2750-1469P.txt file - cDNA_ID_3065366; gDNA_ID_1620473; Annot_ID_158055

SEQ ID NO: 33082 - DNA, 3000 bp, Unknown
  misc_feature (1)..( 3000): 2750-1469P.txt file - cDNA_ID_3065370; gDNA_ID_1620473; Annot_ID_158052
ttgtttcaacctcggacattgaagacaatttgaactttgcactattttcaattgctgcatgcttcataatatcatggatacttttagggcttaacccttgtagtcttgggcttgaattaccatctagtccttcttggacagcatttgcaatggctaactgctgaaacatattgcgtgtggcatctgtctgatcaacccaatcaacttgattgaagaactcatgaactttggaaaaaacttctattggaagaccatctttctcttccaaggaagaaaaattcatcaagtcaacagaagaggcagcatccatatctgagaagagaagcttcacacagaaagtactctttgtgagtactaagttacaatggagtagctatatgtaccatgtaaagagaatatgagctccatgagtacatacctcaactctgaacccctttgggaattcttttatatgccataatgtgtcgacttcatcacggttaagcatcaaaatgtttgatctaataaaagcagtgttaaaaaccactcgaaacatcatgacctctctttccatgtcatcgttcaaactaaggcactcgatcacgatatcaccttgcacatgacaattaatgtcaatcttgactagttcacattctgcctgcaaaacacaaagagttgagtaaacaacatcgaaaagccattaaatcatattgcaaacaaggaaaaagaaagctaagaagcacaagaaacagaaaaccaacagggctaatcagtgatcaaatatatttctttttctaagaccttcagatgcaatgtaacacaggctgagtcagaggtcataattataagaacgctatgaatattctgagaaatacctgcttgtagaccctcaggtgtttccctttcttgggagtagtgtacaaaagcttaggctttttatcatcaacaaaaaagggatcctgaccatatattcgaaacatagggcgaaagcctccttgtccactaacatcaggaataaatctcaaaataacacaatccatggtgagagccctatccaatggaggccattcagagaccaaattccttcttgacacgtactgtagataacgaagctgagaaggaattgggttcaagggcgagaacaaacgcagaagctcacgcggagcctgcttgtagatcatgtccaaagtcttagactcaccactatactgcttcctgtatataaggagggcagctagcataaaagctaaaacaggccaagccccactttcacaatgcattagtaacaagttatttggcccaagcgagagccaactttcacttgaccggagaaaatgatgcatcacttccacaggtaacaatgagcagccttcgtagtgccgaggataatccattatagtcaagccatgttcagataagacatcagccatcacacttcgagtacccacttcacggaaattaaacacaagagaagatgcttcagggaaatgctcttgtagttgattgactactcctgccatataaactttgtagttttcttcttcccatgaatcggtagagaagcagcaatcgaacactgcaacacacacagaagaaacttttttcagttcaatgtgttttttgccaatcatgataaaatgaaatttcatatcttgatttgtaaaactcccaaatttcagacaaattagcgtaaaaagtcccaacttttcagacactcaatcccagaagaccgaacaagtacaatgagctaaggaaaaatagataaatgaagcagagaattgggagagaaacagaccgaaaactctgtcgcatatctcgagcaaaccatctggaggcttgcggtagaacaatttgcgaaacaatgccattttatcaaagtcttaaaacctctcttcgaatttcaaaaatcgacaacttttgagttttcgtttgattacagaatttgtagcgaaagatgctcctttttggtatgaatctgttaaggtgatgttgattgatcttcgaacagaggaaaaggtcagctggcgcgttgtatgacgtggatcccacgatcagccgccaactctctacccgacctgacacgtgtcttctcatctacggacgaaccggcatttatctctcggcccatttaattcctcttaatgggcttttccttttcggcgcacaagttgtgatatctcgactctgttttgctagcattgtttcttcattctctctaattgcaagtttcagtctttgaatccgatgaaactcagatagctattggagctctgttttagcataagattgcttaaaatagtgagtggctatttttatccagaaaatgagctatgaatctgatgagttggtttaaactacattgatggctcttgtttttattttctcttatttgcggacattaaggcgccagtttaggggctaatcagaggaatgaatgattctcaatttccaaggtatctgtgacagagtcaaaaaagtgtgaaaacccctaaaaaagtgaatttttacattaataaccaaaacactactgaaatgagaaaccacaacaaccacccactcctccactcaccaaatccattgacaactttgggatttggaaaaattcacaaaaggtctgagacagattccatttatcatatttttcttataactcactagcgaaatactttacctaattataatctccacatatccctttttttgactttcaacgactctctcttctcttcccactttctccagtgtccatatacgatacaaccaaaaactcaactctcaactccggaactcccccaaactattcaactcttatcttcttcttctgaaatttcatagctttctgactaaaagttctgattttttttgaagctgtgcacgtgaaagggatttcaatgtattctaaactatcatcacctctatgccccgtgattccattatgtcttttcttcttttcacacagtctgtcttctttctgagctttcccatccaactttctccagtcccagacaccaccaagttatg

SEQ ID NO: 33083 - DNA, 3003 bp, Unknown
  misc_feature (1)..( 3003): 2750-1469P.txt file - cDNA_ID_3065378; gDNA_ID_1620474; Annot_ID_158106
ttggtggaagaagctggaatatgtcatagatctgaaaaaacccagaaaccagtgagattcaagttaaactataacgagaatggaattgaaacactgagaaatatttgcatacctggtccttgaaaccacgggagagcatttcatcagcttcatcgagaacaaacatcttgatgttgtcagcacgaagagactgcctcttcaacatgtcaaagacacgccctggagttccaacaacaacatggacaccagcttggaggatgcgctgatcctcacggacactggttccaccaacacaggcgtgaaccttgacaccaaggtaatcaccaagggccctcatgaccttctcaatttgctgagcaagctctctagttggagctagaaccaaagcctgacactggataagggagaagtccagctgctgcaagacaccagagcagaaagttgctgttttcccagtaccagactgagcctgttgaatcacatcaagacccttacagaaggggacgattcctctttgctgaatagcagaaggcttctcaaaacctaagaaaaaacagaagcacgcatgagataatgttctaatctaagacataaatcacaaaagatagctttttcaagttcctacacacataccataagcataaatacccctgagaaggttctcttgaagacccatggcatcaaagctctcatgaacatcatcataggatgtgaagaactcatcttgtccctcaagtctgtatcaatacagtacaattagcagctagagcatgcggagagaacacactcaagaatgaaaaaacagaagtaaaaagactcacacttcattgagtttctggtcaaactgacgtgcatcaaactgtgtgccttctggtgcagatcctgccatgctacataaaaagaacaaaaacaatcagatttcatatcaaaaggaagagagacaacacctattttgatatcgttaataatatgattgcaaaggaggaaatgtgacaagaaagccaaactcgaagtccataaagagaggaaaacaagcattaatatctgcctcagatgatgtgcggagaaaatgtataaaggcacatatggttatctattaaacatagacaccactcaacctatttctccaaattacaaaaaaaaacattcaatcagacaaaaccaagtgagtgttaagacaagaacatctgagctttgaagacgattcatttcattctattgagagactaacctagccgtaacaaaatctacaaacccatcaacaaatctacagatgtgtagatcctaaatttaataatcgtcatcatcagcagctcagaatctaataaagagaacaaaaacgaaagcacttccacagcaaaaaaaacgatcttgaagtaacgaaaaatcaaaacttccaaatcaactcaacaaagttgaaaccaaatctatcggaaaacacaaaaaaacaaatcagaacaatccaaaagtaaagaaacaatcatgaatcgtaaaagttacatcgagataatagatagacaatccgataggatgcgaacctggagcaaagttggtaagcgagagtaaagggcttttttcagggagcttgaatctcccaaactcggatctgaaccgcgttgagagagagagagcaaagagaagagcgaagattgcgagagactggtggaatatccgaaagaggctgagagaaaacgcgttaccttgtttatatactccgtctttagggttttctcctttggaaatcttctccttttctttttcggatttccggttttacccctttattccctttctttttactcttttggctcggacaaggttttccaacacttagctcattgtcttaacttgattttggcaaaaataaataaacaaatatctagtgggaaattaggaacataaattcttcatttattttgtgactagcaaagaaaatattcttcatttattttattttcttttccaaagctttctttctcctgcaacttttattgctttttgacgttacaaagcattttcccgattacaacgaggatattagaagaataaagtgactgataagaacgttttatctgaaaatgtctttacttattaacacatctatctctctatgttgaatgtttaatcatgtaattgttccacaagtgatatgaagaatccttgaaacgaagcaaaacacattgagtaagaagaaggtaactagctagtatgaagaagcagcaagttgctatctatcttcaacaaaaaatgctttgattttagcctcaagagactttcttagaatctgttgccattgaagaaaaagctggagagggcaaaacataatcatgatgcttaggataagcaaaaaatatgtatttagcttgtgtaggtagaggaagagctaggagttttttgtgtgacaggaatcgagggaaaacgatgggccaaagattaggcccattaataagtttgactaatccctgccgttcattagatgcctacgtaatcactaacgcacctgatgatctctgtcttttggtgagacgcaaaagctcagagaataataatagggcccaatataataaagtacaaaccgaaatttgtgaagcttaattagtcggtttaaatacttttatatcggttatggtagaattggtgttggtacgatacaatctggtacatgtaaggcagcattttgccatttctgaaaaacctaaacacaaaactatcttcatcatcatcatcaaatcccagctttcttccaagtgatccttcactctctatactgcgatttaccgttcttctgactcttggtgagttctagatcgaatcctatcttccatccacatatttactgtttcaaaattggattgagtacaagtcaaattcatcgatctcgatctctgatatagttgccgagggaaaaaggagaaaccccctaacaaacattcccaccattttttttgttatttgcagttgcgaattcggatcggctgacgcagctccgattgcacaacaatg

SEQ ID NO: 33084 - DNA, 3003 bp, Unknown
  misc_feature (1)..( 3003): 2750-1469P.txt file - cDNA_ID_3065410; gDNA_ID_1620474; Annot_ID_158118
gtgtgtgtttttactaattatgggtcgttgggtctgatcaggaattcaaactcaatccaaaggctaagagtttcaaaccattgcagtcagctgctgcaccacctcaatctccaatcgcagatgcctcattctactaccctggtcctagtcatgttcctgttcagcagatgcctggaatgccgcctgttaattacggagtaagttccgtttgttatatattatataaacccaaccgagttatgttttcaaaactcaccatgtgaaaattggcagctcccgccatatcctggcaaccaaccacagatgatgtatcatcctcaagcctattatcatccaaatggacaacctcaggtttgacagtaacacacaagccctattgaattactattcccacacacatacacaaaaaaaaaaaaaaaacatcaaaagtctaatggtgattggaattggaattgtgatgtagtacccacagcagcaaatgatacctggtcagcagcagcagcaaatgatacctggtcagcagcatcctaggccagtttattacatgcatcctcctccttacccgcaggttattatttttgctaatagtagattccctctttttgttctttttttatttttcttttacatagtcgaagagttaaaacttttggatgctgaaatctcatctctgtatgtgtgtgttttgcaggacatgccatatcataataaaggacgagagtaataactactactacccgatggtgatgatgttttttttttttgtgaaggaagtgtacgaacccctctctggttttatccactctcccttacccaatcactgaaaccattttcttctcttttttagattcgcctactgattttggtatttcgtgttgaaaacaaaaagaaagaaaaaaagaaagaaaaaaaacgatctatctgaagtctgtagtactgagtgcactctctccttttttttggctgtatcagagatataaaatttagagtgtaggttgctctcatgcgtcttttacttcgtcgtctgcatatttttttgtgtgtgttgtgctaaatttctgggtgattttgttatctaaaatccaaaaaggatgcggtttagatgaaaagaatagaagagtaacaacgatttcaaagcaggcagaactagtcatttttggtgttgttgtagggcatgcttttttcaataagtcgttaaacgttactataagtagttgtctcgcgattattatcatgatgatcgatatgactcggtgtatatgatttggtgggcaacacattcatgttttaagattccacaagaaaaaaataaaatggaatcaaacctagttttaccagtcgcatatattattaggttaggtgactgcattgagttgtttattttttacttttttacgagtctctctcaacatttattgtttttgctttaaagtggagattttaaccgtggcttgagcttgacacttacgaatgatgttgggtcaccaatcttcatctagaatttaccttataatcacttagttcaattgcgaatcatgttttcgatgtattttcaacaacttttcacgaaaccaactaacatattttacggtcatccgctatgatagaaaaaccgatgaatttgctaagtttgtttctttcttttcagtatggataccgaaatgagacaagaaaacaacgaatattcaactacaataccttacttgtaattgtaatgctctttaagaatctatcaaaactcatcgttatgcaattactgatttatttcatgcgagaaaaaccaaaagtccggtcaaacaaaaaggcaagtgtgtccttatgttgtgacgacgtggtttcatcatccaaacaccggacgtgaatatcacgcgcgcgtggatttcggaacagcgatgtggcggctgtgaatacaaagatatcaagcaaggtacacagaatgtgtgtctctgtttgtttctttaatgggacattttcacttcatcagaatctgatctcaccgtaagcctttatacatagttgtacccactttttctgttttaatcttaaagtttactattttttctagttgataaaatggagtactcattatttgttactagtagtaattaataaggacagaaaaaaaaaaaggaagaagacaagagtggttcacaatcataatgtaaacaacgaataataataattaatgtccaggtaaaaaggtagtgttcatggtgaattagtggtggcaaaaaagttggtactactgggagaaaaaaaaaaaaaggttaggtgaagctttttagccatagccaataatactactcaattttgcagagacagtgaaatgctgaaattgataaagagagaaaaaaagaagaagaaagaagccatgttttgaggaaggagacatgcatcatctcatccttttatgatttttttctacatcttcaccaaatccatagattctctctccctctgattttttggtaaatttggtcgctatatttgactacttgtactctgctttgagaagaaaaataaaaccatttttgggtgataggtgagaaaaaaatctaaatactttttttgtttcttcttttttagttatgttctgttttctcgcttgttgtttggatcaatactgttccaaggttggttttattttcccttctcaagttagtggaattgcatgtttgtgctttctctgttttttttatatctaatttgtaatcaaatccgttaattctcaaagtctgaatctttactttctattttagtatggtaataattggatctgctctatggtttctttctcttagatctgttgtttgttgctttttctttgtggatcaagaatggtttttgattccttccaagtgaataatgcaatatcaatatatcatgactggtttttttacttgattggaattacaggtgactgaataaacatctcttgtctcttgatggatctactatggtctggagattagttcgtttattgaactaatgttttagacaatg

SEQ ID NO: 33085 - DNA, 3003 bp, Unknown
  misc_feature (1)..( 3003): 2750-1469P.txt file - cDNA_ID_3065414; gDNA_ID_1620474; Annot_ID_158117
agagcaaaaaatggtccttttctcatttgtgtttttttttcgtgaaagtgacacagaggaagaatgtttatctctacctgtgacgtcagggacttaatctgcttagacctgggtgtttcaataactctgtcttcttcttcttcatcctcttcttgtttcttagatccaccattgttggtgtttagctgcttcgtacaagctatgcatgtcagcatctctatcactcactaaagagtttcaatttcgacctgagaatttagaagaatgaaacccaagtcacttcctccaccaaaaataatcaaatctaagaaatgagaacccaaaaaggctcataatttgtacctttttttgcaacagtagttacgcacttcaacttctaccttccaatatataaactcaacactcactaaagtcgattgcttttctctcaaccacagagattcagatgtaaaaccccaccggtgaaatgacggcgaagggaaggaggagaccgttgcggcaggggaaaattagggtaccaggatctgtagatcagacctagaaacgacttcgcattaaagactcttctttttttttaaactctctgggtcggtttacttgtggcttgaaagctcttatcagagagattgagtgagatacactcttaaatctcaacactttatgaaatccaaagccgaatgcagaagcaaaatgcaaaaaagctacgaatttttggggagagatagagagagagaagagctttgatatttgggctttgagatcgtcggacactgtgaaagtttgcgcacaagtgtggtgttgtgttcctcctccttcctaattcctatattaaacaaaaaagctctactcttttctttttcttcagagaaaaaaaaacagtaatggctattttcagattcgtctttaagtttgatacttatggattattatgaccaaaaccaaaaaaaaacaaaaacgtaacacagtttttactaacatagattaaccaattgaatagttctacagctttattgctattttttaatatccgcattttgtcaacttttgatttattatttatattaaattacttagttttgaatcgtcttgtatttcatttgctaacataactagtagtatattcttcaattttactgctttgagagtgaagaaatcggaccaagaaaatttcaaatgttattctcttctttatttcctagttttttttctttattctcttttcccttttcttgcttttttttaaaaaaaagaacaaataaaactattttcatagaaataatgaagccgtgcaaaatatccatggtgtggccacatattgacacgtgcatttttaaatgattttggctgtctaattttgcacccaaataaaggaaaagaaaaaggaaaccaaataactaatccattttgttatctgtcaattttctcaataacgagtatttcataatttaagacagtgactctgggaaatgtgacagaatgttactagttggtaattactcctaatttattcaaacatttagaggcaactagtcgtttaaattattttaaatcaactgcattcaaatatgaatgcaaaaacctaaaaaggaatatttacgagtctatataatgtcagatttggtcacaggagcgccgtgaagcaacgggcgagaattaactacactctgtggagtttcttaccatacactattttacaattcgtagttaatgtttttagttttttttttggcttgctttctctatttttttcactaatacagctgaaacatttttttaaattaggacaaaagaaaacagtttttatagcaatgaatgatcagatccgatactgcaaaatataaattaatttaatttttaccataccacgtgaatgatctgtgttttcttgtttgatattgttctttctctttccattttaatgttagctcgtatcttatagctataactatgacctatccgttacaaataatactttatgatgatctctctttcaccccatgttaaattgaacataatactcgtatagtcttaagatttctgtcttatctttttcaagtgtatgttccaaccaggtatcgtggtctggtggtaaaggaacctcgactgagacgtccgacacccggattcgatttctggtcaccagagaattaacatgcggatttgctctagcgcctcagaccaccagttccagggagccattaagtagatgtttaaaaattcctggtcgcgggcttaaacccagtggactagtcagatcactgtgtggtctggacactaagttgtcaaaaaaaaaaaaaaaaagtgtatgttccattgctaattagagaggtacaactttgaaaagtgtaatgtttcatacatgtaactcttatactttttattggccacaccagtttttttgtatttcatcattttaataatatttcagaattctccaactaatccatgtttaagtaattttggagtatttttctagtgatgcttttctgattatatatttaatttgatcaattatgatcattagtatttatgcctagctttatggtgacaaatagcatattgcaccttagaaactgaaaaaaggtataaagtgattttatcaaaaataaaaacaagtgatgatgagacatgcaaatgaagcatgtaatatttagattcaagcttgttattattaaataatcatttaaactttatagagttgtttttccaactaagcctattaatgctttttcccccaaccttttctgtctccttcaaggcttaagcactttcattataacccattttgaaagtcaagttaacattatccccatcattaagcaaaccatacccttttaaaagttcatttcgaatttgaagtatcctttgcttcaggttacttgcttttacaaaaactctttattcttgctgatttctttccacaaatgaaataaaggtaaattacaatcgaaggcttgatcctttatgttttatgtgtgttaaaagatttagaagttcttaatg

SEQ ID NO: 33086 - DNA, 3003 bp, Unknown
  misc_feature (1)..( 3003): 2750-1469P.txt file - cDNA_ID_3065439; gDNA_ID_1620475; Annot_ID_158154
agcctatttacgaagaggaaccgcaagagaaatgttaggcgattgcaagggagccatagaaggtaagctttaaagaacataatctgattgttttttcgccttgtagaatctggcagaatataacataaactctgcagatttcagatacgcacttgtgctggaaccaaacaacaaacgagcgtctctctcagcagagagactgagaaaattccagtgagcttcttttgtccgtacctcaccgatcattgagaaaacgtttgttccttagaatttgtccaagagtataggccaattttgtcaacacttgtcttttgcgtctgatatttaggcattttatctagagataccttttgcaagtccgccgagaatggaaaattataatatccgatgtttattttaaacgttctctaaaattggatatcaaaaagtaatgttaatcttaaacaccggataccggcattcccggtcgacttctagtcagcgtagcgtcaaaaataaggtcatgtctttaactatcttgtctttatcattttcttttctcgcacgttatctcctccccacgactcaaaaaaaataaacagaaaaaaagaggagtagaaaccaaagagacctgccctaatatttagcgatgatagtttgaacggaacgaaatctgacgaaagaaactaaagagacctttgaattatcttcacgggtgagttggttcgtttaaccttttttctttatctcggttgtgcttttccccgagaattaaacgtgtgttggttgcagcgttaacaaaaaaaaagggttgtagaaagtgagtaaggaagaaataatcaggaacattaataaaggaaatgacaacggcgtgtccggcgaggacaagctcactaatggacgatctcttgggcctccttagaatccgtatcaaacgtggcgtcaatttagccgtccgtgacatcagtagcagcgatccttacgtcgtcgtcaagatgggcaaacaggttaatccattcatcattttacaacttcacatgcaatttcattacatcaaaaacattctcaaattatcatattaaatcttacagaaattgaagactcgtgtcattaacaaagatgttaatccagaatggaatgaagatttgactctctccgtcacagactccaatcttaccgtcctcttggtactttttacttactaaaacatacattaatttccttatcataagatgtttatattgataaaactataatgttatatgtagacggtgtatgatcacgacatgtttagcaaagacgacaagatgggcgatgctgagttcgagataaagccctatattgaggctttgaggatgcaactcgatggacttcctagtggaaccattgtgaccacggttaagccaagtcgtcgtaactgtctagccgaggagtcacgtgtcacctgggtcgacggcaagctcgtccaggatctcgttctcagattgcgacatgtggaatgcggagaggtcgaggctcagcttcaatggattgacctccctggctccaagggtctatgaatcttttttcttttcttatttaccgttactttgagttgttttctttcaaattgaactaaaccaagtaacagcatggaaaaaaacaagtaatttcaatcttgaaggatatagtgaactagaaacacgtattaatccatggaaatataaggattaagaacgttgagggaagttttgttcccatatggtgatcgagtccaagtcgagtcgtggtggtggatatgtaaatgtggtgtattgttgatgtgtatgtatatttgggctagctatgccttaaataaggcatttacacgaacaactaatacagatattttatttatttaattatcgttccatatacttatgaatggtagattgttttaacacatgtgatgtactaatgtttataggtaaaaagtgaaaaaaagaccagcatattaccatttaccatcgacatcgataggccttttttaaaccattgacattggaggttttatgtgtacgttactgaagcacaacttatgtaatttttgtgaacaagatttacttgtacattagcgctaattaaggtcataaagaataatgatgaagaaagaataaaatatcgaagggaaaaagccagaagccacaaaagggatggtaggtgaagagaatccagatgtacactaatgagtgaagcaccatggttttataacgacaaaacacgtgagccataattgtcctttactatgagtggcacggcgactttacaataatgtgtcaaacgaccgtgacaagagtgaagtgtagtactagtatgtgatatttttctctatttaataaagtaaaagattcgactgtagtatgatagtattgagatatattctaaattatgtataaagtttgatagatcccaagggacccaaatctcgttccccaatgagcgatctagagattcctcttccaccaactccccaaagtagtcaacatttttttaccaaaacaacgatttatttgtagaataaaatctgtcaacatatatattgcatataaatgcaattgcaaatgtagttaaaaatatatataaaccataacttaaaatgagtgacagcacaacattaactaaaatacgcttattattattaccggttttgaccaaaacaaaaaaaatggagatatttgtttaattaccgactgatttgattttacagtctgtaaaaaaggccgaagtcgaaggtaacgccaccgttttccacctataaaaaagggcgcgcaggcaacatcacactctcacactcttttcgctctcagatctgaaaccttatctgaattacatttccccgattcgacgttgtgcgaattgatgcagcagagaggacgatccgtcaaccgcagatcacgaagcttctctagatccagactcgccgtcgaaggccactgaattactctctcccctctcttggcagatcttcttcttcgttttttcccgacaaacgacatttccgaaatg

SEQ ID NO: 33087 - DNA, 3003 bp, Unknown
  misc_feature (1)..( 3003): 2750-1469P.txt file - cDNA_ID_3065443; gDNA_ID_1620475; Annot_ID_158152
ttcccttcaaataagaaaaacaaagacgataatcagaggattaggatttggagacaaaacagagatcatcattgaaaggaggaagaagagaacaaaccgttcttgtcgggaacagacaaagaggtgatggtggtgccgtagtttgagatcttgacctgcatggtgccattgttgagctcgaagatctctggagtgtttttgctctgatccgccattagagggctcgaagactaaattaaaggctttaagattagaagcgaagtgattgggattgagatttttgattggggagaaacaaaacagagggtgaagtgattagctttggttaaaagagttataaaatcgtaatctcgtaactgatcaatgttgacgtcatccacatcccaaactatttatcatttttaccccccaaacaaaaaactatttatcttgggggtttttgtttttcgttttttacactttaatgcatttctaaactttttgaaaatcaaattactacccaaaagttaccaaatttactttcaggaattcaaaagttaccaactaaaatccaaaactatagagattagagaaaagaacaaatgtagaatttggatctaattttctaattatcaataatattttaagtaaaaaaatatttgattagtcagttataaaataaaaaatttgataagtcggattatatgcttttgacaataagagaaagacaaagatatcatcagataacaagaaaataaataaaatatactctaaacatattcagtttgaccccaaaaaaaaactctatacatgatcgtaacagagtattcgcgtgaatttagatgtagtttctctaccctttttcaggtatcctatgaaaaaatcaatagtacctataaaagcttactttgttgtaatttatcctcttttcgtaaattttaatttgctaccatccaacatgtctcagcttttacccaaagtttacaaaaaaaatgtctctgtaaaggattttgattattcccataactagaaacaattaaatcaaatttatcaaaaatatcaaagctctctgagacatggaaagaaatagtgtaacagatggccaagaggactttagcttaaagaagcacaatcatttcaaaaagcaaatcatttgtcactttcttcttcttcacctatccatccacaaaaacactttccttttcctctcatcaagaaactccctaatccgacgtcgttcgttttaattcagtgacacaatctcccacatcttcaaaccctttgaaaccagcgattacagagatgcaagatcctcatgtcccatcttctccaactatctcctccgtctcttcctccgatcttgatactgaggtcagttcctgcaatcttatacttaatagataatctaattaaagatcaagctcttcatgtgttttctaagctacccataaagctttatgctataaagtatcaacctttaattagaaaactagtttaaagttccaaaggttatgttttcagaactgcccagaaacatatatatgtacttgttagaacttgatttggtttttttattggtgatgtgaggatttagtcaacaggatcgttcttccatgacagaagcatcacacttggaacgcttatgggatttagtttcactgcaactatgccgatgccatttagagcctcttcacgccgccacgtgtcaccttccgtcgcaatctcacgagcttctagctccaatgcaagacgcaaccaccagagaaagcgtcctccttcaaattcggctgagcctgagccgcatcgccgccgtaaatggtggcggttttgccgagatgacgatgacgacgccgccggaaatggaatccaccgtggaacaggagattcaaagcggtcatcgctcggggagtatctagaggtggaacggaggtttggagatgaagccgtttacaactccgccgaggcagagctagaggatgcggtggtggcacggtaccaagatcagcagccggtgatgggggagcgggcattgttcgctgacggaagggttcttcctccggcttcagctgaagtggttaccggagaaggaacgccggtagccacgtccctttgtagatttccggtatctttaaccggtatatgcagcggtggtggaggatgaatacgtcggttcatgtgtgtgtcttttatttgtatttagacttaaatttttgtattttgttcgtcgaatcggaatcattgtttgtggaaaatataacatgttgaatgtagtcattgtcaaagtaattatttgagaaataataatgattgataaggagaattatgaaggagattaattacaatggcaatagtaaaagataagcatatagaatggcacacatgcacagcttttggtgtaaaatggagttgttcacttgattagagtttttatttaaaatgctaaacgttgttctatcatattgagtttttgcttcaaattatttcatcaatacgtctttatactagtcagtctttggacaataatttgaccaaatcagattttgaggcaaacacaatatgattctggccaggagtgtgccacattcgtggttaattttccactagtatttctgaaagtaaaacaattaaccacaaatcatcctcataacataagaggagaagattcctaacgacgaagcaaaattatcgaacaagtggacacacacaagaaaccgaaaatacggcaaaatgtttgttatgtgtatccatattttataccaattgaattaataaaataaactgtaaaaacaagaaacaattaataaaattaattttttgttttacaacgtgaataaaaaactgttgacaaaacgaaaataaaataaaccctcgagtgatgttaaaaaaaggaagaaggaaaaagaataaaaactcaaagggaacgcaacacactaaacaaaaactctttggcgtccttctccttagggtctatctctcttatcttaagcagcagcagcagcagctagaacaaaaacgtcaccgatg

SEQ ID NO: 33088 - DNA, 3003 bp, Unknown
  misc_feature (1)..( 3003): 2750-1469P.txt file - cDNA_ID_3065451; gDNA_ID_1620475; Annot_ID_158146
ttagatgacagatcagatcagttgaataagaagagttaagagagcagagatactttaagtggtagtttgctacgctatcggttggatataacaggatgaaccaagtaaaaaaaacagaggccatgttgagaaactaacaattgtcgagacacaaattaaaaactgaaaatgggaaaagataaaacagtaaataaacgacaaatacaagttgatagagggtggtgcagcttgcttgatttgtacagagcttggaacaatctacgtctatagactcgccaagatccacttttttgaagtatcccttctttccaatgataaaagctatgttgcgagtagggcgaggtatatacctgtctttatcaagtaccacagcgaccttcttcttctcgtcaacgaagaaactcccacctctaaccagaaactgaaaaccaagaccggtgattggtttcatatcaacctttaagaacaacttgttccacgataccgcattgggctcaatcctgctactaatccatatcttcaccgtataaccaccacattgttgaaatagcaccgcaagatgcttttctctaacactagaaagagtcacaggcagaggcagacgcggtccaaatctctctgttttagaatcaaaacatagtaagaaatcagggatatctcccacttggaaacaataatatttttgccagaactaaagctaactgatttgtccattaacctaattgatttacggccttataatgatgtaaatgggctcaacatttggcccaacaaaagagcagtttcctaatttcatctgattttggcagcaaactgatcgtaacttggattctgtctgtgattaagtaggtagtcattcataaatctggagcttcgaaaatctctctggtttaggtaattactgtcgcatataatgatttattgctctaaatccaacttttgaaattttccaattacgaccaattctctataaatttctcagcaaaaatcacggcgggaatatgaggcggctaccaccgtggatgctcggtggcgcgtcaaccggtgaagcagctgcacgcaatggttcacaacccgaagctcccaaaacaaaggctgaaaaacgaccaaaaagagtccaaaaaaccaaagagaaagacttaaatctcaagtcagatgaacctaaacgagttcccaggaagattagggaagaagctaagcgtagcccggaggtgattcaatcagtgactgttcctgaagatgatgatctcacagttgatgacttattaagctttgctaatgaggtaatgtaatacttcagttccacagtttttactattaaggatttgtgaatttacttaacaatgaatctcagtatgtccaacgtgatgaggaaggaacaagaaaggagcgtgaaagaagcttgtcagtgtctgaaactacgctagttctcgatgaaaccaatatgactacatcatctcaaggaggaaccaaagattcaacagcagaagacatgttacaattgctaatgggtcctttttacaagaaacgttagaattgaagcacaactgagttttcaagtgcttcaacatttcttttttacttttgttactgttttgaattctgttccagagatccaacatctttataaagctttgtgtttttttctccaggaccaaaaatattatagaatgtaggagctactgagttcataagcccatagaaagagcaaacgaaagcattgtgctcgtgaaaattagatttccttgattttggcagctaaaaggaccgaaagcaccactttttcaagcgcatcagtgacgtgctgccttaactaactcaatcacaaacctaaagataaaaacttcaaagagcttaagaatcaaagacactgactaacttgaatattcccacagttacgatggctattattggttaagagtggggatgggtgtatatatagtgacggccacatgtagaaaaccctagttgatcacggactaatgggctgagtttgttatttcctttattgggcttgtaagaataaatcacttggtcttagtagtttgtaagttagtggttacctccactaaatgaatatctttgtaattgttggctaactttaatgaatgtgaagcatgcttaagaaaacaaggcaaaatgtaaaatgagaagaagagaatcaataaagacatttaccctcctaatcaatctttcataaactgtatatgaattttttttagggggttttctgaccccaacataatttaaagtaaaataaatttgatcatatgaaagtttaaggaataattaaacaggttgtatcgccggaggtgtttccgtttacctctctcacacctatttctcttcttctatctgacattcgaaagctctctctctctatctctcttttttaccgcgcttgctacacattgtggcagacatcaactcctacctaaatctggtagcagcccattttcagatcgaattgaccccaaggagatcacatcaggtataagaatctcaagttagctcgtatcgtcttctttagctttcactgcgtttcccgttgcttaaacatgttcaatttcgatttattcgagtgtgatctggatcggcttcgttatcattttcgtttttttcccttctctgagtttggatccagtcaagtgatttagatgcgataaagctgggattgttgagagagaagatcaattctggttaatattgactatatttggctcttctgtgatttgcagtttttgggggttttgaggaatgaatttcttgcttcgatctgcttcttccgctactcatcggcctccggtgatcgaaccaccagctacgccgcctcaacctccccctgaaacagcgaagcccggagttactttggaagggctgattgctgaagagcatttcccacaatatccatcagtagatgaagatctcgatcgtgtgggtgatggatctggagaccttgatggtaatggagagtcaaatgctaagtctggtggctctggtatg

SEQ ID NO: 33089 - DNA, 3003 bp, Unknown
  misc_feature (1)..( 3003): 2750-1469P.txt file - cDNA_ID_3065457; gDNA_ID_1620475; Annot_ID_158144
taggtagaaagattaaatatactcaaaagagtgagttggattagtttataagatgattaacttcttgattgtgtgagttggattagtttatgagattattaaaatattgattgtgtatttgtgttgtgtgttgattaagcggaacttgcgttagaatattgttcaaggtacaatgtggaaataatagttttctcaccacgaggaatataattatttcaactttgttttcttatcagccaaaacgtgccacaccataaaagtagtgcatcaacatgtggtgtggtgtggtggggttaaagtttgaatctctctttaatttaaactattaaaacaaacttaaattattggagtttcgtacaatgactttcaatcaaatgttttagaattagacacggttttcgaaagtggttttccctcgttgaatttgtcaacagtatcagattctacattgttggttactaatcttttccttgaagtaggtgttgaattaatcctctgttgtttatgtaaggagatctcgagacatttatggttaacagttaacactacatgtttgactttaaactgattatcttttattctttttcttttgtagctcccaacagaggaatgaactggtctttctcaaacaaagtatcagcttcttcttctcagtttctatccttcaggccaactcaagaagatagacatagaaagtctggaaattatcatcttcctcactctggttccttcatgccatcatcagtagctgatgtttatgattcaacccgcaaagctccttacagttctgtacaggtatttgtcatcaaaacctatgttaaccaagacccttgtgttttttttatccttcgcaagatagctttaaaagtgagccctgttttatgagcatatagtaattggttttgagtctagtttagcacaagttcatggcaattagtttgtggatctaatcttggtttaatactgattcattttaagtgtaagctaagcttctcatttttgataagttagttcatacaatgcctcacacctactttatggcttgttactctcagggagtgaggatgttccctaattccaatcaacacgaagaaactaacgcagtttccatgtcgatgccgggtttccagtctcatcattatgcaccaggaggaagaagcttcatgaacaataacaataactcacaacctttggtaggagttcctatcatggcacctccaatttcaatccttcctcctccaggttccattgtagggactactgatattaggtacccactagtcatcatatcatacagaaactctttctacattttcatagttgactaaagacttatttttgtcagatcttcttccaagccaataggttcacctgcgcagttgacgatcttttatgccggttcagtttgtgtttacgatgacatatctcctgaaaaggtatctcaatcattttcttccatatatgcatctcttttactcgtaaggtatggtactcatttgctttctttcatttctcaggcaaaggcgataatgttgctagctgggaacggttcctctatgcctcaagtcttttcgccgcctcaaactcatcaacaagtggtccatcatactcgtgcctctgtcgattcttcagctatgcctcctagcttcatgcctacaatatcttatcttagccctgaagctggaagtagcacaaacggactcggagccacaaaagcgacaagaggcttgacgtcaacatatcacaacaaccaagctaatggatccaatattaactgcccagtaccagtttcttgttctaccaatgtaatggctccaacaggtaaaaaacaaagtcagagacctgatactacattcgccatctaacttactagtattttcatggatgtaacttcattctcgttctgtttcttatgcagtggcattacctctggctcgcaaagcatccctggctaggtttttagagaaacgcaaagaaaggtacgcaacacttctttagaatacaccattcaatagtttcttgggctaactctctttctcgctgtgggtttctcagggtcacgagcgtatccccatattgcttagacaagaagtcatcgacagattgtcgcagatcaatgtctgaatgcattagttcttctctcagctctgcaacctaatttcatctacagtaagaaggttgctttagaccactccacatccatatttgcatttcaatggcggtcttttcaatgtctcagttaatttttcctcactcgccacactgagtttctccttagctttatatatacgatagtgtatactttgtttacatgttttttggtggaatggaacttatgagagcatatcagatatgtacttgggaaaattagtagaaactgtttgtttctttttttttaactctgttcttttgtatatatcactgaagctcgcatatgtataattcatgtaatggaattgcatcgcttctgtttccctaagttatttctctaatcaattttctattcaaatatggggatttttttaataggatttgctaatttgtactctggttaacaataagcttgatacattaccagttaccaactcgaattcacaaaagaagtcatcattatatatggagaaaatggaacatcttttagaatttgctttaattcgttttggctaattatttttcggtcttcgttttggctgtgagtttctttgtaacatcctaatttcaatatgtgggccattttgtgttgtagcccatcaaggcccaatgtcttattgcacaacgaaaagggatgttgcaaaagatgataaaccggatatgaattcagtcgcggttaagttaacgcgaagacaaaaccggttggacatgttcggttttcggcgatgattatttcaacgtttttcagtctaatcaaaaccaatacgagcagacacagctccgtacgatcacaaggattcactgatttctaagcttttcatagaaagaagaagaaaaaggcggaattcgatg

SEQ ID NO: 33090 - DNA, 3003 bp, Unknown
  misc_feature (1)..( 3003): 2750-1469P.txt file - cDNA_ID_3065461; gDNA_ID_1620475; Annot_ID_158143
catgtcaagggagaagagtcaggcaaaacgatcatacaagtcacaagagataaagatggttcaagatgagttcgatctacttctctttattttcagatcaacagttttgtaactattttttatttatttttcagtaattttgctagctaaatattaaatgatgtgttcacgttacgtctatatctcaattaataacattactttctgcttttcaattatcgaatagattgaatccaaatttttttatgacgaaataaattactataatggtatgcatcatgagtgtactattgtattcttgcatgtgatttttgatcaacatggtgtttttgtcattactatcaaaagacttccatcgctgcgatattggattgtcagaactcggaaaaaaacaaattatgtcgtagctcaattccacgaaaaagtctaaaacaataattagcagctctatatagataatcgaaggcaaaggtaattgtttataattttgcaaaagcacgacatataggataacgtgcactcttcaaaagctatttagcaatgcaatcacggtggaatttgtgcatgtaatctcttagcctaacataaccaaaacctatggtgacatcttctagacagattggggaaacttcttcttcgtctttccctaaactccccttgttcttctccaccatgcacagccctctctaacttccatgaaattccaagacgtggagatacattttggcccctgaatcttctcagctttatacgtacacctccatcgtaaattattgcggaggcgtaaacggtgaaggcgccgtaaacaagggtcgaaattaggcaaacaagtcggcatacgatgtcaagagcccacgaaagactaattgcttctggatgtccataattactagcaaataagtctatatcaaaataaaaactaaaatgtaagtattaacaggtgagaaatgaccagatcattaagtagggaggctcttctctggatctggctcgacgtcgacgagaagcaggatgagccatcaaaggatccactaaagcaccaaactcaaaaaaaagagagccaaatattgcaactactcaagtcagtctaaatatagttaaatgctgcgctatatatcatgcatatacatatgtcatttgattttctctttgccattatttactctcattcgattttaatacaaaattatttaagttgttgttgtaaacagacgttgctgttgctgttgagtttgatttagaatagttaagtttggttttggttggagaaaagttttcgttgttaagccaactcgtgatcatttaatctgttctttttttggtagggggtgatcattgaatcttttgttttgagttttgtatgtctatatagagtctaataccattaaaacaaaaaaaatgtcgtggtaaccagaattaaatgatgtaaaaacagaaaacaagaattaaatgtcggatgtaaaaacagaattaaatttcggatgttttatgtggatcatagcgtgagagatgcgtttatggcatcttttgatataatcttcgctttgtaggtccacttttgatctgatctgatctattatctatatggaatgttgtgtatataataaactgcagtgtagtattttcttaataatgtgatattaatatctaaattctaggctggagaaaatgacgtgtgctgcatatcccccagactcgaaataacgatgttatcgtgggagatgatcgtcaattttttttttgtttagagatcgtcaagttgttgtgatcattgactcctttccattttttctatagatttgaattttaaatattcattttcataaaaaaatgaaaactttattattatatttgtgagataattagatatgttttaaaacattagtaaatttagtatagtattagtttttactaaattaagaagaaagtgacgcacgaaatggcgtaatttcctcccccggaccacatgcatcttataaatacacaaaaacgatgtcaacgagtgattttagtaatatgtacattaaagtaatattttctttttggtaccaataattaccttaattaatacaagtatagtttaagcaacaagcaacattctttaataattcgcgaaaaatattaataaaagtacaatgacagaaaaaataattaaaaattggattaaaaaaaataatattagagtgatgacataatcacatgaggatttagatttagcttaataatgtttagttgtggaactaaatttccgcaacaattattttgttgtatttaaatcattttatgaaagtctaatctttacaattactttatagtaccatccgattaatcaaagattaaaaatatagtactaaaatacaaattaatatattttgccaaaaaaatgcaacgtgcaaatgtttatcttggtcaagagaacgtgcacgaaagtagtgtaactaattttactattttagattgagcggtgagacaaaaagggggttagactcacgcgctacacttagcgcgtcagccgacaaaaaaaagtgttgtcattgaataaaaaaataaattaaaactgccgcttcgcatctcgtgaatcattcacgttaaaatagcgcacgtgcctcgccacgcgtctcaccacaaaaagaaacgccacacactgcacgacgatgcacgtgcctttttaaccgactatatccggtgacgtaaccgggacaacctgtagctggtttttgcgccaataggatatgagaaaaaagaatcttttttttcttgttatagttataaattaatggtacgattcacatgtcgcatgcgatttgttaataaaactagaaattgcggtgaattaacttcattccacgttttttcattttctccctcaaaagtctctgttttttttcctttttccggcgaagctctatttagcttgattccggcgtttaacacgcgttttaatcgaaacagacatttgagatcgaattaattttgtagcgggctgtgtctttattatagatg

SEQ ID NO: 33091 - DNA, 3003 bp, Unknown
  misc_feature (1)..( 3003): 2750-1469P.txt file - cDNA_ID_3065467; gDNA_ID_1620475; Annot_ID_158140
aactccattaaacagtgtagtagttgtgatggtaaaggacgtgtgatgaattctcagagaacaccctttggaatcatgtctcaggtaattcattatacccgaatactgtattgatcacttgctattactaaaatgaaatttttcatttcccttgatgcttgctatagatgataatatgtgtcatataggtgtccacttgctccaaatgtggtggtgaaggaaaaactatcactgataagtgtcgaaagtgcattggcaacgggagactacgggctaggaaaaagatggatgttgtagtccctcctggtgtcagcgatagagccacaatgcgaattcaaggagaaggtaacatggacaagagaaggtacaggagaatctgctatgatcttttctgatattaactgctctggcgattggttcttttcaacatggtttctgttttccgtagtggaagagctggtgacttgttcatcgtacttcaagttgatgagaagcgtggaattcggcgggaagggcttaatttatactccaatatcaacatagatttcacagatgctatacttggggcgaccacaaaggtggttataaaattgtttattcctggtgacgttattcggaagtatgaatcttgtaggcacatgacatctttctttgtcaggtagaaacggttgagggatcaatggatcttcggattccgccaggaactcaacctggcgacaccgtaaaattacctaggaaaggagttccagacacggatagaccttcaatccggggagaccattgctttgtagtgaaaatttcgatccccaaaaaactgaggtttgtctcacatcacttcccttttttttccctttatgtcgttattctatactaaaaaactgcttgaaacatcgaatatggtagcgagagggagcgcaagttggtagaggaattctcgtcgctcagaagatctagtagtagtactggacctactggtacaatgctatcccaatctaattgaaactcataattttcaatacacaatgttaaaatcttataatccccacttgtagaaactcgtcaagaggagcagagttttggctcagagcccagaaaagaaccatctttgtggcataaaatgaagaatttcataaggtaatctcatagaaacctttttctcagtagttcatcaaaagacacaacattgttgtcttggtctgatacatagtttttaatgtcacgtgttatatagaccagaagattcaagaacgaaatttgggactatgagcttaaacccatcattaccattacgaagaatgaaagtgtcagagacttcaattgctttttcagtcttggctctgtgcgttataacctcggctgttgcattggtacagaagaagggtaatcgcttgaaacaaaagaaagaaacttaatttcgtcaaaaaccctgaaaccccacaggtagaagtttaatttcaagtaacagagagctttttacaagatttaaaaggccctcggtcatacaattctagtttctagagattgtttgtcacgcagaagagatatgatcttgtatgtatgttttatcatttatatatggttaagagcctagttgtgatatacaacgaaaggaatgttattacttgaacaaatgtttatgtatgctagaccagcttaaaccgtgacagaactatgctttgaactcaattcagtcctcttatttactttgtttgtccctctctcattagaggaacctttttaggcaatcaagaaaaggtttcccataatcccatatctattagtatagtcttttattgcttagtgggtctcaacacacagctactatacttagtatttacattatgatgactaacgtctttatcttccaaagtaaaacaatagtaaagccagctagatagttaaaaacacaactcaatagtataccttttgttaaatggcttaaaaacaactcaatattccaactaccaaactgtttatccacatgtgcgatcgaaaatagatccattaaattactacacttcatatagttttactcttttcttctaaaatgtaacgcccaaccacatatcaatgtaaccgtcgtgaatcttttttcatcttttattgtaaattatccaaaatatgaatcacaataatattacctttgtggaccatgaaataatttattcgatggatagaaaaattggtaagatagtaagattaatgggaccctttagattgatgccgttgatatgcagagagtggagacaataaaaaaacagagaatgcgttacttgtaaataaaagagcctactttgaatgctgttaaattattgttgttggcttttttacatgtttatggtcctacctttctctgcatacccatgttcatttttttcttttcttttacaaccatgcattatcatactactatagtaagaaaaaatcaattttattattaaagaagcaaaacaaaaaaaaatacatagaattaagtgttatcttgagaagagtgattccactttactcagatgcagggaatttcataatcaaaacctttgtattccatttctccataaacacacacacccacttgctaattttcttgttaatccgattgattattaaactctaagtttttgtaatccagttaataatctttagcagttggaatttagataagacaacacagcttagtggtacgaatgattcacataagattctataatatcaataagttaaaacataaaaaccaataatagaaattaaaaaaaaaaaaatacaaatatttttgtcgaagcatataaagacatacgtcactgttgtatagaaattgtcgtttttgtcacatttagattttaatttgaaaaaatttcaaaactcgaaaaaaacaaaaagtggagaaaaagagaaagagagagtgttaagagtgttgactagcttcactctttctctgtaaaccacacacacagcttcttcactgagagcttttttctagggtttctctctttgtttcttacaatg

SEQ ID NO: 33092 - DNA, 3000 bp, Unknown; identical to SEQ ID NO: 1997
  misc_feature (1)..( 3000): 2750-1469P.txt file - cDNA_ID_3065483; gDNA_ID_1620476; Annot_ID_158172

SEQ ID NO: 33093 - DNA, 3000 bp, Unknown; identical to SEQ ID NO: 2006
  misc_feature (1)..( 3000): 2750-1469P.txt file - cDNA_ID_3065519; gDNA_ID_1620477; Annot_ID_158207

SEQ ID NO: 33094 - DNA, 3000 bp, Unknown
  misc_feature (1)..( 3000): 2750-1469P.txt file - cDNA_ID_3065527; gDNA_ID_1620477; Annot_ID_158204
tgttctttccacctatgtgtgtgtgtctctgtgatgtttataaaaaaaaacaataaatttttttagaaaatatctggatgttccaggtttgttattcgattcagagcaaaacgattaagtgtttaaatggatttagatttacagtaaatatccagatagagagaaagaaggataaggagagaagaaaacgattactttcttctattcttgttcattacaaccttataatctcaacatttgttttttttcttttgttctctctttcttacatatttcttttggatttcgttgtcttttttttttctctcttttcttctcctctctctcgctcgatttcaatttgggcgagaaaggagcggtcttttgtctttcctgggtttatcagctagatccctcttgcctaaagtttgtaactttcttagggttttcttctgatttcctctctctcggggttaattctgctcaaaaatgtaagcccttctccttttatttcgtttgttagattttgttttgcttgatctgattctgttatgtaattttgggttcagggtttgattcagaggcaaatctggttttgtttagacaataaagttcgggactttttgacatactcacagctggtttttagctttggttcttatagagagtaatagtagtgaagggtttgtgccaatagttagaaatgatcaaacagatatttgggaaattacctagaaagccttccaaatcattgcagaatgactccaatggtgaaggaggtgttaataattcttattatgcttcgaattcgagtactactagtatctctaaaccttcttcaacatcttcgaaatcatcatcagcctcgggttcgcgtgtagctaatggaactcttgctcctaactcaatgagctctaataggaatactaatcaagggaagaaaccattgggaggagatgctgttgtacaagctggaccgtttccgtcttctggtggggtttatgaggctttgcctagctttagagatgttcctatatcggagaaaccgaatctctttatcgggaagttgagtatgtgctgtgttgtttttgactttagtgatccgtctaagaaccttaaggagaaagagattaagaggcagacattgcttgagcttgttgattatgttgcatcagttggttttaagtttaacgatgtttcgatgcaagagttaacgaagatggtagcggttaatctgtttagaacttttccttctgcgaatcacgagagtaaaattcttgaaatacatgatatggatgatgaagaaccttctttggagccagcttggcctcatgttcaagttgtgtatgagattcttctcagattcgtggcttctcccatgactgatgcaaagcttgccaagagatatattgaccattcttttgtcttgaagctcttagacttgtttgattctgaagatcaaagagagagggaatatctaaaaactattctgcatcgggtgtacgggaagttcatggtgcatcgaccttacatcagaaaggcgataaacaatatcttctacagattcatatccgagactgaaaagcataatggcattgcggagttgctagagattcttggaagtataattaatggttttgctttgcctttaaaagaagagcacaagctcttccttttgcgagccttgattcctctccacaagcctaaatgttcatcagtctatcaccaacagctttcgtattgcattgttcagtttgtagaaaaggacttcaagctcgctgataccgttattagaggtcttttaaaatattggcctgtgactaacagctcaaaggaagttatgtttcttggagagttagaagaagtcttggaagcaactcaagccgctgagtttcaacgttgtatggttccattatcccgacaaattgctcgatgcctcaacagttcacatttccaggttcgagtctttgactatcatcacaacttcatatctatctctcttgataaagtcttgtacctatatatgaagttgtactttttgtttgtcaggttgctgaaagagcattgtttctatggaacaacgatcacataagaaacctgatcactcagaaccataaagtgataatgcctatagtcttcccagctcttgagagaaacacgcgtggacattggaaccaagcagttcaaagtctgactataaacgtgaggaaagtattatgcgagattgaccaagttcttttcgacgagtgtttagccaaattccaagtagaagaagtgaataaaacagaggttaaagcgaaacgggaaaggacatggcaacggttagaagatttagctacttcaaagaccgttgtaaccaacgaggcagtactggttccaagatttgtgtcctcagtcaatcttactacaagcagctctgagtccacagggtcgtagtaggctctcgtaggttactatgtacttgtaacaaatatttgtggtcactatagaaatggttcttgagagacgactgtataattatttttttaaattataatcttttgggtcaaattgagaatatttgatattattttactgaattataataaacgccgttaaaactctcgttagttaacggctgactctgaagtgaaaactgaaaagtcgaagggtctctttatattttcagaatcaaaatctgaaatttatctctcggtcgatccagtcttcgtgagtgacttcgacgacgacgacgagtcacactactcttgagcttctcatacttcgtaagttcactctcctcttctctaaattgacaaactttttcttcgttttctgctattattgacgacgagacttgattttgttttgaaatgaaatggttcaagtagctgacttcgactatgttcttttgggtttttgtcattgaatcttacttgtctgatttggtcgatgtttaatcaattcaacacttaaagattcaatttttggattgacacttgcacatttttattcagacccaggttgatttgggaaataatg

SEQ ID NO: 33095 - DNA, 3000 bp, Unknown
  misc_feature (1)..( 3000): 2750-1469P.txt file - cDNA_ID_3065531; gDNA_ID_1620477; Annot_ID_158199
tttcagttacgtttatcaatgtatgatcgatggaaacccccaaaaacaagctcagtttttatatttagattctctacataatgtggactcatcagctatagtttgtaatgtatcaatgagctactcaaaatgtcataagctctacaaagtatgttaagttttatgacaatgactgtattgattatgtcttctcgagatgatgacaatatttatttaacctttgttcaaatacatttttttaatattttataggaaaactaatacaacttattacatgtcaaaactagtgtaaccaattacacaagtagtccgatttggtataagtacaatatgaaaaactggtcaaattaaaacaattagtttttatttgacgccctcttcctaattacatttcaatctgttaatgtcgatggaaataatatgaacgatttgattgcgtagaactaattctatttgtcaactattgaaacaaaacatataaaactcaattttgggggaatataattcatcagagaagaataacacacttgggattatgtataacataccttaggagaatgatatcacaaaacaccaatgtaaactctacaaaaaccagttaaacaagcaacttgatgaagtcttggaaaacataacacgtatggtcaaatttagaagttgtttctatagatgaaatcatatattaagaaaaggtattctctcatcttctgttgaaacaacttgctagttatacaactagaaaattttacttattcttcactaccaagctatatgatcatattttatggtcttacatttttgttggttattaatatgatcaaatggtaagtgtttacgtcattaccttcgatcatccaacattatataggaacgagcctcacatataaaccaaacttaaaagtactactgtactaagaaagaagacacaatgtccacatcaacccaagaaaaccaatctgcccaagcggtgaacgaagaagttttgttggagaatcccgattacggagtccaaatcgtcgataaatccgaactgttggagctagccttgagtttcttaggggaagacggagaaatcatggaaaaccctgagtttcttggagatatcatgggggagaaatcttcaagtacttcaggtaagaacaacaatgaaattgattggaaaaagtttgcaccgaaggctgaagactacaaaaatggtgtagccaaggccatcgcggtaggaacagggcatatcatcaagggaatcttcacttgtagcaattcttactctaagaaggtctcatacatataagtccctctcatgatgcttatgagtgttaatagatgattgtgatttgaatcgaaatatttgttgtagtaaagaatcatgaacttccaattcaaacccaacttgtggaacgacttatgtgttttatttactagtatagatcatcttatttttgtgttggatttttaaaaacttttatatgaacatggagatgtaagacgcacatattgtagtattttttattattaatatcgttttattttcttacaacaaaaacagattcacgaggaaggaacgattgctgaagaggatgaggaaagaagtggtgacatatcacaaattgatggaggtggcaacaatgaaactaataagaagaataaactcaacaaaaatcttcaaaggtattcatattttaatctctatcccacaaaatagtatatattataccaaacaataaaatcttggttcttgttccttcttataatgaaccaaatcttggttattttgttggatgtaacatatacatagagcggagaagctgtggaaggtgagcgaggctataggaatggcggccttagaaggtggagatttggtgagcagttcgatgatagctccggtggttaagtcgaagttagggaaggcattgttatccactgctccaggagaggttatcttggcatcacttgattcttttcgtaagttacatagaatagctccattaattgtcaatctatactcatattcatttattttgaagtttttgagatcaaaatttaaataaaacagataaacactttgatgtggtcaatagataatataattggtgctgctgaagcggcagaaatacaaactcattatgccacatccatggctgctactagacttgtgagtaagaggtaaaaagctcactttgtgatcctcaattttgagaatgaattatgtttctatagtaacacaccggtatttgaatcaaaagaatgattatatcggtagaaaataaaatcgaagttggtagaattattgtatagcgtgcatacaatctaataattaattaccaaatagttttgaggggtagctaatgatttttagagataggttatcatttttatttgttaggattgtttagatgagttatataacatgtttacatgaccatcgaattttacaattttatacatttattgagttgagtgtaacacatattcacatttttgtgatgaccgcaccaaagttttggagagaaagccggaaaaaccaccggaataatactggaaacaacgggcagcttaggccgaaccgcctggaatattcaaaaagctctcgagccaactttttccatcacctcaaaaattgtcaaaaatgctcctaggcagtaatatgttatctatcttaaaagctaagttacattttcatatgctgtattgtatcaaattacttaatcttggttttggtgtggctatgactctacgagaaaagatttatacaaaaagagtgtgagaaaatccaaaacgagtctatatatacatcaaattcgaacaagaaccgaaatccaaattttggtatactttgacttttgttattatgagaagttgagaaccacagtcaacgtccgacaaaaccaacaagtacaacagtttaacacttgacagtttacagtatctctctctctaccaagtacagaatttcccgctctagggcatatgtctgatccaatccgaaattgaaaactcatg

SEQ ID NO: 33096 - DNA, 3000 bp, Unknown; identical to SEQ ID NO: 2013
  misc_feature (1)..( 3000): 2750-1469P.txt file - cDNA_ID_3065544; gDNA_ID_1620477; Annot_ID_158190

SEQ ID NO: 33097 - DNA, 3003 bp, Unknown
  misc_feature (1)..( 3003): 2750-1469P.txt file - cDNA_ID_3065548; gDNA_ID_1620477; Annot_ID_158187
gtaaagcattttggatgtttgatacatctcttgggacgctccgggaaattgaaagaagcttacagattggtaaaagaaatgcatgtgaaaccgaacgatacagtattgggagctttgcttggtgcatgtaaggttcatatggatacagaaatggctgaacaagtgatgaagatcatcgagactgctggaagcatcactaacagttacagcgagaaccatcttgcatcgatatcgaacttgtatgcacacaccgaaagatggcaaacagctgaagcgttgagagtagaaatggagaaaagaggtcttgagaaatccccagggcttagctcactagttttgacctgagtctataccacttagctttatttgaagaagtaaaatacttagtgattatgaaattgcctttataaacagtgtttatacaaaaaatcctaaaatgggatttgatgattgttatctgcttgatattgcaaagtgcagacatattcccattagtggttggagaaaaggcaaaaaaatatggtcatctcaagattcgaacttgttggtacccatttcaacctatacaaattacataccactggaccaaacgcaaacttattaaaagtttcatttctgcttctacctctagttggtatctttttcacggctttgttcatgtggtctccattctagttgtgttctactcttaggtgctatgtccttatataaaatctatgtgttcacaagcgatcatcttggtgtcagtcctgtcaaaattgttgataattttgtggtccacagataaaactaggaataccttactatctagctatatcttaagattttatgatcacaggaataccttactatctagctatatctaggcatatatttcttactagaaccatatttgttaaagaataaatattctttgtttttatatatcatttgttgattttttttaaaaaaaatttaccacatgatccgttagattgatattcactaaataagatgttggagaaaaaattatttctactgaaaagtaaaacaatctatacatttaaattagggtcaatttaacttttaggcacaatttggtaagaatattttttttttgtttgacctataaatagaatagactcgacaatcgatattgtttcgacgacaaaggttttgcactataaacatcaaattcactttggaatgtgtcgttcaacctatcattcctcccattctaggaggtggtatcaacatcgtgattcctccgaatgtagatatagacctgagtgtaactacggtggacaaagaaaacgcgtattgggatttcaacttggtttgataagaccgggaaaaacctttgtcaaagttgttatagaagttggaaaagaagtcattctaaacatacgcacaacgccaaaagacgcacgcttcccgaagacttacaaaaataagccacctacttcgtatcttgtgcttcaaccaaagagatctcaacattatccggatttttggaagataaattggtcaagtactcgtcaccaccccacactggccgcagagacagttctaggtcaagagatactgaagcaacaaatcctcaataggctgaggtatcttacatttaatgctgatggagagttagttggtttgtaataacaaatgttgctctttctcctttaagaaacttaacgtatgtgttgttatcagagtttgtgcttttcaatcagagcaacaaatataaatgtggttccaaggttatacatcgtgattcctccgaatgtagatatagacctgagtgtaactacggtggacaaagaaaacgtgtattgtgacatgtctggtatatgtattgagttagattgatattcattaaataagatgttggagaaaaattatttctactaaaaagtaaaacaatctatacatttaaattagggtcaatttaacttttaggcgcaatttggtaagaataatttttctttgtttgacctataaatagaatagactcgacaatagatattgttccgacgacaaaggttttgcaccataaacatcgaattcagtttggaatgtgtcgctcaacctatcattcctcccattctaggaggtggtatcaacatcgtgattcctccgaatgtagatatagacctgagtgtaactaccgtggacaaagaaaacgcgtagtggtgataatggtgaaatcgtgggaggtgaaagtctttttagttagggtttgttcttgtaaatcgtaaaatgtatgtggaatatgaatttcttatattaattttagagttgcttattgtgatcggtctggtctatgtattgaggtagagtcattatgtgcacttgtcatcatttaaatagtttgattgatgttaacttgtgtgttttgacctgagtatgtacaacttaaaaaaatgatcaaaataaacatgattaagcgagttctatgcttttttatacacaaatatcgataccatgtatattcaaatcaagaaaatattcaaactaactatttgaactacaaatttttagtggaaaaaaatatattgacctaaacggatggatgctggtacaaactaaaataatttattatgacgatgatgttagagtttgttaaacaaaatagttatattgaaggaatgggttttgatcccaataaacaattttaaaaaagaagaaggggcgttccgagaattgaactcgggacctctcgcaccctaagcgagaatcataccactagaccaaacgccctttttgttaaattgttacaacagtaactttatatattatctattgtttatttccctccagatattaggtagttcacgctccccgcgaaccctaacgagaccactttactgtcttttgcgcgcctaaaattccccgtgtcggctttcttcttcttcttcttcttcttcttcttcacttttggatctacattgaaatcgcctctagagaaatcaaacccggcgaattggactatcgttgtcggagtttgtcagtggatgaattgccatg

SEQ ID NO: 33098 - DNA, 3003 bp, Unknown
  misc_feature (1)..( 3003): 2750-1469P.txt file - cDNA_ID_3065572; gDNA_ID_1620478; Annot_ID_158236
gaattatttacataaagagccctcatagcttttctccatgatatatgatgaaatgaaacgtatgtacttggaaagcaggtcctttctagtattgtgggtttgtgtttcagtttaatttgaattgagacaaataccccattttgattgttatacttatacatgtagtaatacaacaagtaatcagataaaatcaacaaaatttcctcaaaaatagtgggaatcaacagttaagtagtaagctcttaagcagagccttattttacctaccaacttttacagtttgggttttgaaacagctgaagcaaaagagaaggaaaaaaaaagtcagagctttatggcagagtgaatggcgacaactccaccaacaaggttctcgtactccaccttctcaaatcctgcatctgcgatcattgatgcaaatcgctcctgcactcatttcatgcatctagtgattacaaaacatgcttccgactaaaaaaacgtcttatagactagacatcacctgatcacacacacgatgctcatataatcatagctatcataacttaaaactgatcttcttacaggaatctaacacaaccttaagctatggtattgatcacggcaagttgttgttactaatggttttgacgaagtccacaagttaaaacttaaaagttatcttacatgaatctaacacaaccttcaattgaaagattcggccatgacatttattactaatggtcttgaagaagccatgcagcaaaatcacgaaaacacaggaaaactaatctaaaaattgtgtatattgtataccaaattttcaacaaaggtaacaaaaggttgaatgtttgaacctgagggggaaaccgacgaacgctctcaaccaagtactgataagattccctgtccccggcgattagttcccctaagtttggaatgacctggaaagaatacaaatcgtatctgcaacacaagaaacaaagtgagattatcatcgaaacaaaaaagacttagggacttacttccacaacatgtctaatcatcaaaacttacagatttttgaaaaccggaatttctacatggctgagctcaaggcacaaaaatcttcctccccgtttgagtaccctaacaatgggaagagttttagaatactatacacaaaacgctgacacatgaaaatatacccgaatagaagagggtgtaagtaatttgtaataggtacctataagcctcagctagagccttttcgatgtgtgtgacattccttattccaaatgcaatggtgtatccatccattgaattgtcatcgaaactcaaggcctctgcatctccttcgacccatacgagtgacttgttatctcttagacctattcaagatagtaaatgaagcctgagctcacacatacatagaaaaaaaacataaaggaataacagaggatacaaatttgttgcacaaacaaacatctgatctttcacctctctcagcagctcgttgtttcccaacgtttaacatgttaggattaatgtcacatacgtatatctgagtttcctcaagagaagcctcatcaactttctgcaatgctcttcgtttgacactgtaaacagcatcatagatcctaaaagcaacatcacctgcatattacaaccaatatctataacaaagagcctaaaacattttcaataataacatgtatggactcatgatcagagacagcaaaattccatgtttaaaattgatttgactaacctgttcctccggccacatcaagatgcttcatccctgcaaatggacttagcttcccaacgagtctgaaatcacaagaccaacaaaagtgtcaatttttacacaagagcaattcataacactagtgataaacgtgtcacggagtctaacctttccttccatagcctatgcaaaccaccactcatcacatcattcataatatcataactcgaagctacattggtgaatacattaccaaccaatttgcttttctcttcttcctttacttcttgaaaccctgaaattaaaacattgaagttaaactcacacagtagaaactcaagaagaagccatataatagaaaacaaagcatttcgtatagcatcaaaacagatgatcttgaattgtgaaagtcatccacaagaatgttaccgaaacttgtggcatgagagtgaagcgaagcaacaaaggaacgttgattcaaaattctgctcccgagcctcctgcttactgatcgtagtgccatagctctcaatagaaacagaaattatagtcgtctactccaaactctgttcctacaaccaaatccccacaaattttagatggttagaccacttcatcacctactaaagattaaaacagagaagacaaaaaatgttccaatcacatcaaaattttcagaaaataaaaattatttcgttgagattcaaagtttttttttttctaactacaggaatcatgaaactgaagaagaatcttttgagctgttctatgaatccaccgactcaccggaaaggaaaccgagaccctaatttaatctacccttaaaacttaagctcgaagaatgaagtagtaaactccagaattaacgaaagccataacaatgaggaatagtatagttttaaaacccaaattttatcgactcacagctctgagatcgagtgatgtatcacacgtgttgttcttgccagacacgtcggtgccgggaaccgaccaaaaagtttgacggaggacgaaggaacggtgagtttttttgttattgttctctcctctctccacatagtacgaattgggcttttaattcagtgctgaaaaggcccattatgttatgatcccggttcatattaattttgggttggtttgcttatccgataaattgaattttgagtgggtccaattttaaaactcatcgggaaagtagaaattgacaaattgtgatgatcggaaaaaattagaatccaaaggatcctaaactctgatgtctgatcagataacataaacaaaaccctaattcgatg

SEQ ID NO: 33099 - DNA, 3000 bp, Unknown; identical to SEQ ID NO: 2016
  misc_feature (1)..( 3000): 2750-1469P.txt file - cDNA_ID_3065576; gDNA_ID_1620478; Annot_ID_158235

SEQ ID NO: 33100 - DNA, 3000 bp, Unknown; identical to SEQ ID NO: 2015
  misc_feature (1)..( 3000): 2750-1469P.txt file - cDNA_ID_3065595; gDNA_ID_1620478; Annot_ID_158225

SEQ ID NO: 33101 - DNA, 3000 bp, Unknown; identical to SEQ ID NO: 2028
  misc_feature (1)..( 3000): 2750-1469P.txt file - cDNA_ID_3065635; gDNA_ID_1620480; Annot_ID_158280

SEQ ID NO: 33102 - DNA, 3003 bp, Unknown
  misc_feature (1)..( 3003): 2750-1469P.txt file - cDNA_ID_3065639; gDNA_ID_1620480; Annot_ID_158276
cttcttcttcatctgaaaaagctcattttttttttttttggaatcagagtttggtgaatttcaggagcagagtatttaagtaattttggggaattagtgagaaaatggaggagaaaggtgaaataagtccaagtggggtcgtcacagttaagggagatgaagctttggttccaagaacagagtttcaacaaaaccctagttttctccaattcgtgagtcccacaacggtagtgactcctctccctcctccaccagctccgtcttcggctccggtaccaaccaccgtgactcctggctcagccacagcatcaaccggatcagatccgacgaaaaagaagagaggaagaccgaggaagtacgcaccagacggaagcctgaaccctaggtttttgcgaccaactctgtctccaactccaatctcatcttcgattccattgtctggagattatcaatggaaacgaggcaaagctcagcagcagcatcagcctcttgagttcgtcaagaaatctcacaaattcgagtatggaagcccaggtaattaaaagttgagatatttgtgtttgaactgtttgcattggtttcagtgagacaagatctgatctgggtttcgagtgattttatgttgttgtgtggatttttgagatgttgggaagtgggaccaacataactggattttgctgggtacacttttgtctgaagaagctattacactcagaccagttagagacagagaaagggaatctgctgatgctgaccaaacaaaaacagaaataaaaagaagattttgtctttaaaaaaaaaaatacaaagacagaataatctctgtctcttcctttttatcttagaagataagtatgtctagttgtgattataagttgtttagcagatcttacgatttctcattatctgttttaattactgtgtgaataaaaagagatttagattattagttggtctttgttttgaatcatggagttagttgcttgaggattaggattaattaattagctgattagactaatgcaaactctgttttactatctcttgcagctcctactcctcctcttcctgggctctcatgctatgtgggtgcaaattttacgacccatcaatttactgtcaatggcggtgaggtaataaatttcccacagaggattcttttgttttctttcttcaacacggtgcttgtaactcaagctttggtattaaattctatcagtctttgtttgagaatttcttgttttgatcaggatgtgacaatgaaggttatgccgtattcgcaacaaggatctcgagctatctgcattctttctgcaactggttcgatctctaatgtcactcttggtcaacctaccaatgcaggtggcactcttacatatgaggtaacaaaacattgaatcaaatttcgttagtacctcgttttgaaatatatatcgagtaaaactgttatgtgttttttcttttctaagggtcggtttgagatactatcgctatctggttcctttatgcctactgaaaatggaggaacaaaaggtcgggctggtgggatgagcatttctttagccggaccaaatggcaatatatttggtggtggccttgccggtatgcttatagcagctggtcctgttcaggtgacacgatttgattacatgaatgaaacatatttacagattcaggagtatagaaaactctaaagtcttataatatgtgacaggtggtaatgggaagtttcattgtgatgcatcaagcagaacaaaatcagaagaagaaacctagagttatggaggcttttgctccaccacaaccacaagcaccaccacaactgcaacaacaacaacctcctacttttaccataacaaccgtgaattcaacttctccttcggtgaacaccgtagaggagcagaaaccacaagcttatggtggtggtatagtgagaccgatggctcaaatgccttcttctttccaaaacgacaattcaactatgaacaatttcacaccggcctatcatggatacgggaatatgaacactggtactactcacaaagaagaacatgaagacgaagatggtggtgatgatgatgatgattcaggcgatactaggagccaatctcatagtggttgagcaattctctgatcaaagtcagaaagttttcttgtgtagaaaggaagggagcttaaaggagtgcttttttttagagggttgttttagttgtgtgagggttttcttcttttgtgtgcttttctaatttctagggttattcttctttgtgatcggtttagatttaatcatgtcgaagtcatagactaaacgatgttcttattgttgaggtcattgggattcaaatttagtaagacttttgtgatatggttcatattcttgcaaagtccattcataagattcactacaaacaaatgtttttgatgtataatacaaagtaggagtactataaaatcctacctgtgattcatcattatttgtctatgtcattaaaacattcatcagtttaaaaattgcttcaagtctagatcgtgcgtaattgcaaaagtctatataatttctgttccacatacacagactcatcagtggattctgggtttaaattgtaacaaataaaaagtcaagatacaaaaggaagtgagcataactaaagcaaaacaactataaggtgatatttaaaataaataaagaaatataggggttaaaacataaatacaaactcttcgctaattctcaaaacccttccctttcctttatcgcagtcgtaactggcctccgttggtctctatcgtgactcccttcacgccattaattccgattaatcggagcttcgacttctcatcttccttgggtaactcgctctaccttatcttcatgtaatcaaaattcgaactttttgtctgtgtgttttagttgtttattgggtaagttactagatcttctctttcgattttgtttcagcgttcgtgcgattcaacgtttgatttgaagaatcagtagcaatg

SEQ ID NO: 33103 - DNA, 3000 bp, Unknown
  misc_feature (1)..( 3000): 2750-1469P.txt file - cDNA_ID_3065643; gDNA_ID_1620480; Annot_ID_158268
gctccgtctacatctaccgttccggtaccgacggctggatcccggagaccgtcgagatatacaaggaaggttccaaatccgtgaaattcgatttcaacaagaacgtccctgaaaacatttggtacggaaacaactattgtaacaacaccgatttgccaccgccttccccggatttccctccgttttctccatccatcccaccgccttcaccaccttattttcctcctgaaccaccttcaatcccgccgccaccaccaccatcaccgccgtctgctgcctctggacgtggaagtggtcagagtttggttgttgcgtttgctgcgtttgtgtttgcgtttgcggctgtggttgtttgagttattttgttaagaattaagagttgtctcaataagtaacgagtatcgtgtaatccctctgttttgtctttgactctttgtagttgaacattgacaatttcatattgtggtaacattaattagttaactaatgtatgagttcgagtttttaacgtactattccttataaattctgcatcaatgttttgtatgtgataaatctatgaatattagattacacaactatacaaccacacaccatgaaaatacaatttgataatgacatttatgtacttcgaaataccaagtactcttaaaactctaaactttttacataaatctagagctatagagtaaacaaatgattctaaaatgttgactttagtttattatagaaattccagtatatcaagatgttgtaaatttacttagtgcatgatcacattcagtttctgtggatggtaaaatgatgatacatgacaaaaatttaatatcagtgtgcaagttttgtattgatttgtatacaacatttttttttcaaagcttaaagtggttacttgattaagaatcatctagaaaagcacataacctacagttacatgtcgaatctctaatcaatttcttctatacaaaacattaattacattttctcctctacctaaatattatgacactgacaagagatgtgtggcctgtaacttgggcgcgtcgccatttatttcagttcttataccgaaattgaatttgtttgaatttgacccggtctaatccggtttatcctcaactggttcgagactttatcttctcaattactctttcgttttctcttcgcttgtgtatctgcgagcgatttctcgaagcacgaaaatggcgtccgtacgactcttcttcactttaatctccttcgtcttcattatatccacctctgtttacgaatcaaaagtattggatcctcctcacgtcgctgaatcattcaacgttagcctcatccaggttcgtctctctttccccgtttgaactttccttcatcgtctttgggtagaaacttttcccgagaaacttatgattttccttgtatgcgtgtaaatttatatctatgatgcagaaattggggaatacttgtgcttacacagtgatcatctcgacgagctgttcgtcgactaggtacacgcgcgatcagatcagcgtcgctttcggcgatggctatggtaaccaggttagatttcttcgctgagtgagattttgatttcttcagaacatttgattttgatttggtaacactttggtttatcgattatgcttagggttccaattgaatgtttcattccaaaatacacatctgttttcgcacatatctgattcttcgtaattgagctttgttacaatggactttctcagattttgagctcatctttggtttcattagatttttagtatgttcaggtccagttctagttagctactgaatatgcataacattgtcactcctatggaagaattctagctaccaaaagtttgcaaatgcttagctctggttgctctggttgatctgaacatttgagttttagagaaatatacacatctttggaatagatgaaagtttcaatggattggttttgattgtaactagtgtctaatctgttcatgcatctatcactaataaactaataaactgtaaggatgttcgcttcggttcgatgttcaatgaaatttcgctgctcaagttttgtttatttgaatcagatatacgcaccaaggcttgatgatccatctacaaaaacgtttgagcaatgttcatcagatacatttcagataaacggaccatgtacataccagatatgctatgtatatctctacaggtctggtccagatggttggatcccaaacactgtaaagatatatagccatggctctaaagcggtcaccttcccatataacacatatgttcctgagagtgtatggtatggtttcaattactgcaacagcgcctcagattctaatgtccttgccattggtctcagaaggagcgtgatcatactcctaggttttgttgtcgccggtaccacattgctcttgtaagctgttatgtttccggttttgtataaacatattaggacttgtgaagaataaatgtgtaccgttttggggaaatgggtctcagaactgtattaagtattaaccataaatctatgatgaagttacttactcctaattacagagtctgtaaatcttatgagcagtgtgtatccattttagaaatttgtgacagttcatcaactatatatgtgatagaaaacgaattgattatgtttgagctttggttttatcatatcgtcgaaaaatgaagaaagttactattttaatagaaaagccaacaaagaagatatttttgagtctttgattaaaaaaaggaaagatagatatttttgagtgtttgacctagaaacgacacgcattctcttatcagaataaataaacggcagattagagattgcacattagagtaaattagggtttctctaaaatctcaaaactatataaaaagagaggtaaaccctagcaattgtcgtcctcttttgtcgtctctccctgctttcgcacttcatagcctcaatctctcaacaagcagaagagattcgattctccattatcttccttctaaatg

SEQ ID NO: 33104 - DNA, 3000 bp, Unknown
  misc_feature (1)..( 3000): 2750-1469P.txt file - cDNA_ID_3065685; gDNA_ID_1620481; Annot_ID_158314
cacaattagtttctttaaaatataataaatctaatgaattggttggtaataaattaataatttaatgactcaacctctgagaaaacattgatcataaattagtaatcagtattttttgacatttaattgatcattttcaatgatttaaattatttgttaaaatatgttgactcaaaagttctcttcaaatatacatatcaccaccgaaaataaccacatttaagataatttaaccacagtgacaatatcgttttcacgcaaaaagaaaaaagcgaatgcgttgagtcaactcgttcgtgttacaccaacaatttcaccttttcatctatacttacaagtttcttcaatctcttcctactcgatagctacgataaacacataataaaaacgtgttagtaatgttctctcttctctattcacaagagcttcaatcatctctctttcttagattcttgtctcaaagaatcctcggtttcttcagtactccggtcaatcccgaaacacttaagaaatgcagatccagccagcctaaacaaagtacatggatgatgcaaactatgacttgaatctttctccaacgaaccttctccttcctctgttactgttgtgactctccttgttacagctggtgttatctctccttttatgctttgagagcttccaacctgtgattacaaaaaccgatgagttcattaccaaaggatgaatctaagaaacaagtcagtggttaagcatattcacaaatcacaacagatgcaacatcaatgcacttcacgatgattccagtcaacagataaaccacacaaacttgaagagaactgtttggttctaaccattttccggatcataatctaaatgtctgaaacgcaacttagatttataggttctttttttaagaatccaagaatctctgagtcatgtagcactagacatctctgaaagaaaggctagtgaggaatctaatattgttgcttaaagacaaaacaagacatatctcttgtgaaaactaagcaagcaaatagctttaaaacaaaggaaagaccatcctcggttcgttacctaaagaaagctaaactaccaaccaaatttagaaagagacatttcaaagaattcaagaatatctaaacatagattgagagatcatcacacatctaaaccctgatggttatggccttactgtcaaaaacctagaacaaagagtattaacaataacgatatgattcagaaaccatacttaggatgattacttttgctatgtttagataacttttcactatttcctaatttcagaacccagaacattgaaaaaaacccatcatttcaacttttagctaactctaacaatcaaaagtggctactttccagctaattatggctgccactttctcccattaattcttaattgcaatctaaaccccttaagttccacaaaacccctggaaattccccattacttttgtttcccgttcccagaagccacaatgaagaaactgaacgaacatcgatctagctgaaatcgtctcagtctactaattatctaattcagcattcaaaaatcaattccaaccacaagagatctcagtttaggaacagtaagtcaacgtagagcaggtacgactaaatccatgattcgtcgacgaaattgaaagagacagatagtattagagttacctgatgagactgtacgagacttgaattgacggaaaaccccaaaccatggtgactgatcggaatcggatttccagaaagaaatcgcttagagagagatgaaccagaggtagaaggaacagaatcagaagacgagtagctgttatctacgatatcaaaggagaatattccgatgacgcaaagaaggagtaagaggaggacgaagaccaacatttggatccaaattagccatgggatattattgtagctatctaaaaccaaaaactctttcccagaatccaccattttttgtagagagataagagtttttcccgggaagagagatttgaggtaacgattgaggaggaggaagaagaagaaagacgacaatcaaacgaagacgacgaaggagttgggtgaaggggaaaagataaaacgacgaagctgtgatattcaggtcaccgcgagaaaataacggcaaaaatcttgctttttgttgatagtccacgtgtaacacattaattggttaaataggtgaaaacacttgatatttatgtaatttgttatagtgtttattaaatattttaattcgattttttataaattatttatattttaattagtcattactgtttattcattaaattagctaatgtattcttcgtttatgatagagacaaaaaaaaaaaaaaaaatccagatgtatttaaatttctaaatcaacgacaaacgtataaaattagctataaatgtgtaaatatagtagttttttttctttaggtaaattcagtagttaaaataaaaaaaacctaaaaatatagctataatattttttcggaagcattaaatttccatattgaatttacatgctatgttgtatatacatgcccgaaatttcttggatgtttcacgtgtatccaccatatattatagcttacaaataaataaagttaaagataaacataaaaacaacatctaaactataaaaaatatgcatgtatttatcattacataaaaaaataaattatgtagatatgtatcaaaatacaagatttccacataattttgttatcaattatattatcttttaacattcaaatttagccaaaacagttatagaattttgtaaataaccgcgtttcaatgaaatttcgtagaaagtagaaaagaatataaaagcttaattcaagagaatattttttttttatttttttttattttttatttacgcgtattaaaaacttgtatataagttaaatcctttcttatgatcctctccacaaacaaacttgtactagaaaaatccctaaatctcaacaaaaccctaatttcaaggaagacgaagaaagaatg

SEQ ID NO: 33105 - DNA, 3003 bp, Unknown
  misc_feature (1)..( 3003): 2750-1469P.txt file - cDNA_ID_3065692; gDNA_ID_1620481; Annot_ID_158332
taaagctggcagagaagttgctgactatcttggaacacgccaccacgagtttcagtttacagttcaggtataaaatttccttgatatagtcatacagatccattatcattcatggttttcaaaatagacgacttaacatcttcctctaatgataattccaggacgggatagacgcgatagaggaagtcatttaccatattgagacttatgacgttactacaataagagctagcaccccaatgtttcttatgtccagaaaaattaaatctttaggtgtaaagatggttctttctggggaaggttctgatgaaatactggggggatacttgtacttccataaggctcccaacaagaaagaatttcatgaagaaacatgccgaaaggtatttccttgtcaacttactttgctgatctgcttttgtcccctcactgaatcttgtttatgcttttctttacatacagatcaaagctctccaccaatttgattgtttgagagctaacaaatcaacttctgcgtggggtgtcgaagctcgtgtgcctttcctagataaagaatttttaaatgttgcaatgagcatcgatccagagtggaagttgatcaagcctgatctcggaaggatcgagaagtgggtgctacgcaatgcctttgatgatgaagaacgaccttatctaccaaaggtttgtttacaaataactaaagctgtttttgtgcctctctgcagtttttttcgataaactctgtaatttcactaataatgttctaacaaaatttctcatcttctggtgaattcagcacattctatatagacagaaagaacagtttagtgatggagttgggtatagctggatagatggtctgaaagatcatgcaaataaacatgtaagaaatgtcttttattaaggcaatttcccgataaatgttggaagttttttgacataaacttccatttttcttggtaaaggtctctgatactatgctgtcaaacgcaagctttgtcttcccggataacacacctctgacaaaagaagcgtactactacagaaccatcttcgagaagttcttcccgaaggtaataaaatgccataaattttcaaaatctcacataaacgtctctgctttgctgatttgttttgttgtatttcctgagcagagtgctgctagagcgactgtaccaggaggtccaagtatagcttgcagtaccgcgaaagctgtagaatgggatgcaacttggtcaaagaatcttgatccgtcaggccgtgcggctcttggagttcatgttgcagcttatgaagaggataaagcagctgctgctgctaaggctggatcggatttagtagatcctcttcctaagaatggaacataagagaacaacactacaggcattgaggatataagcaaatgttttattcttctacacagagagatcgttatcttctagagggatcaatgaataaaagcttcgtccatttctagctggagattccatggatctccagttagtgcaagtgatacacgttgtctacatttgtacctaagtttctgcattttttgtcgttcttttgtgttagacaagtcttggaccctagatgatacttcagtttcttagacgttaaatttgatgaatccgaacttgtttgatttcaaagcctggcctttctgcaatgtgtttttgtgcatgttctggcttgtttgttgttactcaacgcaggatttgttataatatgtacaatatatctagtacacacataagtcaagcaagtaagactccgtggcccaatggataaggcgctggtctacgaaaccagagattctgggttcgatccccagcggagtcgctcttcatctactatttttatttttcttacgcgcattgcttataaaagttttttaatgaacgtgggataaaagttttcagattcgtatttattatttcaaaaagacagatgacctaacctcattactcgtgtatggacttttttttccttcaaattatattttatgaaatttgagtagacgaagtaactgctccccttcagatttagctaaagagccaaccacgtgaagtcgtgaatcctctctgtcgttttcgtattaacaaacataagaaattaagaaatgaaaatctcgttttcttatgtataattgttttatatcgatcaccggtttctctaggtctaggtatagctgttccaatatcatgatttttaagtttagttttcaacatcattaagtaaaagtgtgaactcattatcatcatcgctttccctttagaatttttgcaaacacacgaaaataaataaattgtttggacatattattgagaaacatagtcaaatgagcccgttcacattctgaatcatataagttacagtcccaaacccacgttttattaaaaatgtactactagtcaataatttatgttgagtcatatttatttattttgacacagttggttttcgcagtttcttgtttattagtttcaaattgcacttattagttttaaaaacaatttaatttgatatttggtataatatctcttttgaattatttacaaactttattacagcctggttttgaaaaaaaaaaaatactttgcataattgctactttgctaggattactttataaactttttcagctttgattcatttaacattaaacccaattaaaatattttattcattttagcataaaaggggaaaaaaaagaaatatatatatatatatatatatatatttcctcttttcaattaaatcagctgttaaaagtggaaaaaatcaaagagatatcaaaatattgattagaagaatatgtccatattcaattattttatattatctttattaaatgctttaccttacaacaataacttaaataaatttttgggattcccgttacattacttaagtaggacgacgtgcgtctgcttcgtctcattacaaagcagaagaaacacaaacagaggcagagatcttaagagttaaagactaatcccaacaatg

SEQ ID NO: 33106 - DNA, 3003 bp, Unknown
  misc_feature (1)..( 3003): 2750-1469P.txt file - cDNA_ID_3065711; gDNA_ID_1620481; Annot_ID_158315
agtggtatcatctaccatcctcgcagtttcatcgactggtcaatatattattcaataaacatgcagcttccgtatatgatacttttctgctaaaaagaggaatttgcagttcacagagaggtggtgaggaccactcttaaagatattccgatatgaggaacaaataattggagcatggtcccttgagccctgcctgatgcattacaaaaagtagcatcataataaagtggtaggtgttgttgaactatttatccgatggtgacagaatttatgtagatataataatatcattccttgattatccatctggaaggtacatccatctccacaattgcattcaactattgaagcaatcatgtgttgataatccccttctgtttattttagtagaccaccactaaacatgttatttatattagtgtatcaagagagaagaaaggtatcttcaacacgcaataataaatctgacatttgaaaaaggaaaaacacatccttatcgaaatcactagtcgaagtcgcatttgtcagatactattgttttaacttcaaactctaacttccaagttctataacataagaaaaagaaaacaaaccccaacagctaaaagtataattaaagaagcaacatttgagatctcaacctctgtgttgttgagcatgaagtgattgtttgggctcagcaccacgcaatgtaccaatccaagctggtggctgcatccctgtctgctcataaaccgtatcaagaaccggtggtaacatcttgtagagtccagcaatatcgttcatcgtagctttaccaccaccgttcatcccctgctcagcaccaccatggttccacacgctgatcttaggctgcaggtccctgatcgcaacagcattggtcttggcaatatcctgataaatgccattgttgatcatcaagaagtctctcatggctgagtaatcattgttaactgcgcctaagagggtcttgaggtaagtcccctgagcatcggccattgcgacaagtccctctgcatctttctgttttgaatagaaggcagcatcagctgcagctttcgtcgcttccgcttgcttctgcttctcgtaaagaacagcttctgcttgcttttgcttattgtacaactcccagttcgcttcttgcaccttagtttcatactcaacactggctttactgaggaactcagctttaagcttctctgtccgagtcaatgcattcatcttctctactttagtctgaagctcagcttccctcaaagcaacagccttggctgcttcaacctcagccacacgagagttttgggacaaagcagccttttgaatcgcaagtgctgcatcagccttagcaacaagagcctctttctcattctgaaacactttgacttcagtcttcaccttgatctcctcttttgtcccttctcctagcctttgagtagagatgatctttgactcagcgtcaatcttggctgcattctggattgtgagtccagtcctttctttggcaccaacctctcccttcatctttgcctctgctacatcgatcttggcttggtttgctgcttccatctgagtcttctggcccaagtaagagaagtactcatgtccaggcacatcaacaagctgcttcacattggcgttgtagatcacaagaccaaactggtttagctctagctgaaccttgtcaaacacttccttcttaaactcctttgttcctacaattccacaattcaaacacagttcaaacaattatattaaaacagaactcagaaataaagaagataatcaaaaagggtatgtttggttacctttgaagacctcttccatagtcatggaagcaacaagaacacgagtctctccttcgataacaccctgaacaagctcattgacgtgattcgagtgcttatcgtgttgagacataagcatggcatacaacaagagagcgtgaggatcatcaacgcgaggaccgattgtgaaaacagcaggaataacaaagggaagtttctcggaactcatagcttgaacctcgaacgtgtagttcaccggagaaacgtcgaagacggtgcaagactgccatggaaacacccaagacttctttgcaagcttgatgtctgtgatcccaccaccggtgatcgcaagatactgcgatgctttagcgactctgtaactcattctttcttcgtcttccttgaaattagggttttgttgagatttagggatttttctagtacaagtttgtttgtggagaggatcataagaaaggatttaacttatatacaagtttttaatacgcgtaaataaaaaataaaaaaaaataaaaaaaaaatattctcttgaattaagcttttatattcttttctactttctacgaaatttcattgaaacgcggttatttacaaaattctataactgttttggctaaatttgaatgttaaaagataatataattgataacaaaattatgtggaaatcttgtattttgatacatatctacataatttatttttttatgtaatgataaatacatgcatattttttatagtttagatgttgtttttatgtttatctttaactttatttatttgtaagctataatatatggtggatacacgtgaaacatccaagaaatttcgggcatgtatatacaacatagcatgtaaattcaatatggaaatttaatgcttccgaaaaaatattatagctatatttttaggttttttttattttaactactgaatttacctaaagaaaaaaaactactatatttacacatttatagctaattttatacgtttgtcgttgatttagaaatttaaatacatctggatttttttttttttttttgtctctatcataaacgaagaatacattagctaatttaatgaataaacagtaatgactaattaaaatataaataatttataaaaaatcgaattaaaatatttaataaacactataacaaattacataaatatcaagtgttttcacctatttaaccaattaatg

SEQ ID NO: 33107 - DNA, 3003 bp, Unknown
  misc_feature (1)..( 3003): 2750-1469P.txt file - cDNA_ID_3065718; gDNA_ID_1620481; Annot_ID_158311
ccctcaaatgtcctggacacacccatctcagtttccacaattttagtacataactgatcaagaaaggctctgtcatgtgaaataataaccataggcacatcttgcttttgcaaataaccttcaagccactcaatagtatcaagatccaaatgatttgtcggctcatcaagtagcagcaaatctggatcctactcgcaaagaaacacacaattcattcacattagctttgagttcaaactcattgaaaggataaaactttaagtaaacaatcattcatatacctgaagcaaaatctttccaagtgacattctcatttgccatccaccactaaacgaagccacaagcctatcagcatcctcaggagcaaaccctaattccggcatcaacttactaatcttagcatcaacggaatctaaattcacagcctgagctcgtctctgcaacaaatcaaattcatctaataaccttcccataagatccaaatcatcaacagatccctcaatagccttctgaactttctcaagcttctcagtaatctccatctcttccttgaaagcagtcatgaactcttccctcacagtcttactcatcgaaacctcaaattcctggctcaagaaagctactttcatattgggtttggccttgattacgttaccagaatcaggctcttcttgaccagtgataatcctgagctgagtcgtcttcccagctccgttcacaccaactaaccctactttctcacctctcttcacttcccatgtcacatctttaagcacagtcacgcctttgtagcttttccttatgttctctagcttcacacctgaagatatcccagaagctccgtttttggaactcttcccgtttcgtttccgatcggagtcttgctgagagggttgcttcgagaaaagagattcgatttcgtcttgacgctgtttaacggaggtctcgaggctgatggtggagacttgggctctgatggtggagatatcgcgtctagggttggaaatggaagagattttgatgaaattggaagggattggagatgtacgtagaccggtgaagaaagttgaacggaggtcgaggctatggagattcgttgataaacccatggttatatgtagcgatagagagcgcgagagaatctcgctctactgaagaagaagaagaagcagcagagtaagaaaccctcgagagagaaatcaaaagctttgataagagtttctctctatcgttttgagcgtgagccaccagattttatttgatttttttattagtttgtatttttttctctatattcgaaaatatatcattatcaattatcaataaataaaatcaatacttagaaaataaattaatattattgacgaccaaaaaagaaaaacccaataaaattatcttcagttatcacaaaaaattggaatgaaaatagtgaaaaatcgaaatatgtatggagcatgaaatatgtatggagtactattttacaataaaaaatgtatttggttgcaatgtttgtaagtactaatggtagttgtattgcaactttctatgaatgacaagtaaatgcattctacgattgtataattctagtttttgaagaccatattttgatataatgccaaaggaaagaagtgatacaaatcggagtattcatttttactaactttgagttctctgccacatgcaatgcaatgttcttacaaagtcaataaatggatatgaaataaagacaaatataacacacacaaaaaacaaacgaaagaatctaattttgtggtgaggaagaaggagaagagagggtagaagtcttgaagagataacaaatccggtgaagttacctcttttgtggttcacatagctcctttgaaaaacagacacttctcatactctgccacgtgtctaactatatcatcaaccacgtcagtttctctgtggatctcttcacgccacatcgtcacgcaacttgatttctttttaaatttatagttttattaagtttttggtcgttatgtatatggttttagtaagttgaattcgtaattacaattttaaatgaatatgcgtcaacttattcacccgttaattttaaattggctgttcatggaacttaaaacgtacgagcacacatcttttttctcaaatatgactgaaatagtgaaattggaaatgaaaattaagaatcaacatgtatatatatcatgtaacggctcgcatcattaaacatgaatttatgttaatcgcctccatgactaaatagttcgggattgttaatagcagtcatacagttgacgaagcaaagtcgtacttatttatatcttattgtggacttttttgttgctgtagatgatatttaagtggatacagattcactaacgtcggctaggtttgattttatctaacaaaatacacaaaatgatgtgagtttttttttttgggttcttagtggagtcagtgtgtgtattcattcagtgttcactaaccgctctaggaacaaaaaagataaatgaaaatgaactaatcaactccaaacaaattttgcttaagctattggaaaaacatatcactataaatttaataaaatcagttgccggccttcaaatcttcaccaataaacttatgttttaatatcataacttaaaggttagaccattaatcgacagtatactaaacgacgtcatttaacaggaaatgagagcaaagctgacgcggattaagcgtgtgtgcgtgtccgaacgaatggcagtatcgtaattaatgcacaaaagctaaccttttcccgaagcagaaaaaaacaaaataaaacaaaaatatttttgatatgttgtgtacagtatagttgtatcaccaccaatcgacctgttactttgctgtattaaattttggtatactttttctttcgcttataaattgctctgtatcacccatcttcctcctaagatcatctttaacttattataaaaaaaaaaaacaggattcactgctagctacagaagctttgatcacatg

SEQ ID NO: 33108 - DNA, 3003 bp, Unknown
  misc_feature (1)..( 3003): 2750-1469P.txt file - cDNA_ID_3065727; gDNA_ID_1620481; Annot_ID_158305
attattaatatgctgttttagtaagggttaaaacttcagttttttaacaattgtctcatggattcgttgtatagcgttacttaataacaattataaactgtaaaatataaatattttataaaaataaaatttgcaagttttaatatatattaactttaaaaaataaattataccgcagtataccgcgggttaaaatctagtttatatatatttcacttaattttgtctatgttcactatacatatgtaaactcaagagtcaagactattcaattatatcatcatttcgcaaacttataataacaaattatataatatagtgataagtgaagttttgcttactatttatcaaagatttcatcttattttcaacaattctttcaatttgtaatgttatcagtaaaaaaattgtagtatataatctgctagttaataatacgaaaatatttgttattattgtacgaaattatcaattatgataattgtgtagtcatatcaatgtaatgaatgctgctgaccattctatttcttctctccttattcccctttgctcctccttacttttactaaaattccctcaactcttacgataagagcagagagaagaagaagaagaagaaagtaatcgtgatttgagagagagattcaaacatacttttttcgatatctatgttaattttatcttcacgatatgcaatgaaacgagatgttttaatcattgtaatctttacagtgttagtattaatcattatctcccgttcaagttcgatccaagctggaagattcatgactacaggaagaaatcgtaatttgagcgttgctcgatcactatactacaagaatcatcacaaggttgtgatcacggagatgtcaaattttaataaagttagacgaagatcgtctagatttcggagaaagacggacggcgacgaggaagaagaagagaaacgatctatccccacaggtccaaatcctttgcacaacaagtagagtactgactactgagaaagatgcaacatacttcgacttcgtaaattgttcgtttggtgtatatatgtatcgttataagttagtttacttttcaagattaatagtctttaattaggttgggttggaaactctaaaatagtatgagataaatttcaattgtttctagcatttaaattttgtatgctcaaagttgctggaacgatatggcaaacagaaataatggaatcgaaaaaatatcgtgatatgttagaataaactgagtaaaagtacgtttttgtgaattttcttttgtcattgtaatttgttttaacaaaatacagtattattcttttttacgtactaataaggtatattgttgtatatataaaggtcagtaacttgtaactcatcttttttttttgtttttttttctgttttagctgataggtggttggtgttcattaataaatgtccatatatcactttcaaagcaattcactaaaatatagatatgtaattattttttattttttcagattttccccttgaaaaaggggttctttcaattagaaccccacactaacacactccttcacttttggccagccgcccttctttttcagtctttcagtttatattttagcctcttttttaaaaaatactatattttattgctttttcttcttcttaattactttagttaatcatagttaaaacacatttttttgtgcaaacgtttaagttttaacactatctgattttaaacttttaatcatttgcatgtaaaatcactcaaataggtaatatttatatgattccagtcatgtgtttcttaaaaacagagccacactacatgtttctgtgtttattctcagttaattagtttttatgtttgttttaacacaatacagagagaatattattgtagttacaaaaacaattaagagtggcaccaagaaatttcgtcttaccttttaagacaagattaaaagaccactttgaaattttgaatcgttgacttaagaatagacttagcaaaaaaacttggtcatacatatatgatatatgtgtgggtcaacgattcatatatgtatgatgatacattgcaatgtgccaaaacttctggaagaacaaaaaacgactaataagaaaaaataaaatatataaaatgttgccaacattaaaaaacgcatttgctgtttcccatcaatattggagtatagtttatataagatttttaacaatattataagctagttaattaatagagttaatctttggtaaaaaaacagacggaattttataactttcgaaatcatattgatctgcatatatatatatatatatatatatatatatatatgtggattcaccagaccagatgagataaccattttgaaggatttgctaaataaaagttaggccaaaaagaaatcaataaagtttgtgacaatatctttaatagtataatttacatttacataattcaataagtcaaatcttattgtgtcttggtgtgcactgtaaagtaaagtcctgtctgcttcaaacgcagcataagcaaacttacaacttaaatcctcagccgttgatccaaagaccaaaatccaattatcaacgttacctaatgtagacgataaaatctcttaaaatgggcccgtaaagcccaagcaaaaaaacaattactttaagtggaagctcacttttcgccacccttattaacgtctgtccatacgtcataacagatgacgtcatcatcatattccttttttcacacgtggcattgaagcaccttcctagtatctaccctgaaattgcttgacataagtagtagttgtttaataatctttatctcttaattatcctcttttcttaacaaaaacttgttacaataattttcatttttatataaataactgaccattataactctttctcttctcttcttcacttgctctagttcttggatgctttaaacctctctctctctctctctcaattatttttttttctatttcaaaaacaaaaaaaaatg

SEQ ID NO: 33109 - DNA, 68 bp, Unknown; identical to SEQ ID NO: 2040
  misc_feature (1)..( 68): 2750-1469P.txt file - cDNA_ID_3065731; gDNA_ID_1620481; Annot_ID_158304

SEQ ID NO: 33110 - DNA, 3003 bp, Unknown
  misc_feature (1)..( 3003): 2750-1469P.txt file - cDNA_ID_3065757; gDNA_ID_1620482; Annot_ID_158367
aatgtctatattataatatccaaaagcattagatattagataattacccaactaagtgatattaatgttttccatgtaaaaccgaaaaattttaaaccaaacaaaatacatgaaaatgattattttaagttcactaaatatcatagaaaatttaaacctttctttgttttttaaatggcaattgtttttttttagtcttatttccacaaatattgtttcataaactctaaatatacttgaatgctaagagatttgcatatcgaaacttaatctagtctatatatttattatatacctcgtaaatgaaggtgcctccatgagaagatgcatttgtatactcttcttgtgatcctgtttcagattgttcattggtcgatgactgtaaccagtttctccagtaacgctccaacgtttcttcctatataatttcaatgtctagattatatctaaaagctttataccttttaaagaaaaatattagataatagataattaattactcaattaagtgacattcaatgttttcccacgcaaaaacagaaaatttaaaaccaaacaagatacgagggaaatgattacgtaaaatcacggaatgtcaaaacaaatcaaaatcctttttttttttctttcaaatgtcaataatattggatcttatttcctccaatattgattcataaactcttgaaatatatttgaaatgctaagagatttgcatatcaaaagttaatctagtctagatttatactatacctcgttagtgaaggtgtttccatgagaagatacatctgtatactctactactgatgttgtttcagattgttcatcgttccatgattgtaacgagtcctgctcgaacgttgtttcctaaacaattttcatgtctatattatatccaaataaattatttctcttaaaaaaaacattagataatagataattacccaactaattgtcctcagaagggaaccgggctctattgccggaccatcaccgttcacatcaagcgttggatctggtgagatgtcatcagcatcaactggtgagtaagtgtcccatagatcccagtcgtctccaaatagtagccacatgaagctaaaaggactatccggtatctcagaattgtcttcgtttggatccatacttttggagaaacatattacctgactcaaaattttttttcaaggggctagattaagctgaatttatatagataattaacactttcaagtatcatcaccatttaactcttccattcaaatgcaaatacttgagtggacaggatagtcttaatattgataaagtaatagaaaaaataaagacgttatgaacaaagaaaaaccactaaatatattgtagctcagttaaaggaaaaatatatataccaaattaaggcttaaacgataaataatgcatataacccacttttcagtgcctccatggataaaaggatttagcaactttaaggaaaaaaggtttataccaaaaaaaagttcaaggagaaaaagaccactgatttacaattgttgggtagtttgaagtcccaaaatgttaaaaattcaattaaaaaaattgtgacagctaataaaaatggaactttagctggattcggaagatttattttattgaaaataaggattctgttttaattatagctctaatacagttgaattggttttttatagaaaaacatttctttattgaattttcttcaatggaaaaatatcattttagagtgaataagtacaaaaaataataaatgttgctttcaacaaaaaaaggaaggaaattttatgttttggctttgtatatttgctttcaacgtcattaaaacgctttttaaaccggagatatgcatcttgttttcctcatttacaagttcacaagatgattaattacattacttgggtcatgggcttaaaaagagagagtttgggtccaactaaaaaggctcagtaaaatacgtaaatgggcctagcgttatagcgagaggcagagagagaatttacacgacgacgacgtcatactcaatggacgtaaatgtccaaactacaaaagtttttttttttttttgtgtattaaaaaaaaaatctcaagttaaaaacacatcaagagtatattacagcaacttgtgtgttaaatcaccaattgtgaataaatcggttatggaaatcaatcatttttttttttggtttaatggaaattaatcatttgatcgttaagagtgtcactaattcgatacgtcacttgctgacgaatctgcagatgaaataggcatggtatgataaatctcgttaagaataaaatttcacctagatgtttgagtaatttttgtaagatgatgaaaattgtaacatttttcattgaaagaagcaaagagacaagcaacaagacaagagtgtccccacgcatgtgagcaccgttaaccataatagaaaaaagatatcttcatctaataataggtgaaaaaatcttataactgagcaaattttagagaatgaaaatagtgatctgtgaaataattttttttttttttatgatagacctcacctaacaactagaagaaataatataaaaccattattacttatattgataaactcttacaagatcactgtttccataaatcttgacaaaaatgtcactccatatgtttggtgtacaagactagaaactgtagttttgagttatgttattataatgttaaactgtattatgctcaaaattgaactccttttgaaaggtggtttatcttctttactaatcgtttcttcattttctctctaggagctaggtgggaaaaagattcaaccttgtcttagaaaaagaaaaccaaagctaatctttttcttttgtacctctctttcaaggattaacaaaacaaatcgatgaagcccgggttttagtacctaaacatctctttgtctcgtctttgaaaacccccccaagtagatccaacatcattcatatctctctctctatctctgcataagctacggagcgatg

SEQ ID NO: 33111 - DNA, 3000 bp, Unknown
  misc_feature (1)..( 3000): 2750-1469P.txt file - cDNA_ID_3065759; gDNA_ID_1620482; Annot_ID_158365
ctagactagattaacttttgatatgcaaatctcttagcatttcaaatatatttcaagagtttatgaatcaatattggaggaaataagatccaatattattgacatttgaaagaaaaaaaaaaaggattttgatttgttttgacattccgtgattttacgtaatcatttccctcgtatcttgtttggttttaaattttctgtttttgcgtgggaaaacattgaatgtcacttaattgagtaattaattatctattatctaatatttttctttaaaaggtataaagcttttagatataatctagacattgaaattatataggaagaaacgttggagcgttactggagaaactggttacagtcatcgaccaatgaacaatctgaaacaggatcacaagaagagtatacaaatgcatcttctcatggaggcaccttcatttacgaggtatataataaatatatagactagattaagtttcgatatgcaaatctcttagcattcaagtatatttagagtttatgaaacaatatttgtggaaataagactaaaaaaaaacaattgccatttaaaaaacaaagaaaggtttaaattttctatgatatttagtgaacttaaaataatcattttcatgtattttgtttggtttaaaatttttcggttttacatggaaaacattaatatcacttagttgggtaattatctaatatctaatgcttttggatattataatatagacattgaaattgtataggaagaaacgttggagcagtattggagaaactggttacagtcatcgacaaatgaacaatttgaaacagagtcactagaagagtatacaaatccatcttctcatggagacatcttcacttacgaggtatattatatatgttataactagactagattaagttttgatatgcaaatatcttcaaaaactactaaagtgtttacatcacatttgaaagccttcaccattttttcatttgttatgaacattgtatcttagaagttagcactttagagttttttgcaagataacattgaaaatttaatgcttccagtattggttaactagtcggttgcatgtgtagttttcaaagaagtgcatttgaatcctagatgtagaagagattaggactctctttaataaaaattatatgtaccattttggtttcttgattctagagttgtataagctgcagagtttagatatcgataattttatgaatgaatctttttttttctaggaattattgagcatcactgacgaaacaggagatgaacgcactggtttaagcgaggaagtgattgatgagaatctaataagaaggaaatatgaaaagcgtagcgacgatgaaacgaagagatgtgtgatctgtcagcagaaattgaaggacaatgaagaagtttcgaaactgggatgtgggcatgactttcacttcggatgcatcaagaattggctaatggtcacgaacaagtgtcctctttgcaaccgagaagtcgtttaaatgttttatcaagtttgaaagattccgtttatctcgttggatttcagtttttttgtttctttcttttgctatgaaccataattaccaatatttccctttttatcaagttagaaagattccatttatttagatggcaagttggattttgatttgatttctgattttgattattatcatctatatatatatttttgcagccactttgtgaaataaattctggagttgggatttatttacagcggctgtcattggcatttaataattgtttttgataattagaaagaaaatcttctaattaaatatttgacatttaacaatctttccaaaatctctctaccttaactacacgattaattactaaaataaaacttctaaaatatttaatatcatttaattactacaaaattatcatttttgatattgcttttctgcatgattataatcatcaaaccgtagagatatttgataacatttaattactacaaaattacaaaatatttagacaataattcataaacatatcataaataagatcacattcataaaataaatgagtttttttagaggacgggttggcgggacgggtttggcaggacgttacttaataacaattgtaaactatacaataaaaatattttatagatagatacaatttacaaacttttatatatattaatttaaaaaataaattgttttcgcggtataccgcgggttaaaatctagttattcttatttttgctatgaaccataattattttaattactatattatatatatttccctttggatgcattaaaaaaaggctaatgatcaaggacatgttatcgtctttgtattgaccattataatatctgaattttattttgtgttaaataatctctcgaataaataatctttcgaaatgcatgcagttttattcacactttatctgtggacaacaacaacaacaaaaaagaaggaaaaaatagatttttgtaatttgtcaaaaatggtgaaactgttgcgagaccttacttttcaagtaattgtccattttcatgtttagtcataataataattaaatagtctatcaatgctctatcttatcaatactcttattttttcaaccgtttcatttactgattttcataatttcatcccctcctctcaatttaacttatcacattgaaaaaaacaataaaaatgtatgttttttatttacttggtggtccaaaaatgcttttttccttttttttattaggtaaaaaatataatattattaaataaaattgctacaaaaggaaactgttcacacacagagtgatgtgagacaccagattctgtctatagggattcgacacgccactcgcctcttttagaacctccacgcgcttctctgaagaacgtgatctcacgcgtcctacctcccccgcctataagctttactacgaaaaagccacagtgataatttttacacacagagtagagcagagagagagagagagagagagatg

SEQ ID NO: 33112 - DNA, 3000 bp, Unknown; identical to SEQ ID NO: 2061
  misc_feature (1)..( 3000): 2750-1469P.txt file - cDNA_ID_3065770; gDNA_ID_1620483; Annot_ID_158406

SEQ ID NO: 33113 - DNA, 3003 bp, Unknown
  misc_feature (1)..( 3003): 2750-1469P.txt file - cDNA_ID_3065774; gDNA_ID_1620483; Annot_ID_158400
agtaacaaaataaaatctaataaatgtctacacatttcggaaggttagtatgaaactcggattttgaaattctttagatttaaatattatagactacatgttatggtctatcacatattcaaaattttcagattatttaaatacaaacatcatgtgttcaaataaatgtaacaaagtcgtgactcaaaagtcaaagtcaaaacctatatgctctctctgtattatttagtacttgtattattaaacgcgttttggttttggaaatatataacataattctcattttttctgtttagagaaaaaacaaagaattttaaaaattggtaaattgtaatcgacagatcttccaggccactttccttatccctttctcctcctagtcccacggaccctaccttcctcttacatcatttggtaatgatctttcccaaattcatttatttttatagttagacatactacatcaagattcatactaattacagacttatcaactatacattaatcaatatgagataatttttctcttttcttgaagtagtccgctaaaattatagtaataaatactaatatacctatagacatagacagataattgtaatatccaaacaattttaaataagtttgatgttcttttgatcataaatctaccttcataatgaaacatcctccaccagcatatcataaatggttttttgacgtatattgaaaaattcaccatgttggtacgtaaatttccattttattttaattggttatgagatacacacaaccttctcaatgacaagaatatatggttcttctatatataaagaatctttttaattgaggataaagaacgccgattcaaggattatagtaagctacttaataatttgacttctgcaccgaaacaatatcaatcattttttacaaaaatataatgaagagatataaatctgtttaacttctaccctaatattcatttgtggagaaagaaggtaaaaaattaaagtaatgattcatttattcaagttattgaatacattatgaagacgaggaagacaaaaagtcagaataatgtaagtaaattagcattaggtcttaaactctcggcattccgcattaacttgattcggtgcatttggaggaggaccgacacaataccacacgtggcaaattaatttccttttgcagaaataattcaatgtcatgtaatttcaaattttaaaagttttgaagacaaaaatcatctcatgagccgaattgatatggacactagtacagcagcttccttagattccatccagacataacttttgatttcgatataggtcatcgctattgtaccaactactacgtataaaagaaatactgcatcctcataataaatcataaaactttataataaactaaacaaaaatagaattcatttttctgtttatttattgtaatattcttatgtgaaactattaataaattgaacaaaatacttaaaggaattagattatatacgatatgtgaatactggtcatattactacgaaggtagttttcttgagagtctttaacgttgaattctcgtgacctggcaaatacatgaaagtaacaataaaacttttatatttatttttattaaatgaagcaaaaaagaaaaagaaaaaaaaaaggttttctttcgacgtgtggtattctgtatccatctatataacagagaggacatcaatggctttctttgaacttgtaaaccttactctcgaagagtcctctgttactcatttttacattgtaaaaaaaaacttcttttcttctctacgtgaataagaatctgaagagtcattttctcaaggtaaatcttcttcgtctcttttcctaaaaatgaagtctctattagaatttgtttaaatgaagtttctgttattatttctttgatagtttccagttctttcatattgatctacgagttaaaactcagattttcttactcaaccatagcttattagatatgttttgaaaactagatatgttaattgtgagtcatttcttggatttaaccaagtaactattagtagagaaacaattacggtcatataatcgtgatggaaaagatcttgcaatgttttgatttcaatcctatttttggcattttttttcttccaagaagtggtttaattttattttcccccaattagttggcggtccaataatccacttacaacaaattgcaatgtttggtttcaacaaaattgtttttgaatttaaaatgatataagtcgtaatctcatcatatgcatggttctcattttggccctcccgacgccatgaattgcggtctgtttaagtttggtctagaagggtattttcggatacactcacattttaattcattcattgttcatagagctaccattgtaccatctaaatagcatttaatacaaatatatagggacgaaagattactaattgaatattgcaacttatccttctaatagttgttcgtgtcttcactgattataactatgagtaagtcgttgttcctaatatgattaatattgaagggaatttatttatatatttcgtatttatagtaataatattataaattatttttcggtggattacatcaatcgaggaaaatactaatgcacacacatggactggtcattttgtttccccaactttttgaatggaccaatggtgatattttcaatatagaatatattttctcaattcattaagttcttactttgatacagaaacaacaaaagataagctttatattaaaaccatgtgcaagttacacataacacatgtacgattacttgagatccgaacacatcgcttgatctcaaagctttttgttagagtcaatcctctacattatttgggagataattaacattctattcgattttgtcattatagccataataaattatgtttggttcggacaagttcatttttactaatttgtgagttataactttttttcttttgttatagaatgacgtggctaaaacaaatg

SEQ ID NO: 33114 - DNA, 3003 bp, Unknown
  misc_feature (1)..( 3003): 2750-1469P.txt file - cDNA_ID_3065801; gDNA_ID_1620484; Annot_ID_158430
gttgatcccactccctccaatgtggctccgccactgatttgacccatcaaaacagtgtcacgttttatggccattagaaaacactcaccctacaaaattagtcatgtggtaaaaacccgagtcacacgctaattataaaacaaaattaagttgaagcgaacacttggaggatgaacgaaacaattgttattgcaacttgcaagttagtaataaattcaatatttcttttgtgtgtttgtgtctgttactctcatttgacttcaaatccagtctccaaaactatcttagaagaggtgaatgttacagtttgttaccatcgcaaggttcttgaggaaatcgtggagtggtcattcacttctttgaaacaagttcattttaaccactaactcatacattacgaccaaccaacaccacacaataacatcatttcatgtactcattatgtgaatatgaccaaataaatatgtctcatttgagatttaatcataatcatacatccaatatccattcttcagttttaaaatgcagtggtggtcaccatgactcacctatgacagttagtgtatccaaactaaaccgaagactgaaccaatgtgcaagacggaattatcagtttaccactggaaccttaaccggcctattcaatcaaaccaaccacccaattaagtcaatcaatcaataattcatgaaccaattagaattctagttaaccggtctagcttacatgttctcgaatttgattcaaactttaaacagatttaatgaagcaatttaaacagatttggaaaaaaatctcaaaactattcaaaccacagtaaaatatatttataaaatcacaattaaaaatatagcattaatcaactaagctagctagcgccatgcacttataattttacagagtttctaaaatatcctgactcttttttaaaattaatactttgttaacaatgaccaagtctaaaacttatctaaaaacgtgtcaaataagaaaaaaaaattagcaatttgaataattcaagatccctttaactcggaactaaagaaggtaattatttttaaatagatatgttctgtgtgaaaaaatctaatatcttctatatatatacataacctttcttcttttcagttttaaaaccatcaattcattttaatcatcgatcggtgatgaagaaaatctttcaactgtcatttactgtttttattattttcatcagtcttgtgctaggttagtctatacatttagaattatattaatatattacatatactcgttctacaacaaactgattttggatatcatactattattgtataacatcagttacactaagttatgtaaaattatagcaagagttttcactataaaattacacaatatcatatttagcattcttatgtctgtttcacaaaaaaaaaaaaaaaagcattataatgtctaattcattttagatttagacaattgagttgctagacctaaaaaccaatttcgaaatgtatatgaaaaataaaacaaatttccacctattttggttaattattttaattattaaaaattcgtcctgatatattgtaagagttattgtagtataaatttatacggcatatttcccttgttttatttcatcttcgattctttatgttcgtggtgcaaagatagatatgtattttgcctcataaatgttatgctccatagtttttgatataaattcatatgatatccttgaataaattttacgtaatctgtttttagttacaatatacaaagaactctctaaacatttttctagattagaaatatttttctctagtttttattaccaaactgacattttatattttaaatattatgaaaacaggagtggtggggaatgtacaacaaaaaagaagtaatcgatgtatcgactttccagttaacccaaaaactggattgtgtgttctcaaagattgtgagtctgtgtgtaagaagacaagtaaagggttagagggtatttgctggaagtttaatgccaaaggaaaagatcctaagcaatgcaaatgttgtggtttatggcctccactttactaatgttgctacccatttatttttaataaatattcgtattacaaagtaataaaatatttttatgaggtttgggacctattattttttacttgtattcacttgaaaaaagtaacatgaagctcagaattgtgggtgtaaattgcggatcgaatctactccttctcgcctataaaaagaacacctcctcctctcattttcttcattagtttttgctcagagctaaacgaaattctctcctatttttctctttctttttaaagtaggtctcaagagtatatgatttatttaaaattcgaagattctactatcgagtattgcgataccgatcttattgtgattgtattctttctttttatttttaaatcaggatttcgtgattttaccgttgggtggataaaatcgaatagcggagcgaagttagataattttttttcatatgaagtaaatcgaggtttgaatacattagatgaggaaaaatcatattataagcatagtgtaaataccaaccatcactaaacacccacaaaccttaattcatttgttatccgtaattgcttagcacaagaaataatcaaatattatttaaatagaaaattaaaaaatggcaattttgtatagcaaaatatgttattcttttgaaaattccatctgttacacattcctctaattctatcgattggaaaaatagtattagttacaattcccttctaaagcatccaatggccataatttttttatgattgttaatgaagagaaaacagtggacagtgtcatcacatggaattggttgtggataaaacaaaacaccccactccatacatgatccactcttctcctctcaatcttcatcctcactaatgaattaataatacatttaaatataaaattattgaattcattatttgctcgattcggaaaatcgtaattgaattcagataatg

SEQ ID NO: 33115 - DNA, 3003 bp, Unknown
  misc_feature (1)..( 3003): 2750-1469P.txt file - cDNA_ID_3065806; gDNA_ID_1620484; Annot_ID_158426
aacatgtggaaacaattactctttcagagatgaaacatgaagagttagaagcttttgttgagtttatatgcagtgatggctcaatgctttctgccaacgtgaaacaacatgctcgctcactctatcttgcggctgataagtatgagattctgcatctacgagacctatgcagaaccgagcttatatcttctctgagtttgttgaattctcttgacctccttgtgctcgctcaaatcccttttgacaaagtcctcaacgatgaaagtttcagttatataaaaaataatataagtacgattgctagctctgatgagttcaagttgttcgtcgccggtaacccaaatcttgccgtggagataatgaaggtttctctcattactcttactttacgctgttcctcctgtggttcaaaccatagtcttcaaggtatgtactgttgtaattgttgtcgctacggtactcttcgtttgatctagagaatcacaatgtattttaatttctgtcgtatcacttcgataaatctcatgttcacattttaaaagaattggatttcttcgttttctaaaacttatatagcaaatctcatattaaaataattggcttgtatatctatttatatctaataatatcttcttactatgcaaaaacaagacaaatgttaagaaaacagatcgattttatataaaccaagcgtattgtgtaactttattaatcatctcaaaggtacccgcgcacttggactagcaagcctttattaaagtggaatgtgttgttgattgtttcgtgattcctaatgagagaattggtgattgatattgatcatacagttattctactatgaatgatgaaggttgtgaatgatgaagaatctctctgaaggacaaattcgaaaacgagttactcaacatattgaaagttctcttaacggcctcacactttaagatatttcctttttaagtatgatatctcggtttgtagtgaattcaatattttttgtggtttttgaacccaattcctgctatggagataaatgtaggctactctgactccaacgattaatccatatagttcctactagcaaatctgtctagtatatgaattctatctcaataccactcgatctctagaatccattcactgctttaacttagggccataatgcaagcttaatctcacttaccccgcggcagagcttatatgacaaaagcagacaatcactaggtgaaaacaagtcacaaccaaattcgttgagggaccaatattcagagcatgacacaatcttcttcaacttcttcattttctctcggcaagatcaagtcaacttgaactcaaaggccaaacttagattatttatattagaatgacatataaaacatggaaaaaaaatatagtaaattattataaaataatgtcttacaaaaaaataatgtcttacaaaaaaaataatgtcttacaaaatgttttccaatgtacaacgacaaatagaattttcacaatgaggtatattcttctttttctcaatacaatgaaatgcacattgttggcaaaagataattttcatgtcatcgggaaaatgtccaatatgttcgtatgctggatcaatagtagagcttaatgaagggatagaaaactgagtttttccttctaaaatagattttgtcatgatatttgatgtacctagaaatagtttttttgaaaactttttaaattaaaatataaatataaattgatcaagaatgaacttacatgatgaaaccaaaactgcaatagttagaaagaaaaaaagtgtcttcattttcgttaaaatgttcaatattttaacaaaaacaaaaatggaatatatttgtgttttgagttttggttgtgatgttttaaagtcaagatagtagcatatttatatgtgcttttactaatgttacatagtactagtagttaatgttttatcaaacatattttcttagaaatcatagtcaaagaaactataaactttaatttacagtttttaatttaaagtatttcacccgtttcacaaaaagtgttgtttaattttttttttttttttttatgttttaaatcaaatctctgtgatgtagtttttaaaatcaaatctctgttttatctatgtgttttcaacttattaattaaaaataaagtgtaaaagaaaaatttagatgtttttattaatttgtgtgaaaaatggtacagttgttaataggctagaaactatttacctgttgttacatgtatattggcggtctaagcattaggcttaagttggtcgttttgctcttttatatgaatcacaagttataggctagaaactatttagggttcttggtgtgagtgaatagagtgtttaacatatctattgttttggttgtggggttgagaagattaggaattggtgactgactaattgtattaatgttgtaaatctgattaaagagaaaaagttcaattaacgttgtaaatttgattaagtgatttttcaattgcgtctacatttacataataacataattttctatcgttcgatccaaaaagaagttgatctcttccctcaaaacattattctgcttcttgagggtcacgttctcttgtagcatcgattctttttccttctccaaatttatggcatcagtttggaaactagctatggtctggtcatatagtcttatactatttttctaaggtgaataatctctttttatcgtcaaaatcatgatttaggcccatcaaccatatatgcataattgcattcaaacaaaataaataaagaaatacttactttacatagtgaaatatagacgtcgtatggaaaatggaaacaacatcaacaaaaaaaaatcaaaaatcaaaactcttcacaacctatctattgaaaacgaatgcttattgttttttacataactttcaaaattgaattagaggcaataacgacagtgagaatttcaaatttcatttctgaggcaatcgcataattcccaccggcgatcggagatg

SEQ ID NO: 33116 - DNA, 3003 bp, Unknown
  misc_feature (1)..( 3003): 2750-1469P.txt file - cDNA_ID_3065816; gDNA_ID_1620484; Annot_ID_158419
gtatgcaacaaagttgttgtagctgctttaagaaacgcagatgagtttttaacaccgcttccgattattgcgtttacatgcgcttgaagattcagataaatctgcaaatcaaatcaaattgcaattttcatcaccagaaacacaaagatctgtagattttttagagagacgatgatactaacccttaagtaaaactcgaaatcgacttcatcattcaaattcggatgaaaattttggatcaaagtcgctcgttcttcgttgcttagattctgatctccaactacttttgatttccccatccttgacgcgaggtctgatactgttagcttcccgctctctctcttcatgctcgtgaactatagaatttggaaattgacagaatcagatcgaaaatttcaatgagaaacaaacgaaatatcaaaaagcttatggagattttcttcaatttcaatggatctgacgtacgtacgtgagatttcaaactccgaagctccacttgcgtgaattggttctgtaaccatggatccgataccaaaatcccgacgaatcctgacatttttctctactccgaatctccgatcgatctcttaagcgaacttgaagaagaagaagaagtagagaagctctaaagcagagctggcagtgaaagaaaaaattcaaatttatgacgaaactaccccttttagctttttcgattttaaatttcgcaatcaacttttttattagtgttggcaataaaactgtgacctgtggaggggtccatgactccgtattgtcgtttgagattttgtgaatttccgattctaccctttacctttaatgacttctcgtgacattcgagagggtaaatagggtatttatgaagttacggctaataaactagttggagctgaatgtaacggtcgttttgagtaatttggttattcatcctataaggtggattcattttaaaagttcaaactttattgacttaaagtttttgaacaaaaaaagatgactagtttttctcaatatttgtttcttactatttttctgttaattagtttttatatgaaaagcccaaacaaaatttgatgtaaaacttatttataactaaaaaagaagagccaaaaatagcatttaaataagagacatatcctaaataacctagatatttagttattttcattaaaatttaacatatttttgcaaagtttagccaaaatttagtaaaattaaactaatttttatttaaattgaacaattttttagtgttttctcccaaaaatcgagcctatctgaactgtagatttataaaatcctaacaaataataaattctcttaaccgaattatctgaatccaaataaatatgaatcgaatccaaaccgtaattccaatgtttaggcctagatagtcgtatgtctttttggcctaatcaacgcattctcatatttcgaaccgcagattaacgtttagttcatgtataaaatggtcacatgtgaagttgatgtataaaacggctataatttaaaagttggagtattaaatgacatgttttccatttcgattatggtgaaacgacgtcgtttgggaactaacgaagactagttaatagttgttatcgggtctattaacgccaaataacatcgggtagattttagtgtggttaataattaagtttatatgaaatgaccgatcaataatttttacatgtattaaatacccatatacgaatttcacgtattaaataactatattttaaaagttcgcatattaaacgaacatttttcatctaaaatatttcacttgacaaatatttttcgtgtcaatatttttcgatcaaagcattctgaagtaattgcaatgctttgatctacacacataaaactcgttgacaaatctccattatgttttagaaaattgagtcagcaaaaagtgcatgagttgtagttaaaggttgatccgattatactacaaaatataactttattgctcatcttattctactcttaagtctataactattaataatcatgtataaaccactgttataggtaacgtctataatgttataagcatggacaaaatatttgatagcaatagtgtactaaaaagctactcctaaaagaggattaggaaataaagcatgtgccagacatagtgaatgagaaagaaagagagattttgtaataattgagaaaatatgaagcaatcctttgccatgcctactttatctatagcttcctcacttcaattaaattaaattatatttgtaattaagcgattatgtttatatatatacacatttatacattgtttctcattttaccatttgataaaaatattgatataaataaattgagatctttatatggcattataaataggatcgctcaactttgtctaagtaggcaatgaacttaataagaatcataaaacaccattatatcatttggacccctccatgcttcctccacatggttgctgatctcaactaggaagatttccataattgaaacctgattttgtgtatcaaactaagaatattaatgataaaaactgtagtttaataacttttaacaaaaaaaaaaaaagcttaataggttttatccttttgtgccatttacctagcttaaagctgcaagttaagtagtgttataaaaataaccaatattgataaccggtattatttgacaaaccaatcaatcattacaaacttattatgtaaagaattcttgaaatggtttgtttttgttgtaatttgggtatattattttgagataaaattttaaactttacataataagcaccaagccttcttagctcagtggtagagcgcgtggcttttaaccacgtggtcgtgggttcgatccccacagacggcgcatatatttcctaaatttttgtcgaattatttttttccaatttatccccgtcgtcttcttcgattctttatctttttttcctttgcataaacccaaaacctcaaactttttgaatccgaaacgagaaaacaaactatg

SEQ ID NO: 33117 - DNA, 3000 bp, Unknown; identical to SEQ ID NO: 2074
  misc_feature (1)..( 3000): 2750-1469P.txt file - cDNA_ID_3065820; gDNA_ID_1620484; Annot_ID_158417

SEQ ID NO: 33118 - DNA, 3003 bp, Unknown
  misc_feature (1)..( 3003): 2750-1469P.txt file - cDNA_ID_3065827; gDNA_ID_1620484; Annot_ID_158413
agtagcagcaaacagagacaattatagagccagattacaaaaactaacctacccatcatcataaatccactaaattccacaaaatgtgtaaaatctctatgaactacagcaacaaaatcaagggttctcttcgatgagcatcaaaatcctgtaagcaaataaaaaaaaatcaaaactttattagcaacaacgaaaattggattatcgccagcgaatcaaaaagactaaagcgatctttaaaattgaagttgacttagaaaaatttacaacaacttacgaatcaaaatcagaaacacaaaacgaaagctttggtctttgtagtcgtcgttgtcgtggtggtggtgctcttgttcataagtgttgaagagcacaatgaagaaggagaagaaaatcgcatctgtggctaagtggttatgaatgatgatgatgatgatgatgaagaaaggagttgggaataatttaataaaggagtcgtctttgtgagtgagttgactgggactttggatcgtcgtcgtcgtctagtgaaagttcgtgaagaatggggcaaagaaaagagagacactgatgatgagaacgcaatgactcccaacaaaaaccaaatcggtctttgcgcgttaaatgttttttttttctttcttctctttttgacttttcaacatcatcatatatattatcttgtttgttaggagatggacaaatttttcttccatttggtatttttcgcttttcattcgtttttagataattctggatattttgtaaatggttttggtgttttgaccaaatcaaagaatggaatatgacatttacaagaaatgttttcttggtattagtttttgacaaataccaatgcataataatttgtatcacaaaaattgaatatcatgtcacatatttaaatacttattaggagtagtacttattttgttgttgttggaatctttaaattatgggttgacagttatatatatatatatatatataaaaagcttgttcatttagcagatgtacccgccaaccacggttcagcaaacaccccaaaatgttaattcgtgttgtttatgtattgtcagtttgtaacataacgattttagaaattttacagagtgtttatatacagagactctaataccatgtagactaagagtatatcgaatatatgaaacaagatgattacagagtgtttatatacaaagactagaaagctactgaaggaaacttaatattgtatacaatgattatgagcaattaacgtgattgacgatattgattctcttcattatcttgattgatatgattatccttgatagtcagtttgtaacataacgattttagagaggagataaaccacgaatcacaacctctagtctctcccaagccaaatccgccattcgtgacctgaaccaacttcgaaattcatttgatatttgtaatgttttgtaccaaatcattcaccatatataatacaattgtagaattccaacaatttgggaagttgtaagatttatttactcttggtttagtctttcctctttgacaaataccaatgtataaccaaactatattttcattgttgctcttattaagaaaacaatcatatataaattttgcattcaaaaaaattagacacatagtttcatccttggagacaatttatatgatcgaaacatccgatgaagaatatcagtctatgaaagattgtgcaatctagttttttccccattataacatagccttaagcatgaagccaaagcttcgtcaacaggttaaaaagattgggtgtttggtaaaaaaagttaaggaatttaaagagtgattgatacacatagatggtgaatataccaattaatagaaaaaaaggaggaaagagtaaattacaagttcccggcagtttcagacaaactcacgtgacgcaaactttaaagggtttgactagagccacataagctgtctggtccgaaccagatatgatagtgaagaacgagccattaaaccacaccagtctctctcacgtgccaactaagtaaaattgggtgtgcttaataaagtgtctgttataaatcgctttgcttccttttattttgcctctcttctactttcctctttcctttttagggatttcactttcctcttctctctctctctctctctgcctaacctcgatttctctcgatcgctcttcaccatggatctacgatcatgtggtccttcttgaagttttttgatctcttcttcttacgggtttttacttcgtttgattttcctggtaaagttgctttttttttatcttctcttgaggtatatactttttttttgttttgagttcatgttcgtgttctcttcactgtagctagggtttgttgatttctccacaatatagctcaaaatttctgctatgaccttgaattttggtcgtgaagtttgtttatgtgatggattaagctgggatttcatagaatcactgaatcagcttgcttgtttctactctcatttcgtcatctactcttctcttaatctgtatttgtattatttcagctaatttttttataagtacgtctgattagttcttgaggttgaattatctttgtgactaaaaaatagtgtgaatttttcttgaatggattcatttttttgggggtttcttgttcatttgtctttacttgccttgtaggccattttcttacatagttgtccactatgacttgtacggtcttgttacagagctaatttgtttttatctttaacgagtgatattgtcattggatagttttgactgatctttgtttatctgttcttgatgatttttttttttgtagttgtttgttgttcaaggatcgagatttcgtggagctctctattcgcagcttggagattggacttgtttgaattggtaacaatattgtgtctggcctctaatgtcgttgtactcatgtttgtttttatttgttcgggactttttaatcattacttaaatttccgttttatttaggctcttttgtgatg

SEQ ID NO: 33119 - DNA, 3003 bp, Unknown
  misc_feature (1)..( 3003): 2750-1469P.txt file - cDNA_ID_3065846; gDNA_ID_1620485; Annot_ID_158466
ggttatatctagctgagctttcaaaatgctcaacctcaaatcattctatttcatcctcacaaaaagctctcaggtccttaaagttgatcccagccgctgcaagaaaaagccttcctgtcttggtcaatcactgtggattactactctgcataccagtatgtgaaatcaccattttaaatcatttgttttgtcggatttaactataagaccatacattgattctcgtctctgtgttttcaggctattggcttcagttattgttcatgccttgaggcatctgcagtgtttcttccaagaataccactcggaggcggtcatagctcatttctctagtctagccatatcatgttgcattcattcaatactaacagacatttattcacttgtactgaattctcgtgaaacgaaataatatttgattcaagaatctgtatcctaggcaacttccgttattgaaaatcgccaattacactcgtttttgttttcattcaaagtttatgacagggaaaacgatcatactccgccttggccacctcgttcttttaatggttgaaatgatgaagtaaaccattgcttccaagctgcgtccttctgttgctcgacccatgagaggaaggcactgtctactaggcaaaagatgttgacgtaaagcaactggtattgcacgggaacatatctgaagtttgcaatctgaagaagtggccatgctccgccttcaagagctagagccggaagaaaatctctcttgagtccttctttcacttcagctgtgttctttcctgtggcgaatcccatgtatgtgaagaacaccagtagatctacaggtccaaagataagaccatccattgcaacttttgcagctacaaaacgtgttgactttggtacatatcgaagcttcagttttatgaatttatccaagccttcgtacctgtgcaaccgcaaatagaacaatatcaggtttatcaatctaccatagacaattctttatcagtatctgattcagtgtcactagtttatgtgagcggtaacacgaggaaaagctataacgaaatgatctgagatcagaaggaaacaaaccagaagtggccaacaggtccgacaaaaccaaatccaaacatgctcgtgatagctactcgcttccagttgactttgaattctgcatcttgcttccacttgaccttaatttctgcatctgcgtcagcatctttatttgtttcctgttatattgaacatggttttagtgcttgagccaaggtaagtcaataaaatctcaatatatagcctaaactcagaaacaatataccatgacctctaaaggcaaatgaattttaaggattgtctcacagcagaagatgttataagtaaagaagtatcgcataatttcataaaaggtaagcagtagactagagctgctaatccataacggcatgaacatgtatcaccaatggaccaaagggcgatttatattgcaatgttaacatgaaaataccacaccaacaacatagagagtcacaaaacacattgtctccattagtatcttttacgtattggtatcaccataccatataagctctcttctgaactgttcaaactttgaaaagaactctgaagctgtagtagcccacagttctggcttaagcattaaaatgtcttcgattgttggaaaaaatagccattaggaaatcatggaatctcagcaaacaagtaaatggacgttatactacaagaaatttcacacagccatagagagagcctagaaaagaatccgagtgctattgctcaattacaacttaggcaacacaacctaaagttccagtatctatctaatagagaccataagctaacaagaaatcacagaaaactgtaaacggagaagacgaactcaaatccttgaaagatttagcagcaagaaggtgagaacaacgggaaaatattccaagtatcaaagaaaaactccagaaacagcatcaaggtctaaggaagaactacataaatcaacacattgatgaagcattaccacattcactgaaatgtcgcgaatatactgatgcacaagaaccaattgacgcagatatatcacgaaacccagagatacatagatgcaaattcaaaaacctaaaactaatttcatcaatccgcacgaatcggagagaaactccaatttgaaacttcaatcgaaggtgagagagagagaaggagatcggaaaatgactaacggtgagacgaagaagacgacgtttcgcagtggaatgagtgatgtattgagcggtgacatcgccaaatccccaaagaaatccagaactgatgacctgagttttcacaggatgaaccgtcaggcatcgctggtaccatctccaaagcttcaacattatgtaccagccgtattcgccgtcgccgcgagagagagagattgggacctgtcacctgtgacggagagccgccgtggaagaaggcgattgtgattggttagaagaaagaggttgatacagtgcttaagctttcttcttaaacgtcttcttctctttttaattttttaatcacttctttttttcgagtcaacagtcaacactacaaaaaggctgttgcaatatcattgggcttttaccaatcaacattttctttccggcccattaacatttaacattctaatttaatttgttttttgtgttgacgatgaagaaaattgggtcaaatgagaaacctctcattttaacctctctattttttaggattttaaacccccaaaatttccctatacactctatcttgcggcggaagaaatctgtaatcacaaaggaaaaggttaatagttttttttctttctcttttttaaatattttgttttgtcgtcatcgaatcttttcgtttagggttatctgatgttacatcaaggttaaagaaaaccgataatcacagaagcatatagaaatcgtttttgaaggtacatcgatcatcgttgagacttactacgttacaacgatcatcgttgagacttaaacaatg

SEQ ID NO: 33120 - DNA, 3003 bp, Unknown
  misc_feature (1)..( 3003): 2750-1469P.txt file - cDNA_ID_3065892; gDNA_ID_1620487; Annot_ID_158504
tcattatatacaaaattgactggtaatgttagtccattttattaaatgttggatttaattttgtacctaaataagcatatatatatatatatacatatatataactgaaagtatttcttgagctaatggatacaaaatctacacaatacggttcggtttgattcaatagccaacactatttgatttttctaaaccaacgataaaatcggtctactgaaattactaccgagtttatcagttcaacatctttcggtcggaacgtatatgtatatgttggttgacctaataaagcaaatagactttggttcggttaagttcggttaaataaagaaaaagcagattctgagctttgtttgtgagattcagtttccaatatcagagaatctctgtgtcgcctgaagtgataacattctcattattcacccaaggagagagatcggagctaaaaagccatctctcgccggaaaatttctcagttttcttattaccttagccacagacaacaagacgacagaggaatctaatcttagccccctttcctctctgtctctctctatatctctgtctttaggctttgagatatcttcaacacgaagctttttgcttcttttttttatctctttaaaaaattccagccaatggttcgaatccaatagtagcttcaaaggtcatggatttagtcaggtgtgttctaaattctgatctccttatgtattcctttctctcgctattggtttctagttccgtagggttttagatacgtttgcaactgaggacaattaggtttcttttaatccacatcacgattgattcaaagttcattgtgtttctgtaggggtttgtggaggaaacatagaaggaagattttggtgacgacgacttgtttgggaagtgggtatttgctctataaactatacaatgcccatactcgtaagctcgctgatttggaacgagagcttgctaatgagcgtgaaaacgacgagatcatcaaaacccagttgagtttttgtaacctctcgtctttattttttgcttgtttatcgatttctagtccttattggttttgttctctctatgctctatgttagaatgaaggcacatttcgataacattcagatgattgctgatactactacattgcctcacgcaattcatcacttgagtagtcgtgtagttgaagagattgatgtctcgagtattatggataagctaagcaaaggcaaaggaatattgattccttctgagaagcttcaactctggaatgagctcaaaattttgagtgcgttgttgttcccttacttgtacttctcgtgctctgtggcaacattggatcttctcattaatcaatctttttaaatgtgtttccttgtgttcaggtttcacgagaatggtcttgtccctttggtcggtcactatgcttagtttgtacattagggttcaagtcaatattttgggcagacatttatatatcgacactgctagaggtcttgggagctcccatttacttgtaagacattttacttttctctttttattgtcttaagaatcattgttaagctacttctagcaaattggtcattctgataaaattttgtgtactttcattctacttgttgcattgtatcttgagatatcaaaatttcaaattgagatttcaaggggtagaagttgatattttgcatcttttcctttcaaaattatcgaaattagtgtattcattggtcttagatataactcttggctggattaccacaatctttaccaacgtcatttccttgatatgtttttttctcaggacgaactagatctcatagagagagatgatgaacaaaagtttttgacaagcgctgattttcttgcgaccagtggcatgccgagtttgatttctaacatgcagaacgcagtgaaagaagttctcaaggggtaatttacattacaaacctacttatcaaagatgtctcccttgtttctcatccttgaagattgattttatggtgcctcaaactcaaatgcctatgaagaatcactatacttttatgaacgtatagcgaaatctaactatgtgtgtttaattgcagaaagcagttaaaggatgtgttaaccacaagtgctcttcgagaaactgtgatgcggattctcgatgtgtttatgagcacaggaagtccacaccactgggtagattatctaatgatgtcccaagacgcaaccactgatgtttcctcttctgatgcaactgttaccaagtttcatctactcataaccgagacacgggaagtactcacaaggtaaaaaaaatctctgctctttaacccgcaaaagacgaacaatttcacttctttaaagccttgtcctcgtttctgcttcaatgctcaaagcaagaatgttgcaatgtagcctgttaaacatttcttggtcttgttttcatgttgcagcaatgatttttcaaatgtagcagagatctcactcaagtgttgtgccgttgcgttagtagaggagatggaaacgcagaccggtctggccacagggatgcaattggcaaagctattaccacagattgagaaaaccatgccggagatttcagctgagccggagaagaaccggttcttgcaactcatccgagatttgcctgaagttaaactcttttttactcttttatacgcaaatatgcctcagtagcattattaaaccccattgccaaaaattgtttcctgatcactttttatcatatgtttcgatttacttcaaaatagtaaaaccaaacatctctagaataattgttcaatatctatatcaaatcatttactaatatagtaatattgcagcaacaaaaaaggacaccgtgtattacatatctttcagtttttagggccctagaagcccaaggcccaataaaaccgggtcggtgatattaacttcttcttttttattaacttgggtctctccatctttctcagttctcactatctggacactttcgatttctgaagttgagagacgactatg

SEQ ID NO: 33121 - DNA, 3003 bp, Unknown
  misc_feature (1)..( 3003): 2750-1469P.txt file - cDNA_ID_3065896; gDNA_ID_1620487; Annot_ID_158503
ctgacagacataacggctgagactccttggaagcttttagagacggcaacaatggcggctacgaaagctctggaatttgttttgccgacgggcttcttcatccagccgtcattgaaccgtcgcggaggagttaggctctccgtcgtcaagtgttccatttcttcagtcacctctacaggcaccgcatctggtaacgctcgccgatttccccatttccgtattttcacagcttgattttttcccagaactttagattcgaattggctttcgattcaaatgttatgtatatatatgattttttcagattacttgtaggctcttgattcgtgccttaatcatcgttttggttattgtttcttttagtttggatgagctgaaaatgtgtgtgaatgttgaaatgtgattcaaacaagagtaaagaggggagttaatgtgtgttaagacacatttgtcagttttggttttacaataaatttgggggtttttatttttatgtttgtaggacataatgagtccatgggtttaatgggtgcagatacatttcttttctatataagcatgtagtctcatttgtgagaaattatcagagatatcagagacatctgaaagtcattcacagaattaagtatcattcagctaaacagttcttaacctctgttctatcatctctgtttctaacagtgaattccttgttttaccggttttgtaggttttttagagaaaccatggagctcatacaatgctaggctagtgttagaagatggctctgtttggtcagctaagtcttttggtgcttctggaacccgtgttgctgaattggtatttaacacctctttgacagggtcagattcttttttagattctaatttagatttctagatattataactgggtttagaacattactcattttaatcctaccagatgatcttgacacacgggcaataacccgtcgattaagagaaagcggcagtcttaacggtgtgcttagcactgatggatccaaaaccgacgaggaacttttgcatatgtcccgctcttgggatatagtaggtctgaattctttcactgccctccttaaaatatgatcagcgtggaatatgtgattgagctctgtctatctgcttggttgaatattttaggccttgatctaataagcgatgtttcctgtaaatctccctacgaatgggttgaaaaaacaaatcctgaatgggagtttaagacaacctcctcacgtcacagggaatcctacagagtgagttgtactttctcttctctaatttacattctcatcgatttcctcactagcttctaactctgttttcatacttccacttcaaaaggttattgcatatgatttcgggatcaagcaaaacattctaagacgggatttcctcactagcttctaactctgttttcatacttccacttcaaaaggttattgcatatgatttcggcatcatacggttgtgaaatcacagttgtcccatcgacatggccagctgcagaggcgcttaaaatgaaaccagacgggattctattcagcaacggtccaggagatccttctgcagtgccttatgcagttgagacggttaaagagcttctaggaaaagttcctgtctatggaatctgtatgggtcatcagttacttggacaagctcttggaggtaaaacctttaagatgaaatttggtcatcatggaggaaaccatccagttcgtaacaacagaaccggccatgtcgagatcagtgctcaggtatgctccatttactatctatagattataaccacacaagattaaacagtctaatctttcagttctaatatagtttacaaatatgatgggaaaataaaaattattaatcaaaacttagttatatacttatatatgtaactctgagaacttgttgttacatggctgtcgagttcagcttctcacttcctagtacagtaaactaaaaaaaagacgtctctgttttgtgtctgctgaagattttgattgatattgtttgtgcggattttggcaaaaccataactatgcagtggacccagcttctcttcccaccggcgtggaagtgactcacgtcaatctcaacgacggaagttgcgccggtctctcttttccggcaatgcatgtcatgtctcttcagtatcaccctgaggcttctcctggacctcatgactccgacaacggtattaaaccattctttcttttcccttttgtctggtacctatcaaaacgtaaacgctactaaaacgctatgcattaatttttgcctaatcttttcatatatgcagcatttggagattttgtggagcttatgaaaagatttaaacgaagcacttgatctcggctaaatcagtgatctagcgaaggagttttgtttaggtggattgaagttggagttgcgaatttttttgtcgtgtgagaaataaaatagcataatgactgccgaaataagacaatttagttgagaaacttatgcaagtttgatatttatactaacatcaaaagtagcttgcttgccatttttgttaggaactggatctggtattttgctcaagtatggttttcttggcccatccacttctaatgtgttttgtaactaatgcaaaatgtgcattagaagtggattggtcaagggaagcgtacttgtgcaaaatgcggcagtccaattcctaacaagtttggcaagcaatccatttttggtggcttgtatgtaccgagctattacagactgacggttttgttttgtaactaaagaggagaaaaaaactctagtatatgatttcaatatctatggatcctccaatttagttttctggtttagatttttttcttccttatcttggattttctggtttattaggtttagaactaaataaaactgttatgtggttggtttgataagattttggtttcagttggaatatcaaaaaatatataatgggtcttcaaaacattaccattcgttgataataaaccctaagaaaatcaagatg

SEQ ID NO: 33122 - DNA, 3000 bp, Unknown
  misc_feature (1)..( 3000): 2750-1469P.txt file - cDNA_ID_3065900; gDNA_ID_1620487; Annot_ID_158501
aatccacttctaatgcacattttgcattagttacaaaacacattagaagtggatgggccaagaaaaccatacttgagcaaaataccagatccagttcctaacaaaaatggcaagcaagctacttttgatgttagtataaatatcaaacttgcataagtttctcaactaaattgtcttatttcggcagtcattatgctattttatttctcacacgacaaaaaaattcgcaactccaacttcaatccacctaaacaaaactccttcgctagatcactgatttagccgagatcaagtgcttcgtttaaatcttttcataagctccacaaaatctccaaatgctgcatatatgaaaagattaggcaaaaattaatgcatagcgttttagtagcgtttacgttttgataggtaccagacaaaagggaaaagaaagaatggtttaataccgttgtcggagtcatgaggtccaggagaagcctcagggtgatactgaagagacatgacatgcattgccggaaaagagagaccggcgcaacttccgtcgttgagattgacgtgagtcacttccacgccggtgggaagagaagctgggtccactgcatagttatggttttgccaaaatccgcacaaacaatatcaatcaaaatcttcagcagacacaaaacagagacgtcttttttttagtttactgtactaggaagtgagaagctgaactcgacagccatgtaacaacaagttctcagagttacatatataagtatataactaagttttgattaataatttttattttcccatcatatttgtaaactatattagaactgaaagattagactgtttaatcttgtgtggttataatctatagatagtaaatggagcatacctgagcactgatctcgacatggccggttctgttgttacgaactggatggtttcctccatgatgaccaaatttcatcttaaaggttttacctccaagagcttgtccaagtaactgatgacccatacagattccatagacaggaacttttcctagaagctctttaaccgtctcaactgcataaggcactgcagaaggatctcctggaccgttgctgaatagaatcccgtctggtttcattttaagcgcctctgcagctggccatgtcgatgggacaactgtgatttcacaaccgtatgatgccgaaatcatatgcaataaccttttgaagtggaagtatgaaaacagagttagaagctagtgaggaaatcccgtcttagaatgttttgcttgatcccgaaatcatatgcaataaccttttgaagtggaagtatgaaaacagagttagaagctagtgaggaaatcgatgagaatgtaaattagagaagagaaagtacaactcactctgtaggattccctgtgacgtgaggaggttgtcttaaactcccattcaggatttgttttttcaacccattcgtagggagatttacaggaaacatcgcttattagatcaaggcctaaaatattcaaccaagcagatagacagagctcaatcacatattccacgctgatcatattttaaggagggcagtgaaagaattcagacctactatatcccaagagcgggacatatgcaaaagttcctcgtcggttttggatccatcagtgctaagcacaccgttaagactgccgctttctcttaatcgacgggttattgcccgtgtgtcaagatcatctggtaggattaaaatgagtaatgttctaaacccagttataatatctagaaatctaaattagaatctaaaaaagaatctgaccctgtcaaagaggtgttaaataccaattcagcaacacgggttccagaagcaccaaaagacttagctgaccaaacagagccatcttctaacactagcctagcattgtatgagctccatggtttctctaaaaaacctacaaaaccggtaaaacaaggaattcactgttagaaacagagatgatagaacagaggttaagaactgtttagctgaatgatacttaattctgtgaatgactttcagatgtctctgatatctctgataatttctcacaaatgagactacatgcttatatagaaaagaaatgtatctgcacccattaaacccatggactcattatgtcctacaaacataaaaataaaaacccccaaatttattgtaaaaccaaaactgacaaatgtgtcttaacacacattaactcccctctttactcttgtttgaatcacatttcaacattcacacacattttcagctcatccaaactaaaagaaacaataaccaaaacgatgattaaggcacgaatcaagagcctacaagtaatctgaaaaaatcatatatatacataacatttgaatcgaaagccaattcgaatctaaagttctgggaaaaaatcaagctgtgaaaatacggaaatggggaaatcggcgagcgttaccagatgcggtgcctgtagaggtgactgaagaaatggaacacttgacgacggagagcctaactcctccgcgacggttcaatgacggctggatgaagaagcccgtcggcaaaacaaattccagagctttcgtagccgccattgttgccgtctctaaaagcttccaaggagtctcagccgttatgtctgtcagtgaagtagtgaacaaatagttgttctttatattttcttattacttttcataaataacaaaatagccctttacttattttcgtatatttaaataaaccccaatagatatatatttatactaaaacctccccgcgttaattaattatgagaaaagcttggtaaaaaccctatttttcttcttctcttcaatttacagttctctgcacctttttctttcccctgttttttgatcctcaatcaccaaaccctagcttgttcttctgttgattatttcgaaaagggggtttgtttgttttctgggaatcagcaaaaatcacgaaatggttggtttaatatttcaatcgggataaaatcgatcgaaaatg

SEQ ID NO: 33123 - DNA, 3000 bp, Unknown
  misc_feature (1)..( 3000): 2750-1469P.txt file - cDNA_ID_3065904; gDNA_ID_1620487; Annot_ID_158500
taacacacattaactcccctctttactcttgtttgaatcacatttcaacattcacacacattttcagctcatccaaactaaaagaaacaataaccaaaacgatgattaaggcacgaatcaagagcctacaagtaatctgaaaaaatcatatatatacataacatttgaatcgaaagccaattcgaatctaaagttctgggaaaaaatcaagctgtgaaaatacggaaatggggaaatcggcgagcgttaccagatgcggtgcctgtagaggtgactgaagaaatggaacacttgacgacggagagcctaactcctccgcgacggttcaatgacggctggatgaagaagcccgtcggcaaaacaaattccagagctttcgtagccgccattgttgccgtctctaaaagcttccaaggagtctcagccgttatgtctgtcagtgaagtagtgaacaaatagttgttctttatattttcttattacttttcataaataacaaaatagccctttacttattttcgtatatttaaataaaccccaatagatatatatttatactaaaacctccccgcgttaattaattatgagaaaagcttggtaaaaaccctatttttcttcttctcttcaatttacagttctctgcacctttttctttcccctgttttttgatcctcaatcaccaaaccctagcttgttcttctgttgattatttcgaaaagggggtttgtttgttttctgggaatcagcaaaaatcacgaaatggttggtttaatatttcaatcgggataaaatcgatcgaaaatgagtcagccttctgtgattcttgctacggctagctatgatcacaccatccgattctgggaagccgaaactggtcgctgttaccgtaccattcagtatcctgattcggtttgtttctctctctctctcccttgattttgtgaattctgagtaattaataaaactgagacaaattaatgtttgtaattgcagcatgtaaataggcttgagataaccccagataagcattatctagctgcagcttgcaatcctcatattcgactctttgatgtcaattccaatagtcctcaacctgtaaaactcctctctttttttctcaatgtggtgtttgcttccttctacctgcttgagtgatcttgatggagtcgtcgtgtgtattaggtgatgacttacgattcacacaccaacaatgttatggcagtaggatttcaatgtgatgcaaaatggatgtattcaggatcagaagatggcacagttaagatctgggacttaaggtatatcatgtcatcttcatctttagctaaaagtttatagatttattcaagtgtggattctgggaaaggataaggagatattgaatataaagttacgaaaaatactaagaacgttctaaattgtattcttgttgactcgtaaaccaaaatgcagggctccgggttgccaaaaggagtatgaaagtgttgcagcggttaatacagttgttttacacccaaatcaggtacatgaagtcatctgttattgttgtgctgtgggaatcagcttcgttttatgtttaagagagttgttgtattgctactgttgaaactgctgtgattttggtagttgtctcagctgttattatgaactatttccttagtctttattatgaactttgttttttttttttgtacagactgaattgatatctggagaccaaaatggaaatatacgtgtatgggatctcagagcaaattcgtgtagctgtgaactggtaattgcctttgacacgtcttcatttcatttctgaaaatccgtagataatcacttgaggttaactataggtaccagaagttgatacagctgtacggtctttaactgttatgtgggatgggacaatggtagtcgctgctaacaaccgtggaacatgttatgtatggcgcttgttgcgtggaaaacaggtagtgttcctgatatgcaaacctttcttttgtttaaccatgttgtagtcgcattactctaattgtccatgccatttaaaaattcaaaatcttttacagacaatgacagagtttgagccccttcataagctgcaagctcataatggccacatccttaaatgtctcctctctcctgcaaacaagtaacatgtttcttatactttctcttttaaccgttttcttcatcctctccttttcgaagctcttacatatttgttagcagatatctagcgactgcatcatctgataaaactgtcaaaatatggaacgtcgatggttttaaactagagaaagttttaacaggtatgttctccatgttactgtcaacagcattcattctccattatcgtctcttacactatcatcaaatcttatataacaggacatcaaagatgggtttgggactgcgtcttctcagtggatggagaatttcttgtaacaggtactaatctctgtcttaacttaaaccactgaaaaacatatcagaacaatctttaaacgggtttctatgatgttgtacagcatcatcggacatgacggctagattgtggtcgatgccagcaggcaaagaagtgaaagtgtaccaaggtcatcacaaagccactgtgtgctgtgcacttcacgattaaaaccttaataagaatcaaagctaaattatgaacaaactacgattgtgttatttgtgttttagtaaactcttgtacatttcaatcgaattcgttcaaattgctcttatgttccctctctgatcaaacatttctcaactatatcacaacaaaaatgctccaacaaaatttatttcagaagaggcccatttatacctgactcggaaactccggcccaaatgagccagtctcctcgcagaaaccacactaaaccctaatttgattcatttttagacctagagtataaataccaaacatttcaatcgacctcgtaatctctcgctctgttacgccattttcgtgagtaagaagaagaaacccgaaaacctcaaaccatg

SEQ ID NO: 33124 - DNA, 3003 bp, Unknown
  misc_feature (1)..( 3003): 2750-1469P.txt file - cDNA_ID_3065908; gDNA_ID_1620487; Annot_ID_158497
taaagtcaactggaaaggagttgcttattacaatagattgattgattacatggttcaaaaaggtatcaaaccataacgtttcttataaaacactgatttgattatagaatgaagtttaacaaatctaatttaatgcttagggattacaccttatgctaatctgtaccactacgatcttccattggctttggaaaacaagtataaaggcttgcttggtagacaagtagtgtaagcaccaatatgcaaagctcttttatgcattcctcaaaagttacaaactttgataatgcaaattttacaggaaagattttgcggattacgctgagttttgttacaagacatttggtgatagagtgaaaaattggatgacgttcaacgagccgcgtgtggtagctgctttaggttatgataatggtattttcgcaccgggtagatgctcaaaagcatttggaaattgcactgaaggaaactccgcgacagagccatacatagttactcatcaccttatcttggcccacgcagcagcagtccaaagataccgcaaatattaccaagtaaacaaataacttctaatacgttttcttgatcttcttgatgtgatatgatgaaataaacctatatatatggctcttttgccagtgtactactaatcttaatgaaaattttccaggcgaaacaaaagggaagggttgggatacttttagatttcgtttggtatgagccgcttactagaagtaaagcagataatcttgcagctcaaagagcaagagacttccatatcggatggtaaatgttaaaactttttaacaaataaaaactcatattttaccatcaagtcttggtgagcttatagaatatcttttgttttcgggtcatgcttgaaggtttattcacccattagtatatggagagtatccaaagacaatgcagaacattgtgaaagagaggcttccaaagttcacggagaaagaagtgaaaatggtgaaaggttccatagattttgtgggaataaaccaatacacgacttattacatgtccgaaccacatcccaccaccaaacctaaggatttgggttatcaacaagattggaatgtggaatttggctgtaagttattggaagattcataacgatatgtagattttggattttgtttacagtctttagattttgatcgtgacaattattaacttgcagttgctaagttggggaagccaataggtccaagggtgagatatacacttgattatatgtttttttttttccctaagcaatatatatacaagtgtctaagttattaaataaaccacttatcttataggcttactcgtcttggttatacaacgtaccatggggaatgtacaaggccttgatgtatatgaaggaacgttacggcaaccctactatgatcctctctgaaaacggtattaaagaaacaaattaaaatcttcaatcaagtttctttttgttttgttatatttctataagattattataaattttagagctttttataaatgtttgaacatattttataggtatggatgacccgggaaacgttactctagctcaaggactacatgacaccacgagaatcaagtattacaaagattacttaaccaaccttaagaaagctagggatgatggagccaatgtggttggatattttgcgtggtcattgctagataatttcgaatggttatcaggatatacttcaaggtacttaaaaatttataccaaatgtatgatatgtagaataaatcaaggttataattaatatctgtttttgtttattgtataggtttgggatcgtttatgttgattacaaaacattgaagaggtaccccaagatgtctgctcagtggtttaagcaacttctgaaacgaaacaacaaatgatctcaatgtatcaatgccgggtggatttagtttttaaaaaggttggaattgatgattgaagaaataatggggccggtttagtcactttgtttattataaggggggtgaattgtaacttgaactctctccttcttcagttctttgacttttcaacacaaataaaataaaagtttaagaataaatttgcactatgaaatatgaactcttgtccttttcaattttgtgagtttatatgcatttagaacataacggtctttgaacattatagatttataaagttgcaatttgcaagcataaagttggtaatcgaattgatgtaattacccttctttactttgtactaaacaaagcgcacttagccacttaacgctaaaacatcgtaaggacatacctgtcatttccacaagtgccactcgatttcgccactcctacagtcctactcgtcgactgctcgcttaaccattgaaaaagtgagccaagggttttgattattttcgacgtctacggcgaatctctccgcatcttcatcgatttcccggcgacgtttactaccgccgttttactcaatcgtgccagcttaagcaatcgaggtacccattttaggtgttacgctttgattctgcttttaagcattggacaattccggagaatatgctttagtttcctctcttttggagaatgattcggttctaggggaaagattgttgatttcgtgtttgtattcatcattgattgaaacatgcatgatgcattttcgtggttcatggtttttcacggcttcttatcattttctctgtcttttttttttttttttttttttttttttttgtttcagtgtgtattgaggtataccagagatagacataaatgagatggatgttgacgagatcgagtctgctgggcagatcaatatttctgagctaggagaaagttttctccagactttctgcaaaaaagctgcgacatctttctttgaagagtttggacttataagtcatcagcttaactcctacaacttcttcattgaacacgggcttcagaatgtgtttgagtcctttggtgacattcttgtggaaccgtcttttgatgtaataaagaagaaggatg

SEQ ID NO: 33125 - DNA, 3003 bp, Unknown
  misc_feature (1)..( 3003): 2750-1469P.txt file - cDNA_ID_3065912; gDNA_ID_1620487; Annot_ID_158496
gatctaactgacaaattcttctcaggagaaacaaaagggaagggttgggattctactggattttgtttggtttgagccacttacgagtagtcaagcagacaatgacgctgctcaaagagcaagagacttccatgttggatggtaacggttcaaacttttggactcatatttttccagttacattttggtgagcttataagaatatcttttgtgtggggataatgtttgaaggtttattcacccaatagtgtatggagagtacccaaatacgttgcaaaacatcgtgaaggagagacttccgaagttcaccgaggaagaagtgaaaatggtgaaaggttccatagacttcgtggggataaaccaatacacaacttatttcatgtctgatcctaaaatatctaccacacctaaagatttgggttatcaacaagattggaacgtcacttttaactgtaagtttttgttcatatgtacatttatccgttatgacttatgaatgaacttgatcttgcttagattatagaacatataactagctaagttagggtctgaatgtttcaaaagcaaatatgtcagtatgagaaaaattactctagacttggaccaaaagtaaggctggttcgtccttatgggatcggactgtggcaatataaatgtgcatgatattaatactgagaaatcttaatatgtgcagttgcaaagaatgggacaccaattggtccaagggtgagataaatatatgttttcttctgagttttgttaactctctctgatgattgcttagttgtctgattatgaattaatctaattttattcaggcacattcagaatggttatacaatgtcccatggggaatgtacaaagctttaatgtacattgaggaacgttatggcaacccaactatgattctctccgaaaacggtattcaatataaatttttgttccacatccaagatctctagagatgttaagtgtataatctttataggtatggatgatccgggcaacataactctaactcaaggactaaatgatacaacaagagtcaagtattatagagactatttagtgcagcttaaaaaagcagtagacgatggagccaatctaactggatattttgcgtggtcgttgctagataatttcgaatggttatcaggatatacttcaaggtgcggaattaactaatgaatacctattgggtatatgattatttctgagaaaatgtatattatatggtactcttctaatgatttttttctgcctaggtttggaatagtgtacgttgattacaaggacttgaagagataccccaagatgtctgctttatggtttaaacaacttttgaaacgggaccagaaatgatgtggtcaatgtgtctatgatttgggttgttaacgagaggtgaatgaatatgtcatatgtgtataacttaagaacttgtcttcctttgacatttcaacgcttacataaaacagcagcaagaaatttggttcttctatcatagaacttctacattcaacaatgtatgctatcatcctcatcctcatttttttttaatttctattcactttaccgtggctcagtttctatttatcaagtcattcaaaattagaaaaatattggatttaaaatggatgtgtaagttcttccaaatcacttgtatcaaaaagatagatgttgatgttatgtgacagggcaactaattattgcaagtgattggcaaaaaaggaatcttgatcaatggatattttgagatgctaaaatgcttgttagactcgacgactcaataatggatgtaatcattcctcttccactgaaaaatctcataacacgattcacatcacatatctttttagacaaaaaatctttagtttccgtaccgtttatcacatcaatggatattttaagcctaatgcatgcacgttctttgaaatgtgtggacttaaattgatttctttagtttctcttttgttgtcattcactactcactactcactagccgtttgtgctttcaagagttgaatgaagaagaactaaggaaaaatacgttttcacgtgaagatttgggagacaagtctaaggaagtggggcattcatggtccacgaggactgaacttaatggatcatgatttgaccagtttgcccttgtcggcttctgtgtgttcacgttttttcctttggcgctttacgattcgcgtgatgactttttctcaaaatgtgggccggacacgataattctgttccggccattacacataaatatagttgtttttatcttatgagaaaagttataaaaaagaatcatattccgatttgggtaaatttttttaagcaacattgtgactgattttcagatataatttggactctggacacagctacgtaaaaacttactgtgtttagaagatatgttttatggaataaatccatgcaatatttggcagtcaatcccgatatcataagagtatggatcagcttctacagattctctgagaattttatcatttggtaacaaatcaaattgttgcaattcggatttttacctctatataagatgatgtccttttgtgtcatctccctatgcataagcatcaatatactttctacttacgaagtcgttacaaatgttaaatgttagtaaaaaatcaattaaataaactcattatattataataaaaaaacaaagacaattactttctcacattcttttcaccaaaattctttacatagtttagaaaattatatgatatatagttttaaaatccgaatttggtgaaatatatctagttttatttagtattcaattttaaattcataatgcttacagccttatcctatttattaaaaaaaaatccaacctttccactaatgcactcccataacaatttaacatcgttggttcatgtattatttgttttgaaaacaaaaggcttttaaaagcctataaatatccacccaattgttatcctccccaaaccaaacggtcaaacctcactcaccatg

SEQ ID NO: 33126 - DNA, 3003 bp, Unknown
  misc_feature (1)..( 3003): 2750-1469P.txt file - cDNA_ID_3065920; gDNA_ID_1620487; Annot_ID_158492
cctaaaggatgatgattggaggtgggaaaatgaggaaaaggggtgaactgaggaggatgatgaggatcaccaagagatggatccatggatgtgagatttttgcagagcaaagagaagagaagatacagtaaaaaaaaaaaaaagaacaaaaaaaaaaaagacagaggtggaaggtgagatttagatttagggtttttttttctttttttttgttttttgctctgagagctcttttgatttttttgtttttgtgaaaataaaatttttgtgagagaaataaataaagttaggttggggagagagaggcggaggagtagagacgaaaggatgagaagaaagattactattaaatctaaccgttgatttgttttctatcgacggttttgacgaggatcgatgacgtgtcatatcattttgtcttttattttaaggattttgtgtttctttactttgatttttttcatttttgcctcttagaattttgctacattttcgctccaatgtaataaaaaatcaccaaaattttaaaaatggaccgccaaaattttaaattatttttctgaaaagaactcctcgctttcagtgtaaaacaattttgttgattttagaataacatcgaatgaagtatatagcaaacactgttacattaagtaacccatgtaacaaactccattaaagagtgtatgataagtaagagatgtattgagatgagtatggcaaaacaaatgcaattactaacttctatgtcctctgtttaggatttgaaatcgatacatttacataaaatttagtttcaaatttatattttctgtgaattttgttagagtatatatctatttgcgaccctttaacttaatcacaaaatgatacatcaaatatgtttttcattaaggaaaaattacaagacattaaaatatttttaaacagtaatgtatgatatttacatttgaattaaattttaactttagttgcattttaacaaaatatttgatatatatatatatatatatctatatatatatatataaatgtacgacgtaaaacaaaaataacaaataaatgtaaacctcttattatagatgatgaaagataactttatgaaaaaaataaaatatggaaaaatatatttaccaagtgctaaatacatttttcttttgtcttgtatcacaaataagcgtgatatatttaaaagaataattgaaatattaaatgatgaaagataagttttaaaattttcaaaatatggaaaaacatgcaattagtaagtattgattgcaaattttaatttgttttgtacaaagaagcgttatttatttaaacattataataaaaatgataaatagtgaacgatgaatttaagaaaatttaaaatatgaaaaactagaatttataattgtttaatgcaaaatttataacaaacaagcatttttaacgggtaatgtaaaggatacaaagtgagcgataattttaaagatatttagtggttttacatatagttaatgttttttttttttttttagaagaactttttttttcatttgacattttaatattgtttaatgaacttttgtgtattatatgtgtggattcaaaagggtagttggatagatttcaccatttgaattttgaagtagcaaatctcaaataaaatcaatgggactaagaacaattgataaatctatgggggaacaagtgtcacacctatctccttggtaaagccagcccatacatcacggtacccaaaaagaatcatccaacaagagaattgttggtacatattactgacattacaatacgatattataaagagtacagtacgtttatgcttatgcattaagcgcaagtaaaacccgatatatgctcatcattcaaactccaagtatcacctgagtcgtgtcgttttcatacaacaatttatgtatgctcattcttttaatactaatatatctgtgttgtgatgtgtgcatgcgtgtgctcgaatactttcaagcaagggtcaaacaaagtgcggctggtaatagacgatcagaagacacaatcaccagacaccaagtaagcagatgacaaaagacgatcaccacaccagaattccaacaaaacaaaagattatgatatgttttgtcgcctctgatatgtcacactacacagtacacacaacctcttataaacaacacttttaacgggccgaattatcagccttcaatataatgtttacttatgtgatggacctcaacattacatgggcctatctgttgcataattaacagttttaagacccttttatttttctctcgaatttgaaatgatttgtttatgttttttatttaaatgtttttgcatatttggttgggtcctctcgagtcacacacgaccggagacgtgcattagaagagttacagagcagacatttgctggcatcttacaattatctcaaacataaccttcttttattattaggctattggccctacccaccaccaccatttttattttctttttctcaaacacgctttttgaatttcaatattatatactgtccttatcaaaaaatagttatacgatttgttaattttgttagcctaatttttcctaatctggttatgtcacggacgcaagttaaattcatctgcggtgtttttaggtgttataaagccatgtgaatgaagttaattaaaaaaaaagcaatgtaaatagtcaaacatgccctttaagaaaaagagaaacacacgcttcacgtgagtcgcacgtgccaaacccacctttcatcttcttcttcttcttcttcttctatcttccgcatccttcggacaagagaaccaaaccagccaacaaaaaataatagtaatggagagtcgaattagaaagagagaagcacgccatacctgagagattcgtgcgtcgacgacgtgaaaatcattattatttactaataataattgttattgtcaatcgatgataattaaattaaaattagtttaaaagtggtggtggaggtgtttgatg

SEQ ID NO: 33127 - DNA, 3000 bp, Unknown; identical to SEQ ID NO: 2111
  misc_feature (1)..( 3000): 2750-1469P.txt file - cDNA_ID_3065965; gDNA_ID_1620489; Annot_ID_158552

SEQ ID NO: 33128 - DNA, 3000 bp, Unknown; identical to SEQ ID NO: 2107
  misc_feature (1)..( 3000): 2750-1469P.txt file - cDNA_ID_3065969; gDNA_ID_1620489; Annot_ID_158550

SEQ ID NO: 33129 - DNA, 3000 bp, Unknown; identical to SEQ ID NO: 2112
  misc_feature (1)..( 3000): 2750-1469P.txt file - cDNA_ID_3065977; gDNA_ID_1620489; Annot_ID_158548

SEQ ID NO: 33130 - DNA, 3000 bp, Unknown; identical to SEQ ID NO: 2114
  misc_feature (1)..( 3000): 2750-1469P.txt file - cDNA_ID_3065981; gDNA_ID_1620489; Annot_ID_158547

SEQ ID NO: 33131 - DNA, 3000 bp, Unknown; identical to SEQ ID NO: 2115
  misc_feature (1)..( 3000): 2750-1469P.txt file - cDNA_ID_3065985; gDNA_ID_1620489; Annot_ID_158546

SEQ ID NO: 33132 - DNA, 85 bp, Unknown; identical to SEQ ID NO: 2106
  misc_feature (1)..( 85): 2750-1469P.txt file - cDNA_ID_3065991; gDNA_ID_1620489; Annot_ID_158541

SEQ ID NO: 33133 - DNA, 3003 bp, Unknown
  misc_feature (1)..( 3003): 2750-1469P.txt file - cDNA_ID_3066002; gDNA_ID_1620490; Annot_ID_158585
aaaaacggtggtttcattgcttatgagcgtgagggagttaagtacagggatcccaatgttcgtcttaatgactggaacgaagtcatggaggaatcaaaacctggaccactccttacaactcagtcagctcgttgcatggattgtggaactccattctgccaccaggtatacatcctcagataaaatgccttttttctttccaagtattcttcttgcagcttgtcaaagactggttttgttgtttatatgtcaaggaaaaattgcaactaggtgtttcatgaatgaaatccttaacatttttgtttttgaaaatttacaggagaactctgggtgtcctctcggtaataagatccctgaattcaatgaacttgtctaccagaacagatggcaagaagccttgaatcgtctacttgagacaaacaactttccagaatttactgggcgagtatgccctgcaccatgtgaaggttcttgtgttcttggaataattgagaaccctgtttctatcaaaagcattgaatgtgctattatcgataaagcctttgaggaagggtggatggtaccaaggcctcctctcaagagaacagggtatactttctaagtctattccatattatcttatcttccactgttgtgaggctcacatacatcttgtcttccactgttgtgagtttacatttggctgatttatatgcttctgctgcttgtgtggtttgcaggaaaaaggttgctattatcggaagtggaccggctgggttagctgcggctgaccagctgaacaaaatgggccatttagtaaccgtgtatgagcgctcggacagaattggtgggctgatgatgtatggagtaccaaacatgaagactgacaaaattgacgtcgttcaacggcgggttgatcttatgaccaaagaaggtatcaactttgtggtcaatgccaatattggaaaggacccatcttactcccttgatggacttaaggaagagaatgatgcaatcgttcttgctgttggttccacaaaaccaaggtaatattttgtttcaaacaatgctgaattcctatttatgttaccagacgttcaaatggattatggtgaactaaccgagacattattggggtaattttgcagagatcttccagtgcctggtcgtgatctatctggtgttcactttgccatggagtttcttcatgcaaacaccaaaagtttacttgacagcaatcatgaggatggcaattacatttctgcaaaagggaaaaaggttgttgttattggtggaggtgataccggcacagattgcatcggaacatctatccgccatggatgtaccaacattgtaaacctagaacttcttcctcagccaccctcaacaagagctcctggaaacccttggccacaggtttgtttcagatcttctacactcaatccttttagcaacttcttcaagatttttgcatccattggattaaaaagagttgtgagcaaggttggatattgttgattttaatgagcttccgtgtgaatacagtggcctcgtgtattccgtattgactacggacatcaagaagctaccaccaaattcggaaaagaccctaggacctatgaggtcttaacgaagaggttcataggagatgacaatggaaacgtgaaggggcttgaacttgtgcgtgtgagttgggagaaggatgaaaccgggaggttccagttcaaggagatcgaaggctctgaggaaatcattgaagcagacctcgttttcttggccatgggtttccttggacctgagccagtaagtgattcccgttgtgtaccctcttcttatatattgtgggtcttgtggcaatgatttaaaaccaattgcttgtttttgtttttacagacacttgctgagaagctaggtctcgaatgtgacaacaggtcaaactttaaggccgagtatggccggttttccacaaccgtggaaggtgttttcgcagcaggtgattgtcggagaggccagtctttggttgtctgggctatctcagaaggacgtcaagctgcagatcaggtagacaaattcctcaccaaaacggatgatgacgaagacgccaagctacaacaagaccttaaccagatgaaacacaacactatcacaaactgaggtaaaagaaagccttactcatctgaagcaaaagtcgagagagaaagacaactgatgttactcttttagaggacacacaggcgtaaaggaccgacttatggcagagatgaaggaagagagttgcagaggaaaagtaccgaacttgatgatttagtagagagaagtaaaagtttaggtttgtttttgtttattatcgtccataaagtaataatgattcataagtacattctctttgtaggatttcagtagctttcttttgttaaagctttctgaaattgaaagccttttgttttttctctatggctgtttctaagtttgaattttaaggaattgtaatgcagttcctgcttcttgtttttgccctctttgtgttctttcatattatttatggtggtgtaaactgtaaacaatgttaggaatcataagacttgctcagtaaaatagtgaaaaaaatgatcttcaattacacagtgaagattgaggtatgtaaaaccggtatgtagtttgtctccaacaaatttcttcattttttctcggtcccaaccagttggtagatgaaaagcggtccaattaacaaacggattcgtcagttgtctctcgtcgcaaccattcaatcctacgtgtaattcctcagttgtctctggtcttcaacaaaagacaagcccacaaagagaaaacaaaaaaaaagtaaagaaaaagaaaattgtgaagcggtgaaaacaagagttccaaaaaggtggctcctttttgtttctggagatgcgttattgtgacccttctttgaaatttagggttcattttctcagatttcgagttcgttgtgtttgaatctctattgggtttactttcttattcgatttgggggaaatg

SEQ ID NO: 33134 - DNA, 3003 bp, Unknown
  misc_feature (1)..( 3003): 2750-1469P.txt file - cDNA_ID_3066011; gDNA_ID_1620490; Annot_ID_158581
cttaaagaaaaatcatacccattttcttcttgaaccactgaactggaaagttgacgctctggtcttgtcatatcaccatcaggctctactctgctactccttgagcccgtgattacgtcctgataatcctgataatctggagacctcctaccgtccctcctatccttataccgaccactttgatcatctagacgcgacacatcacgatcattatccctttcacggtcgcttttactccgtttcccatcatgataatagtcacgactacgatctttttctctgtcatgagtcctgtccctctcatgatcccggtcacgatctctactcctatcacggtcccaatcccggtcatggtaacgatcatgctcataatcccgtcgatcgcgatcacgttcccgatccctatctcgatcacggtccctatctcgctcataatcacgatcacgatccctagttctttcgcggtcccgttcatttcggtcactttctctatcatagtcccgattgcgttcacgttcatgatatccatcaagttcactgtcaggctcatgaccatggtcattatcctgaaatttagatttctttttactctcatctcgagtgagcttttcatcagacctcagatgttctttagtaggtcggtcatctctctgcttgtcacctttctgtttgatgtcttcttcttctttgtcttcccgatatttatctctgcttttctcccccttatgctttccatctttaatgtagtcatctccagaagtgagaaccctgtcaccaacgtcatcactgttatcgtgatgcttgtctccagtaccatgatcatccctcttacgccttgatcgcttctcagtataattttctgtacctggactccttgcatgatcctgagcttttgattctgaattcaaaagtaagagaataattagcataagaccctttgcagttttctagactatccaactaaatgtgagaaatctttcatcaaaatacacctatgttaaccagttaaacacagcctccaacataacagcaagtaaagcaacactacctccattaatcttagaaaaggcagtagaatagaacataacaacaagtaaagacgctaaatcggcatctaagttcatattctagtaagaactctgaaccaaaggaacagtctttcaaaacaacactaactaaaggcaatgtatccattttcaggttcctacaaatcaaccatttgatatcagatcaagatatcttaccagttttatcagaaccagctttggacttatgatgatcatcaccatcataaaacttgtcacttttcccttctttatacttcctatctttctccttatcaacatctttactctcccttctactagactctctatgcttcccatcacttttaccactactcttcttcgtctcctcaccatctccctcatctctcttcctactcttctcactcgaaaccttcgtcttcttcgaactctcacctttatcatcatctttaccattccacctatcactaccactctcaccactcttccctttcctacgcttcgacgaagaagaagtatactcctcataatactcaccattaacagaatcataatactcttttctcttatcaccagaaccagattccttcgaaaccctaacagtagtactactctcctctttactcttcttctccttcaaactcgtctctttctccgaatcggaatactccttcgtcgcatctttatgcttactcgatttatgcctcgtactccttggcatcttccacaatctctaacaatcgcaaaaccccccaaaaatatcgaattttcaaaccctaaatcgagattgaggtttttagggactttggtttgattgaatcttacagcggacttaaagattaaaaaaagactctcacggcggcggaagaatctagatcgccggcgatttgaaagccggcggcgagatttaattggagaaaattacaaaagaaccacggagcgggagatatagagaagatagagagagagagagaggaggcttaatgccctttcaatgttgaagaaaacgagaaactgttttttttcagacaagaggaagactaagggattatttgtttaatgactatcttatcctttaatcgtgggttttattacagttttttgccacgcacgttatcagatcggattttgctttcgtccggtttttgggaaagtagtggttcggttatttctcgctagcgtcgtgccacgtcacgccgcgactcaaaaactggaaacagctggagcccaataaaggcccattaagaagttattggcctagtaatgcccaatgagagtttttattagctaatgaccatattaaccagtgatcgtgggtattattacggtttatgccctgatcccctaacgttatcgctttcgtccggtttagtaaagcagtgcttcggtttattacgtcacgtaactcaaaactggagacagatgaagcccataaaaggaccattacgtaggtagtggcccaataaggcccaatgagagttgggatgagatatttgagaggcagaggttgacgtgggtcgacctcgaggcgcgatgcctcaggcgtacttcatcacgcaactatcacgagcctctctgtcgttatatacgactttcagtttttcttctgatttgggaaagaatcaaacttttgaatgtgaagttgcttctttcgtctcaagatctctctttatctctctatctgtttgattggtaagcttttgattcgagtgttgtaatgattgatgaaatgattgtctatttacggcattaagttgttcacgtagtctctcttcgattctcttgtgttaaaattagataaagattatgactttctggattatttggaagatcagtgttggtgaattgagtttcctttaatagtaatgtgaagtagctgtgtttgctttgtttgtgagtgatttgatataaaagttgattacttttgaatttgtatgtagagggtttttgttggatg

SEQ ID NO: 33135 - DNA, 3000 bp, Unknown; identical to SEQ ID NO: 2117
  misc_feature (1)..( 3000): 2750-1469P.txt file - cDNA_ID_3066015; gDNA_ID_1620490; Annot_ID_158580

SEQ ID NO: 33136 - DNA, 3003 bp, Unknown
  misc_feature (1)..( 3003): 2750-1469P.txt file - cDNA_ID_3066047; gDNA_ID_1620491; Annot_ID_158626
gattgagccagccgctaaaatctttaaatgcataaattttgttgtattatataaattggtaagagacgatctaattatgatagtttctatagtgaatttattgaaagtaaataaatagcatttttaaaacaaagacaacaatttaggtctcatgaaattaaacaaccgtatcactacgtactattgcatcaactatgagacatgcaaattctaagttttaaactcgtcgaccgaatcgcctctgcctttgctgataccaagtcaaggcctcaagatactcagcttcgccaaaatcaggccacaaaacagttggaaagtaaagctcagtgtaagcagattgccataaaaagaagttactgatcctttgctctccgcttgttctgatcaacaggtcagggtttgggaattcgctacactttgtcaacaactctttctccatcgccttctcgttaatgtcctccacttgaatcagcccgtctttcactttatttgcaagacttttgcatgcttgtaagatatcatatcttccactatagtctattgctataatgagattcttcccttcgtaactctttgtagcttcctctacctcttctatcaaacctagaagcgactcggggagttttgtacggttcccgataaccgagatcttgatcttatcactaaaaaataaaggggaaattagcatcaagacatataaggctttaaaagaggataaagaaaaaaacatcttggagtagataccttcggaggtaaggcatatcagacgctaagtatttctcaaacaaggccatcaagcacttaacttcatcctgatcaaagaaaaagaaaaaactgaatcaaaatgaattatataaaacacaaaagttttcaaggtcacaaattttaacctgcggtgagaagaaaatactaattagtaattaacatgcatgcaagttatattcgtaaggtccacaatttttattttttttggttttagtccataacttcttggttactcaaaagcagattaaaactcttggaacgttttgtgtaatcacctctggtctttcccaattttcggtggagaaagcaaagagtgagatagtgtttgtccccatagcgaaacaatccttagcattctccatgagccttctcgctccggcctcgtggccttccgatgtcccgagtcctcgtttttcagcccaacgtctgtttccgtccaatataaccgccacatgctttggcattatatttctccctcgtttctgtttctctcccattgtaccactacaaataagtaataagaacaaacaaagttagtatactttcataatagcaaaagatgcataaatacgtagaaactatgattagtaaaaaccaaactaccgtttctcgttcctttcttcctcatcatcgtatttagaagctatgattttgatgaatctgaggatatttgtcaacgacaaaggaacatttagtcgccgagagatgaagagaccagggatgagaaaaagagctagaaaagtaaaaacaacagagaataaagacaacatattttttctgtttttgtcttttgtttttcagtgtttgttcgaattggagcgctagctcgtcatgtacttaaagagcttcgggttcaaagacgcacatgatgatcaatggaacctactttctttctctcacttgctctctgtctactccttgatgctacgcaaagacagatcatacgtattaagttttaataagatcttacgacacttgaaaatcactaaatggtttggtcacgtgattttctcattaaacaaagacatttttgtaagttcagattttgactttttcgatcagtataacttgcttgattttaacattaatgtccaagccaatcgcatagacatagtcatgcactcatgctctcacggtttgtctacacgttactaaaaaaactgaacatagaaatatacggggctttggctgtaattaaggcccatgactacacttcagaaggagggtcattagctatgatcatattcatcctagtttttatccaactcaacacaattatcagtgtgtatagtctatttattttatcgcactacccactttaattattgctatgtacagtgggatcactaaattgtttgttggggacattgaccttatccacatattttttaattgatccatacctctatcttttattttactcacccactttttatctattgtttattgatcaatgttgaaaatctcttgacatgtggaaactcttgaggtgttgtggttttccaagatctttttaacgctcaattcagtaaataaaatcatatacgatctagcaaaagcaaaagaggaatgaacttaaacccgcaaaactcctttaaacattaaattgtttcaaacggttttgtaacacatttctccattaccttttcttgttgtgttttgttaatatcttttcaaattgtgtagtagtcttttgtaaaaaatagatacaaaatcacacaatacaagtcaaagtgagacggcgtgaaatactacagtactattttacaataacgtggtcgccaaattattatttccaagtggaaaaatcctttaatagaaactgccgaaaagccctggttaggccaaaaaccccagtattggaacaagggtatatccgtcattgcacgcataaatttcgggacttttcttgaaaaagcagcttcgagaatcgtaactgatgaatcgctaaagagaggtttatcgagaaaaatccaagatttactaaaaaaccactatctctctgctcttcctctgtctacattaatgtaattttgatcatcggattgggtgaaagaaacatcaaactcctaaaagagaagcctttaaagtttttttttaatcaaaaacaaaaggaagaaaattttcctttttgttttagatggcatgaatcatcatcatcgctttgctttcttgattctctatttcgtttgatgggatttgtttttctgggaatttattcattcacctgctgccatg

SEQ ID NO: 33137 - DNA, 3000 bp, Unknown
  misc_feature (1)..( 3000): 2750-1469P.txt file - cDNA_ID_3066051; gDNA_ID_1620491; Annot_ID_158624
ttctcgaagctgctttttcaagaaaagtcccgaaatttatgcgtgcaatgacggatatacccttgttccaatactggggtttttggcctaaccagggcttttcggcagtttctattaaaggatttttccacttggaaataataatttggcgaccacgttattgtaaaatagtactgtagtatttcacgccgtctcactttgacttgtattgtgtgattttgtatctattttttacaaaagactactacacaatttgaaaagatattaacaaaacacaacaagaaaaggtaatggagaaatgtgttacaaaaccgtttgaaacaatttaatgtttaaaggagttttgcgggtttaagttcattcctcttttgcttttgctagatcgtatatgattttatttactgaattgagcgttaaaaagatcttggaaaaccacaacacctcaagagtttccacatgtcaagagattttcaacattgatcaataaacaatagataaaaagtgggtgagtaaaataaaagatagaggtatggatcaattaaaaaatatgtggataaggtcaatgtccccaacaaacaatttagtgatcccactgtacatagcaataattaaagtgggtagtgcgataaaataaatagactatacacactgataattgtgttgagttggataaaaactaggatgaatatgatcatagctaatgaccctccttctgaagtgtagtcatgggccttaattacagccaaagccccgtatatttctatgttcagtttttttagtaacgtgtagacaaaccgtgagagcatgagtgcatgactatgtctatgcgattggcttggacattaatgttaaaatcaagcaagttatactgatcgaaaaagtcaaaatctgaacttacaaaaatgtctttgtttaatgagaaaatcacgtgaccaaaccatttagtgattttcaagtgtcgtaagatcttattaaaacttaatacgtatgatctgtctttgcgtagcatcaaggagtagacagagagcaagtgagagaaagaaagtaggttccattgatcatcatgtgcgtctttgaacccgaagctctttaagtacatgacgagctagcgctccaattcgaacaaacactgaaaaacaaaagacaaaaacagaaaaaatatgttgtctttattctctgttgtttttacttttctagctctttttctcatccctggtctcttcatctctcggcgactaaatgttcctttgtcgttgacaaatatcctcagattcatcaaaatcatagcttctaaatacgatgatgaggaagaaaggaacgagaaacggtagtttggtttttactaatcatagtttctacgtatttatgcatcttttgctattatgaaagtatactaactttgtttgttcttattacttatttgtagtggtacaatgggagagaaacagaaacgagggagaaatataatgccaaagcatgtggcggttatattggacggaaacagacgttgggctgaaaaacgaggactcgggacatcggaaggccacgaggccggagcgagaaggctcatggagaatgctaaggattgtttcgctatggggacaaacactatctcactctttgctttctccaccgaaaattgggaaagaccagaggtgattacacaaaacgttccaagagttttaatctgcttttgagtaaccaagaagttatggactaaaaccaaaaaaaataaaaattgtggaccttacgaatataacttgcatgcatgttaattactaattagtattttcttctcaccgcaggttaaaatttgtgaccttgaaaacttttgtgttttatataattcattttgattcagttttttctttttctttgatcaggatgaagttaagtgcttgatggccttgtttgagaaatacttagcgtctgatatgccttacctccgaaggtatctactccaagatgtttttttctttatcctcttttaaagccttatatgtcttgatgctaatttcccctttattttttagtgataagatcaagatctcggttatcgggaaccgtacaaaactccccgagtcgcttctaggtttgatagaagaggtagaggaagctacaaagagttacgaagggaagaatctcattatagcaatagactatagtggaagatatgatatcttacaagcatgcaaaagtcttgcaaataaagtgaaagacgggctgattcaagtggaggacattaacgagaaggcgatggagaaagagttgttgacaaagtgtagcgaattcccaaaccctgacctgttgatcagaacaagcggagagcaaaggatcagtaacttctttttatggcaatctgcttacactgagctttactttccaactgttttgtggcctgattttggcgaagctgagtatcttgaggccttgacttggtatcagcaaaggcagaggcgattcggtcgacgagtttaaaacttagaatttgcatgtctcatagttgatgcaatagtacgtagtgatacggttgtttaatttcatgagacctaaattgttgtctttgttttaaaaatgctatttatttactttcaataaattcactatagaaactatcataattagatcgtctcttaccaatttatataatacaacaaaatttatgcatttaaagattttagcggctggctcaatcaacacaaaatagtttgaatggtagataacacaatttataaccatactgactagttcattgattgagcatcatctacttaacagagagattattaatctttttacttactctgtttcaccgaataggcaaaataaaaatgtcaatgcttaactcgtgtttgtttagtgaaaaagtaactaagttaatttttggcaaggtttccaaaactgcgagagaaacaaccagagccagtcaataaaaactcaattatgaattttatgatccatgcaaatcacttgctagtactcttcacactctctacaatg

SEQ ID NO: 33138 - DNA, 3000 bp, Unknown; identical to SEQ ID NO: 2127
  misc_feature (1)..( 3000): 2750-1469P.txt file - cDNA_ID_3066055; gDNA_ID_1620491; Annot_ID_158621

SEQ ID NO: 33139 - DNA, 3000 bp, Unknown
  misc_feature (1)..( 3000): 2750-1469P.txt file - cDNA_ID_3066059; gDNA_ID_1620491; Annot_ID_158616
ccaaggagcttcatgggcggtattcgttctgactaaataaataatagtcccactcttgttgctataatagtatgtccattataacaaactcaaaagtcaccatgacttaaacaaaatgtctcatgtctcataaataaaccccctgactctctgtttctataactcgtaatggcaatcatataaatcgtctttcgtctctgtttagttgtccttttcttcccgacaacagaatcggagcatctactaaaagtccactgagccgccgtgcgcttcgaatcttgttttggtatgtgacagctttttcaaaaagaaattgtcttggataagtggaggagaataaggaattcgaacaaaataaaattggagaaaaatgatcatattctctattttattatttaacatcattttatttcggttacaaaaaaaaaaaggaggaaaattaggcgcgcgtcatctccctcgcgacacatatatcataagacagagagcagggaacgaatctcaagacgttacgtattagcttatagccattagttttgtctcttcttcttcttctcgttggtcggcttcttcgtcttactaattccatgattcttcttcttccttctgcttcactttctcgatgatcctctgcaccagccgcgatcatgacgttgaatcctcctccgtcgcagcaaacgtctcactcgccgcgtcggattcccaatcgccgcgttctcatcgtcggaaattattgccacgacgttttaatccaaaacggatccgtcgtagctgaaactctcggcggcgccgcctctttcatatctaatgtcttagattcttcctctgtctcctgcgatttggtctccaaagtaggacacgacttcagatacgaggtcacccactctccgatcgtggctccggagaaggaaacaacagttttcgaggcgtatttcgatctgggaatcgatgggatcggtcatgctgatcgggtgttgaaaagagtctctgcatgtgatccgattcttccttcggatatacccgattcgagatttgatttcggaatggccgttggagtcggcggcgagattttaccggagacgcttgagaaaatggtggagatctgtgacgttgttgctgtggatattcaagctttgattagggtttttgatcctgttgacggagctgtgaagcttgttgatttgaaagaaagtggattttatcacatcttgcatcgaattggattcttgaaagcttcgtcagacgaagctcttttcatggatgttgaacaaatgaagcacttgtgttgtgtggtggtgactaatggtgaaaaagggtgtaggatttatcataaggatgatgaaatgacggttcctccgttcttggcgaagcaggtggatcctaccggtgccggagacagctttctcggaggtttgattgttgggcttgttgaaggtttgactgttcctgatgctgcattgttagggaacctctttggttccatcactgtagagcatattggtcagccaaagttcgatttgatgatgcttcaggtttgttttttggtctcgtattagcttactgaattgcatgctgtgagagatttgcaaatctaatagacagtagtaagaacttttagagccgatgatagtgatatgcaaatgtctttaacataatcctagcaaaagaactctgttacatcttgcagcttactttcaatacagccaaacctatatcttgcgggtgaactagaatctgtatttgatgttgataggtttccaatctgaaaatgtgtcaaatcttcacagttgttgtttgagattctgtcgagtcacagctgctgagagagtcttttcttgttttacttcattgttaatctaggagcagtttcattcaacatagggtagatgcaggaaaaagtgttgtttaagcattcaccgaacaatgtggttaagcaattagagaattcaaaagtatggatctcttgatgtatttgcgagtgtttctgtgtatctcttgtagttgtatctgttgaaatgagggcgttattggataataattgaaccattggctagtgcaagtgaacattaagcaaattagaagatttatagcgtttgtgtttgcactgcacaaggattcatccctttcatcggttatttctatgtgacatatgtctttgtgatttgcagaaagtcaaggatgaggtacagagaaggaagaagcagtgtaacatatctagcagccataacaacgatcacaacgagttccatgagcgtctaagtccagctcggttttcatgcgtagactctcaacttcaaccaaagttattggtcaatggtcactcttgtgatgatcggtccctgtgaatacgaatcttgaatcaccttttttttactaacaaagctcttctgagttgtgtaagcttgcttcaacacgttgatgaattttggaaattttaatgtataaaacgcgttgaccagcgtcttcaaacgctctttctggtcgttcccgcaaagtttgtttatcaactccgcgtttcaaaattcgaaatgaagatgtcaaattttgttttaaaagttttggataagatgatttgctattcgcatgttgccacattatctagttaatataaaaaccaaaaacaaatctgagataaaattacgaaagtcaacgtgggagatctaattttgactggtgcatagttgaaccggttcaatatatgtacaatcaggaggaaaccgtgttcggtgtttgattcgtgcgcgtggatttaaaacgtggtcacgatcaggcgcgtggattgacgtggcgattccgattcccaatcaaaagtctggacgagcaaaaaatttcctctgatattggcatctccattactaactcctgatttacggttaaaacgcctcttccctctctccgacgcttctcgtcggaaatctgggtttaagtttcttctgcagatcggaagagattctattgaagcggcgttgacacgatttcatctataattgtacgataatg

SEQ ID NO: 33140 - DNA, 3000 bp, Unknown; identical to SEQ ID NO: 2130
  misc_feature (1)..( 3000): 2750-1469P.txt file - cDNA_ID_3066063; gDNA_ID_1620491; Annot_ID_158613

SEQ ID NO: 33141 - DNA, 2707 bp, Unknown
  misc_feature (1)..( 2707): 2750-1469P.txt file - cDNA_ID_3066073; gDNA_ID_1620491; Annot_ID_158593
gatcccaatgaaatatacaaatgggataatatggttgataccttcaaattaatctaagccaaaaatggtgttgtcaatggaagaagcttgatccttggatctgctgtagagatggagcgtctcggtgtggttagggtccaaacagagagcagcttcacagtcttgagtggccaatgacagattcccagtggcctcgtgaaatgctgctctgagatgcagcgtttgcagttctggtctgaaagctatcgcctttgacagctcttccactgcttctgtctctctctgatcatccatcagcactgccacacatacgatcacttctttaactactagaatttataagatgttaatacagaacaggaagagttagttaccggcagctcggtatctgtagggataagttcgcagagggtcgagtgttgtggccatgtcaagatcttctttggctttttcacgttcacagtactcagaccgtttctcgtaggctgctgctttgctacacgacttctcgatcagctttgtcatctcctcacaagcttctttacgttggttcttcaaaaaataaactcgcgccagcccttggcgtgcacgaatgtgtttgatctctatagcgttcttatatgcggtttcagcttgatctagcatccccaaattgatgtagatgctcccaaggttgttcagagcctgcagaaacataacaaaacgactaatcagattacagtgtgaataagagaaagagaaaggcgagacatcaaaatgccaacctgtcctttgcgtagcccatctgaaggacacttgagggcttcctctagaacctgaaccacacaagagatctcgtctgcatcgagattcttgtcagctagagcatatgctttgaggaaaaatgcttcaaaggatcgctgaatagagattgcctcctcagctttagtaagagtttcttccacataacccatgtcgtataaaagccacccttcgtagaccaacctttctgcctcagaagtagccaagttccatgccattcgcaaacacctcatcgcggctccttgacaattcaatctgttacagatcacaaaaaaatgtagcttccgtcaactcctgaagaattcaccaatcaggttgccagagaaacaaaagatattcttcttaccttaagagaagaagagattgtctaaacctcagaaagtttttgctgggatcattctgaagcatctgatgaacaacagccaacgacgcaacatcatccacagctgaccatctatcgaaaagcctcacccaacaatccgcttcactctctacttcaatacattgcgcggtcagagcctccaccaaatcatctctcattttcccaccaaacacaacataattgggctctaaagacagcactgctctaagatctctcaaacaactctcccggtcaccagtggctaaatacagccaagccctcagctcgagacattctggactaagcttgaactgaattaatctatcaatctcttggaaggcttctttaatctgcttctgttcgaatttcattacggctctgtacttgtacggaaaagacagtgtcgggtcaagttcagtggcggttgctaaatcttttagtttctcaactccaacattgtacagagacctctcctggtacatccatccatgtggcttgtgattagagatgagaaagttcatgagcctgtacgccgaatacctcttcccttgtttatattcagttcttgataccccagccaaagagtagacatgccctaagcttgaagctaatctgaaatgaaactgggctgctttgtaatcctttctctcaaacagaacacatcccatttgatgcaaagacaaagccttttgccagtttgtacgagcaaactctcgagttctctctagcaatatcagcatagtgtccgtcgtgagtttctcttccatgcctacttggctgaggaagtagtacaacaggaacacacactctgaacccagaaaagctaattgctcttttgcttcggaactgcagaagaatctcatcactttgggattgtgaagagactgaggaagctctctcagaaacacctgcaagcaagcagataagagaagcgttgtgcgttcctccaacgcgtactctacaaaggttaaagctttatcaaggtcagtgacagaagcagccaagcgagcctcacattcagacttcagatcatcgcaacagaatttgctggctaattgaagcagctcaaatacagtttccacacgaaacagatcaactcttttgattctactatatatgttgagtgccaacattgcctcaatagagatgccattttccgagaaatcaatctcagaagttgttgattccacgaaagaaccatacaacatggcctcaaaaggacgcgaaagcgctgcgattctcgacctaacacacttagccttctctgaacctacgcagaaggaaatatcgctaacctcatctagacccgaaaactcatcagccttagagattttaacgtcatcactaccaaattcatcctcacataccgtagaacattcacaaccctcgtcgtctacattcaaatcacaaccatgagtcaaactagtcttcggacattcagaagcaagcccattacaatccatagattcaactcccacaagttcatgttctctcctaaaaaatctcaaccaagcagagaaaacaaccttacaagggacatcaatg

SEQ ID NO: 33142 - DNA, 3000 bp, Unknown
  misc_feature (1)..( 3000): 2750-1469P.txt file - cDNA_ID_3066092; gDNA_ID_1620492; Annot_ID_158644
atgttgaacttggaacgtgttccacaactagagccgagaaggttttaaatgaataaaatatacaaagacaacccacaaaggcacaaatgacattacaaagtacattaaaaaagtgaaaatccatgtccattgaattgaattcataacaatttaccaaacttcaaatacattaaaatcactgttaaaaataaatcctatagcaccatatatacaattgacggatccatattcttgcttcatcttccacttcaagttttcagcaacaatggcagaactcatcatcgttgactttcaaaacatatctatcttcatcctcttatgtctcttctcattcctttgttacgctctcttcttcaagaaaccaaaaggctttgacctgcctccgagccctccttctctaccaatcatcggtcatcttcaccatcttctctcatcatctctaccacacaagtcctttcaaaaactctccttcaagtatggacctcttctccatctccgcatctttaatttccccatggtcctcgtctcatcagcctcaatggcctacgaggtcttcaggacaaacgacgtaaacgtctcgtatcgctttgtcccagtcaacaaagactctctagtgttcggatcttcaggattcgtaaccgctccttatggagattactggaagttcatgaagaagctcatatccacgaaactactccgaccacatgcactcgagctgtcgaaaggtaaccgtgcagaggagctacgtcggttttgccttgatctgcaaggtaaggcgaggaagaaggagagcgttgagatcggtaaagtagcactaaagctcactaacaacatcatatgtaggatgagcatgggaaggagttgttcagagaagaacggtgtagcggagagagcaagggaattggttaacaaatcctttgccttatcagtgaagctcttcttttcaaacatgttcagaaaagatataatgggagtttctcgtgaattcgacgagtttcttgagaggattctagtggaacacgaggagaaccttgagggggatcaagatagggacatgattgatcatttgttggaagcttatagaaacgaagaagcagaatataagatcactagaaaacagatcaagtctttaattgtggtaaagttaaatgtttttttttcggttgcttcatttataatctatgttttgagattaggtctgactatataaaaaaaactgtaggaaatttttcttggaggcactgacagctcggcgcagacgatacaatggactatggcggagatacttaacaaccccggcgttctcgagaaattaagagcagaaatcgattccgttgtggggggaaaaaggttgattcaagaatcagatcttccaaacctcccttatttgcaagctgttgttaaagaagggctaagattgcatccctcggctcctgtcttgttaagggtatttggagaaagttgcgaggtcaaagagttctacgtaccggagaaaacaacacttgttgttaatctctatgctgtgaatagagatcctgattcttgggaagatcctgatatgtttaagccagagaggtttttagtttcttcgatatcaggagatgaagaaaagataagagagcaagccgtgaagtatgttacttttggaggtggaaggaggacatgtcccgcggtaaaactagctcatatctttatggaaactgcgattggagcgatggtgcagtgttttgactggagaattaaaggagagaaagtatacatggaagaggctgtttcaggacttagtttgaaaatggctcatccgcttaagtgcactcctgttgttcggttcgaccctttcagcttttgatttacataatccaagttcggtgacttgttaagatcaaagacgttttactatgttagttgtgcttgttgtatttcaaagtcaagtatgtaagaatattttatgtttatatgtaagttatgtctaataaaataataaagatcacgttcatattagcgttaatgattctaaatttctaatataaaagaggacatcataaaataacattcggatgtattaataaccatcatcctttgcttggatgtactgcctatcgatgcgcaagcaggttttgcacaacagaatgtcgctgaaagcacttccaagactatgactatatgtgagtcttcaagcatctctcagtcacttggatgatgctcaaagcacctataaggttgtctatcagttttcaagcatctctgagtcaatcaaatgttacttaaagcacatttaatgttgtatgttggtccttattcctaagtcagccatgtattgctcaaaagtacctcacacatcttccatacaattgaatatacctcaagcatttctggagctatttgtcagatgctccagcaccttcttctatacgagcagtttttgcacacggcctttgcaagaccgttagtcggtcttcaaccaccctagtcaggtcattgcctaaagtacctcccatctttattgtcatttccgaaaacactttctagtcaatttgttaccactcaaggcacttctcatctcgtctttcactagttaaagcatttccaatgtaagtcgatgctcaaggcgtctctctatcagcccgacaacatccaagccgcctcctactaggaatcatggcaagctatctccatcatatgttgccaacaaaagtacactccacactccacactccaaaagtgttggtcttctactcttctttgctccttcgagaaatcaaataagttaatttcttcattatttcatggttgccgacatgactttccaaatacgtgtattaaccgcaataaataaatagttcttataaaaagtaagatgacgtgtcatgtattgctcatcaataaagtaacgctttttcattttatttccattgaccgacacaacaaacaacacgttctctctcatttttcttcttctccgatcaatctagggtttactctcaccggcgacgaacaatg

SEQ ID NO: 33143 - DNA, 3000 bp, Unknown; identical to SEQ ID NO: 2137
  misc_feature (1)..( 3000): 2750-1469P.txt file - cDNA_ID_3066096; gDNA_ID_1620492; Annot_ID_158643

SEQ ID NO: 33144 - DNA, 506 bp, Unknown; identical to SEQ ID NO: 2135
  misc_feature (1)..( 506): 2750-1469P.txt file - cDNA_ID_3066102; gDNA_ID_1620492; Annot_ID_158641

SEQ ID NO: 33145 - DNA, 3000 bp, Unknown; identical to SEQ ID NO: 2141
  misc_feature (1)..( 3000): 2750-1469P.txt file - cDNA_ID_3066132; gDNA_ID_1620493; Annot_ID_158666

SEQ ID NO: 33146 - DNA, 3000 bp, Unknown; identical to SEQ ID NO: 2140
  misc_feature (1)..( 3000): 2750-1469P.txt file - cDNA_ID_3066136; gDNA_ID_1620493; Annot_ID_158664

SEQ ID NO: 33147 - DNA, 3003 bp, Unknown
  misc_feature (1)..( 3003): 2750-1469P.txt file - cDNA_ID_3066144; gDNA_ID_1620493; Annot_ID_158657
ggtaaagtcaacgatccacggctttgctggatgttgccatgttggaatggagaagcgcatcatttgggcccatatttaaaagcccatactcaaaaagttggcccacatagaaaatcgttggcatcagttaaggcggtggaagacgtcgatccctaaagtcgaagcccttgttagggcttctatacatcaccggcgatattggtttacgcgtcggagagatggttggtgagtgttattgatgacacgagatttcaattctcggcggtgtaacgtgaagtcttaacaatttcattgtccaatggtggaatttacagagagagaggaccgagtttctttggaactcagcgaagaaattatacagagcatggaacctggcgccgttttcagagactatgtaatttttccttcccttctcgaagctttcttcttttgttcctgttattataatgggattttaaaggatggagcttttcttttcagaattgcaggatcagctcaattgactttcacaaaacttcgacttgtatggtgacagctagcgacgatgactcaattcgtctctatgatgttgccagcgccacgtgagttccaaaccccaaactctgtcttgagtattgctctataagacattccaactatattttcagtgttttctgttttcttgtttcagatgtctgaagacaattaatagcaaaaagtatggtgttgatcttgtttgcttcacttctcatcctactactgtcatctactcttccagaaacggatgggacggtgagcccaaattcatgtgcacattgcttttcctcattatctgatttgctttaactaacttttatatctggttggttagactctctgaggcttctctctttgcacgataataagtacttgcgctacttcaaaggacatcatgacaggtttgtttcttttctgattcttgtttgatcagcttatgttttccttcacaaaccggatgaacttaaccaatttatgctgtacacagagttgtttcgcttagcttgtgttctggtggggaatgcttcatctccggttcccttgatcgtactgttttgctttgggatcaaagggtcgagaaatgccaggtagattacctttctctaccctaggtgcttatggaggtcttacatctaataaaattgaccatttgggttaaccacagggtctcttacgagtccaaggaaggcctgctgcagcatatgatgatcaagggttaatttttgcaattgcctttggtggctacataagaatgtttgatgcccgtatgtacgaaaaggtttgttcttgacaaaagctaccaatgatcctgttatgtctctagcagcttgatggaccacctgtgctgtattcacattttcttatttacattgaacgtttatctttttctgatttggataagttgcttttatagggtccttttgaaatattttccgttggtggtgatctttctgaggcaaacgttgtgaaatttagtaatgatggaaggctcatgctgcttacaaccatggatggttttattcatgtgcttgactcgtttcgtggaactcttgtatgccttcagcctcccttgctcttcgctagttatggttttttcatttacacacacatgaccaataaataaactggtttatgtaactcttttgtggtacattgcagctgtccacatttagtgtgaaaccagtagctggagaatctacattggatgcagcctttagtcctgaagggatgtttgttgtttcaggtaaccttgagttttacctgattcggatgatgcatgcacacactcacacacttccttcatgtgaaataacttgttctgtttttgtcatggtttggtaggttcaggtgatggtagtacccatgcatggggtgtaaggagcggaaaacaggttggactagcaatacagccatagtttggtgtacatagtttgtcactggaaactttgcttttgtatagttttgagtgttgattggattattgtatgtgtaggtacatagttggatgggtttagggagtgagcccccagtcattaaatggggtccaggaagtcccatgtttgtgacaggctcttccgaacttgcttttgttatacccgacttatcgaaattgccagcttatgccattcggaaataggacgactatcacgtctgtgccatgtaaatgaggcctcatttggccttttggtttcagactttgttgtgggttatgccggtaacttatcccttgcactctgattaatatatatttgggtcttgtaacatgaagataaaccccaagtctttctaatgttgtaattcgtgtaatttacaagtttgactgtttctgactgattcttccgggaagcaatcgatctgactgagagcttgggtcgaagttaaaatggtgggccggcacaatatttaagtaaaagcccaataaggtccaaactctaactaatttatagcagttaagaaagttggtttagggaaactttatgccaaactaaatttattctccttggcgtcttgttgtgttaatcctcaagcaaacgacccgtttctgtcgccaagtcaacccgacccgacttcgttcccatcggttgatcggccgggacctgattgcgtttagcctcccgaaatctacgggcaaagttgatccctctgggtttgtcatttgatatcctcttttcccgtaccgcgcgtttatgattctgattacgttcttggttgtttgcgattgatccgtttaggattttctctgagtccatcgcttattgaatcgtcaaggctttttcttgtttgactttggaatatcgaatctgctcaatactccaccaaattatcaaacttggtgttctttgttgctcaatactccaccaaattatcaaaacttggatgttctttgtagctcaattaccaaattaataagttgcattcttctttgttgcttgttagccttttcatcgagtttcgtttctgcgatactattttgtttaggatagtatg

SEQ ID NO: 33148 - DNA, 2931 bp, Unknown
  misc_feature (1)..( 2931): 2750-1469P.txt file - cDNA_ID_3066148; gDNA_ID_1620493; Annot_ID_158656
ggagttagagaagagcccgagcattactcggtcattgcttctggactttagtgataaatcagaattatgggagagctcagactgctcatctgtggtgactcaaaacccagaggatgataactcgtcggtgtggtcgatgcaggccaatgcaagtgccaaagacgaagagtatgatgatgaagaggaagaagcctattcttacggtgaggaatatgatgaggaatactacgacgaggaagaggaggaagaagagggagggattgtggatgggttgtgtgagggaattaggaagatgagcgtagagactgactttgcagggaaacacactagatttgtgtatgacagtgaagatgaagagattgtggaggccaaagatcaatctccaggagtgttgcgtttgaaaggctttcctacaccgacaggaaaacatgtcagatttgccggtgatgaatgagttcagtttgaatctttcttcttggagttgtgacaaaaagcctcatatgtctcgactttttttttttttttttcttgttgttgcttgaagattcacaaatctgattcttgttattaccttgttgttatttttcaataactaaaagtgtaatcggaatatgactcttttcatttttatcttctcttgcttgttgtgaaaaaaggctttcaattgtagtctatcctaaacacttaaaaataaaaaccggacttaaccgatatcaagattagacatttgcattagaacataacagattagtgaaaagttgagtttcattggttcagccgacactacagctaaaataaagaaaaactatgtggttctctgttgttatcaacataaaccactgtacttggtcaattgatacatacaagatgaatctattgataaagaatttgatatccatgagctgtattttcgacatagacctggtctcaattaacaaatatatatctctttattaaaccatccaaatttgtctatatctagggtgatcatatccattatactattatgcatctctttcaattttggtattggccggtgagtcggctcaaatgttgtaacaaggcaatgaaatgtataaataaggtttaattgtgtatatacagatgctcgctaaaagttatgtgagattatattggtgaattcttgcacatgtgaccatgtgaaaatcatcaaacgaggtcagtaaagactgacccgcattctctattcattaagtatgcaacaaatccttaggacaagtcctttaactctgccccatcttgtaaatcctttcatagacacaactcttcccttgcccattctatataagtatcaagtatgcatatatctacttgtatatgtttttgtgactgttttattttctggaaaaatgagccacctaacaaataaaaatgctttaaatgggctatttgcatgcgaatgagaccatctccattgggagtatctcataagagtttctcacaattaaaaaaataaaaataatgaaaatgaaggagagagagtgtataaagtttctcacttgagaaactctgagatactctgtacaacccatcatgacaattctcatcttactattggttcaattttttaacaaaaatacttttttaatcaaataatcaaattataatataatattaatatttattttgttgagaaactttgtgggtttctcatggatggagatgcccttaaaatgtcccgaccatgttataaacacacacattaaatgtaccattcaccaaaacttaaacttgaccagccttaaaaggattttatatctttgatattggaacttgaaagtctcatcacttagagattgtactaataaaatatgcaaaagacaagactatttgacaataaaactgcgcctcccttggatcataattagattctcgtgtataaataaaacccccacatgcgacagctgaagaggaaggaaacacttaatcatcagagcagcttgtagatgaagaccaagaactctggcgccggatgtgtcccccgtgtaaaaaccaactccagagccactggtaatcgggagactagtgatctgaatctcctggaccgttttcgcgaagctgttctccgcctcatcatgatatctgctgtctccaagtccacatctcgccgtcataacagacagacgccaatccaaaagtactacaaccccactgatacttatcacagcgaagccgtggctgactgtatcgagtttatcagaaccaagaaggccatcatccaccaggaaaacgtcccctaacaccctcacttcttatattcttcattgtcacctcttgtttgattagcaaattataaattggtggaataaaagctaccctacgtgtatacgccttgcttaatatttttgggattatatattagtattaatcattttcttaagttactcttcagtcttcataagttgacatcaaaacaaatcattacaaatttacgaccaacctttttatagtatcctgtaccgtaaaaacgattactaaaagaagaatgaatgtatgttactgtattagttaccaatataatatgcatcgtgtaacttcaaatttggtatagtggtagttgtaaatattggttatcatgttcaattgtaataagtttgtaaccagttgatggtaaagtcaacgatccacggctttgctggatgttgccatgttggaatggagaagcgcatcatttgggcccatatttaaaagcccatactcaaaaagttggcccacatagaaaatcgttggcatcagttaaggcggtggaagacgtcgatccctaaagtcgaagcccttgttagggcttctatacatcaccggcgatattggtttacgcgtcggagagatggttggtgagtgttattgatgacacgagatttcaattctcggcggtgtaacgtgaagtcttaacaatttcattgtccaatg

SEQ ID NO: 33149 - DNA, 3003 bp, Unknown
  misc_feature (1)..( 3003): 2750-1469P.txt file - cDNA_ID_3066159; gDNA_ID_1620494; Annot_ID_158690
tctgtgaatgtattttacaaaaactgcagcttcttatctttgaattagtttatgtgatccatattaaatgttacttactatttatgtattctactctatagagtatataaatgtttacttgtttagcttaaagattcatcaagtgttttgtgttgggatctccgtcggacaatgcaatcttttattccattgaatttaagtacactgcctttagtattggatgaaacaaaaaccatttttgaaaatctgagatatatagaaaccggttggtcagaccttacgtcattttatacttccacttcgtaatgattctgtttggccttgtttggcttcattacaagtttcttttacacattttatagtagtatcatttaaataatgatcacattcaatcaaaaaatacttctgccattatttaactggagtaacgttttggtttccccctcgtaagcaacgtgtccaattccttcaatgaaggttttcatcataccagttcaagtcggtttaatccgattaaaatgctcggtaacccaccaatttagaatgttcggttaagctcatagggctaagtatggcaaaatttaacgagaattctcaaacaagatcgaaactgaattcaaatatttatattgtaaaacgaaaatttacttaaaaacaattagatcaatccaactagtcacaacattcatatttctagcttaaatttcttttggcaaatatcaagaagtggtgatctagtagtagatcatatatagtcctttttgaaaagggttgaaacattgtatttataatttgatatttgttttaaaaggattactttactgtaactttaatttccgtttaaaagattgtgtggactccattcaaaagatttcaaataacaaaaaattgcttcttttagttcgattatgcttgcttactaaataatacaactagacaattagttagaacgtaaatccaaacttattaggggcttaaggccaatccaaaaacgaaaaataatggaaattaacaaaataaaataaaagtggtccaataatgtttcttaaaatagttagagttagaaaatctcaagaacaggattagagaaaatttctattctagtattagtcggccaagccaagctgagctgacaaaaaataagccgagcgtgagagtggcgtgagagagagggtcactgtccgctattttaaatgctgggcgctgcgtgaaggattagaaaagcatttattcttaaaagatgctcttctcaacgtaatccacgtgtcaacttaccattagtttacacatcaaaagctgaccagcaaatcccaggatgggctgtgatcacctacttactcctccatctaaaatctctgtgcaccttttctcccacgagccgttggattcatccaaattacgtgtgcaacactcacttttaagacgatgttagccgtatttaaccgaacctaaccggcgctgaaccgtcttccagttttgctaatcaacaagcgagatttgattatataattaaaaagcctttgttatagacttagtagtgtcacgctggtctcacatgcctattgcctacatgcttggaagtttgaaaatctttaatcatttatttatatgatacttaagttaacatctaaagatattcaaaacttgagaatgaaatcattgctaagagaataatttattttctgaaatactattcttactatgttaaatattttaattctttcaagtacattgtaatgctactagatactttgcctagcaaaatagttttatattttatctgttgtaaattgtatcaatatacactaactttcattaagaattacagacataaataaacacaccaaattttagtttttgagagtcaaactatatatgaaatatcgctgcagtggaaattgtataatatttgatttaaccggcttgaatgattcagaactaataccatggaaatataaatagtataagagagacttcacgtgctaaatcttgaagaagacgattggacagaacaataagacagaagcaataaccaatggaattatggaacatcatataataaacttttttaataatcatttggataattaaacaaatagtattataatcatttttgaattatttggttgttaatatggtccacgcggtctcttctccagatcccgttatctgttctaagatttccgtcggtctatttatttattatctttaattttcagtatcaattaataccttaacataaattattattccatgctattttcctaatttctacaataattgataacaaatcttatggtttaaattaaagctgactttataattattacgtcaaatgtataaggtttaccaaccacttatctatatgtgttgaaaatattaaacagctaataagtctacggatatgtgtagtttttgcctttctagtattatcaaaggtggatatgtatagttttaagatgagtacatataagttcatataaatttatgtagttgtgtttttacatgattgtaaactttttgtatacttctaaacaatttttccaaaaaataagtatatcccaaaataaattcgttgcgcaaatggaaaataagcccgagaggctgacattaaatgggcctggtcctaagaggcccatatatacccagattaatctggacttgcttaccaaaaccccaaaacctcaaatttcttcgtcacccacccgtttcgtttctaagtctctcgtccttttcttttaaccacactccttgcttgagattcaatcgaaaactgaaattcgcaagcctccactgctcgccgtcgcactcatcggaatattccattggcaccgtactaccctgaaatcatctcatcagatcaaaagtatggaattagttgagctcaatttctattgtttggtttttatgaatccctcaatttaaatatcgcgtggtgatttatttttcttcttttggtgtgtttcttcagcgggagtttaactagaattgcgtggattaatg

SEQ ID NO: 33150 - DNA, 3000 bp, Unknown; identical to SEQ ID NO: 2144
  misc_feature (1)..( 3000): 2750-1469P.txt file - cDNA_ID_3066165; gDNA_ID_1620494; Annot_ID_158688

SEQ ID NO: 33151 - DNA, 3000 bp, Unknown
  misc_feature (1)..( 3000): 2750-1469P.txt file - cDNA_ID_3066181; gDNA_ID_1620495; Annot_ID_158696
aaagaaaagtgacaatctacaaacaaaagtacaaatagcataagggaagcacaagcgataacccaaacactaatattctaacttaatactgagatgaaataaacactgaaataaacagtggcgtcccgagatgaaacactgatatttaaaagcttgttgacttgtatttattatgttgattgtgtttaatgttgcttcagatgttcaaacttaatgccgttctatcgtttggttagtgcaaccgtggctaaatacgatgtggttcaacttgtgagaggtgatgtttggaagattgctcttggcactgcatcaacagcttccatagacgggagttaaaccttgtgaaggtgctgcaatagaatctggaaagaatcttcctgcggattagctcttcatgagatgagataattgaatccgatgaaggatcatccaccagctcattttgccccctctatattccttattatttcagttatgccctcttgtttcacattttttcatacaatgtggataatcctaagttttgttctttgtttagagaccttgttataagaatggtacgaaatctcgaggattttggaaagcattctttatctaatctggaagagttattttgcagttgcagtctatgaaactggaacagaggagagagcctatgataagaacttgacactaatctttatttgtgtttattaatacaagaaaaatggaaatctatgctaatacagttacaacatgccaatctcccgctcaatggaagatgatggctacagaatcagattcacaggtctgatcctgttttaacggtctgattctgtccctctagcaaacttatttgtcgcctcagtttcgcaatatgagcttgaacctatccaacaaagaaccaatccaaattcatcaaaacatagaccaacaaaaatagtctaaactgagtatcaaaaatttagaaaacacagttaaatgttttaaagttacctgttgacgagcagctgcaagctgtaataactcatctgcttcagagaaactcatgaaccattgtcccaaactatgatctttcgtatcacctctcttctttttcccggtatcttcgacttgcactagtcataagatttgttgtgtgagacgacattttaaggcaatgatcaacttaaactaaggaatgaaaaaagctttagataaggagatcatactaggagcaggcaagttgtaaccagagggtaatcttggaaaggtcaaagccggatgattctgaaccctagctaaaaaactttctgaaggatcaggaaagacaatctcgtcataagattccacaaccacaggcttcttcattgtcaaaggacctgattcatcttcagggtatagctttaaatgatgatatctgttgtatccacccaaaacaacaaataactcataagtaactcttccaattgctggcattttcctacttaacaacaatgctattgaaagggacttacaaactcaatggcttatcacagacatcactgtggaaatgcaatgtcattgcaatctcgaattctccccaaccagattccgatacctcgaatggaggctcctcgataactctagtcgggctattgaaactagaatgaagctgaaatacaactttctttactacaacactgatatcttcatttgttgcccctcgaacatatactgcccacttgtgagattgatacctgcaaatttaagtgaaatcttatgaacacaaaacacttttcttctttaagggtattgtcaaaatataaccttcctaagtttcttataagaactaaaactctaagtcgctagcaacaaaccaataaaacttaatggatatttatgtaaactgtctctcttattaagggtattgtcaaaatataaccttttccaacattcctataagaacttctcgtcattatccaaaagaactaaaacactaacaacaaccaataacctaaactgtctctccattattttaacggtattgtaaaaatggaaaatttaaaacttttgtgatgaaaataagaactttgcttcacaaaagaagttcaatttccaaaaaagtatacttactcactagccttcttgccaagccagaatgctacattaccatacacaattggaacgcttatttcaatgtctttaagcttcttctgctgtttaacccaaaaaaaggagagattttttttaagttggtgatgatgaccaatttattgaagaggttacagaacaaaataagtggacttgctcttttgagttcgattgaagaaagaaaaagacggaccttttcgtcggatttagtcatcttggttttgagagatttgagagtgggttcgctagtttctggctgatcttgagcttgtttcttcgatgacgagctgttcgtcattcttctttctgggaattttaagatttcattcagaaaaaattaaggtcatcttcttcttcttcgtacgatgttttttgcttatcaagagagacaaataacacgaattgatgaatctcggcttaacttcaacagatctgcttctagtttttttttccaatggagccagatccaaacggcgaattcaacaagacgatttcttttaggtttattagttttatctactcatgtgaaaggcccaatttatttagctacacaggcccaaatgtatcaaaatttgtctacgtagctaataagcataaacactagaatataaaaacatttggaaaaaaaaaaaaaaaaactaattttaatttaaaagtttaatacccaatatttttaaattagagtaaaaatacctcatttaattatttgtaatcacaaaatatctcagatataaattattagtggaatcaaactcaaccgttaacggacgttacagaatcatttaacggcgttaaattttacggaatcatctaacggtgtcaaattttaacggtgtcaaacccagctgttaacggacaccggaaagagtgcgagtttttctttggctagttgttcatcaggttattatg

SEQ ID NO: 33152 - DNA, 3 bp, Unknown
  misc_feature (1)..( 3): 2750-1469P.txt file - cDNA_ID_3066193; gDNA_ID_1620495; Annot_ID_158692
gga

SEQ ID NO: 33153 - DNA, 3000 bp, Unknown; identical to SEQ ID NO: 2152
  misc_feature (1)..( 3000): 2750-1469P.txt file - cDNA_ID_3066201; gDNA_ID_1620496; Annot_ID_158707

SEQ ID NO: 33154 - DNA, 3000 bp, Unknown; identical to SEQ ID NO: 2153
  misc_feature (1)..( 3000): 2750-1469P.txt file - cDNA_ID_3066205; gDNA_ID_1620496; Annot_ID_158706

SEQ ID NO: 33155 - DNA, 3003 bp, Unknown
  misc_feature (1)..( 3003): 2750-1469P.txt file - cDNA_ID_3066215; gDNA_ID_1620496; Annot_ID_158701
aactaatgttagttatattttaatatgcttgtaatatttagtacttttcgaaaacataaaaacgtgaaaattgactaatactataaatagtaagaatactggatcattttttcaaaccatgaaaaagtggtatacttttttttgtgtgcaaaatcttgtttccattcagtagatcaagtagttacagaaatgaatagtttagcaaattcaaagtttaaatcaacaatactaaacgcatttttgaacaacaataataaaggagataggatatatagaccgacggtaagatcaaatggtttccagacaataggtatgaaccaaattgtcacatgcaagccaaaaagtcgatataccatttatctttcctttttctttcaatcaaggtgtaatcatatatatcatatatgaagcaaatttggaaatggaaataacacataacagaatgggacatgacggcattttttgcccactccgaggaacaatgtattccattgatcaacttgaaaccccacttgattagctggttctagataaatgtttgttttctatttaggttgttacagatttcgtatagttaaattgagctacatgtacaccagataaaatcaagatgttgatataagaatcattagattcaatttgacttgaatgtggtgtgtcaattgtaaaaacaattgtgatagggtcatactctattttccctataactataatcttgttttgttggacactggagtaatatatatatataattctgcaacaacttaccaaaaatatttgaaatcatggatcatatgtcattttttttcttccaaaaatgattttgccatatgattaatgcattacgctcgtatgtttgataaatctggttcgtcacataaatatcacttcgaaaaaataacttttcatagttcattatcggtacatgtaaacgttaattcaattatagtatttcatatgttccaccatctcactattatattggtcatttgatatttcactactaaaccagataactattgttcttaccagatttcacacgtaatcattgtattttctagaacatcgaacgaatatagcctacaaatattatatgatttagtcaactcctgttgaatttcttctaaatattgagataaggtaaactaaataacatctgaaatcatggcaaaattcatgccttcacggaacttgggaaaagaacaagtcaaactttaaaatatttgtgtaattacttgtttattaacatttgtttcaaaatattgtactccaaatagtcaagttgatccataatgccgcttctgcattcattaatcaaactaaaagcaactggcttagccgatcataatttcaaataatagtagtgaagagtataacaagaagaaaatgataatctcctatgaaaaaaataataataattgataatctcctttatattttataaaatagaaatatagaagataacaagaaaacaagaactataaaaatataatttagtacaaaacaagagaatatacctcacagtatgagtggatattcctaatcaatagttgataaatctatttatttatcaatttgggtttcgttatattcttggaagaaaataagttgacgcgtataatttgagtactggttttaaaaagaaagaggtgctattatataatttggggaagatattaaagattatatatcgtacataaaagattcttctattttttttctttctatttcttggaactaccgttcttaattaaattacccatatattgttaaattttggattttgaacctgagatgtcgatgggcatcttatcttattatgttaaaaagttgaaacgaataaatggtctcaatgctagttgagaagtttatacttttagtgtgtatcttaaaaaaaaaaaaaagttcgtatctatgtgtatgatatattattgtttatcaaatgtgctaatacgtaaagtattattggaaattttcatgtatgtacgggaggaagcagaagaatgtataatctcctagatcacgaccaaacgaccattccaaccatgttctcgaatattatcggttcgttccaacgaacatggtcacaagttttctttatcaatttaatttgttaaaagctaaacggacaaatagaaaacacatactactaaaaccaaagaatattgaaacaaacaaattaatcaaaaccagctttagtggtgttagattgataggtctttagattcgtgcttcttacttattattgctaagatagtcgacacacacaaaaagaaaaatccattctcttttgttagaaaacatgaatacttgccactataccgattttgatttaaaaaaacaaaaagattgttaatggacaaattttgtctttctagtgcatatttacttaaaaattgaaattattaaaaaaaatttaaaacgtatggattatatttgactatttgttttggaatttaatccaaaacatatgaaaattttgaccgtttatgaaatgttgatttttattttactctttaactcacacacaaaccacatactttaaaattcgaattagagaattcactaggttaatgccctgattagttaagtttgttgtaaaatgtattgatatttgatttaatatatatatgatgatgtaacacataaaataaaataaaaacacgtaaaatgaattaaaaataaactaacaaataaaataaaaacccttggtatgatgggccttggaaagcccaaaaaaaaaggaagagtgcgcgtgaaaaccactctaatttctctggattccaagattccccaattcgtctcctccaacagttttcttcttctcttcttctttgggtgttccttccaccaacggcagaaatcgatttggcttaaatctccccctcctttcgatctctctgatcgccgccgggaacattcaatttcccgggagttcaacaaaaaaaaaactctccgtttttatttttccccctttttcaccggtggaagtttccggagatg

SEQ ID NO: 33156 - DNA, 107 bp, Unknown; identical to SEQ ID NO: 2150
  misc_feature (1)..( 107): 2750-1469P.txt file - cDNA_ID_3066219; gDNA_ID_1620496; Annot_ID_158700

SEQ ID NO: 33157 - DNA, 3003 bp, Unknown
  misc_feature (1)..( 3003): 2750-1469P.txt file - cDNA_ID_3066241; gDNA_ID_1620497; Annot_ID_158732
gatcctctttaccatgatcagtttgagtcgtcacagatatgtgagatcgatcttttcgctaacgatgatgaagatcatgtcgacatttcgattaaagggaagagaaacggtgatgatgggatattcttgagacttagaatatctgatgctgaaggtatagtttcaatctttttcgatagttttaaaatcatcggtcttaaaaacgtaacacgctttcgagttttgggtaatgtaggacggataaggaacatttacttcccgtttgagacggctattgatactgcatggagtgtagcggttgagatggtgtcagagctcgacataacgaatcaagatgttgcgaaaatcgcggagatgatcgatgcagagattgctgcattggtgcctgattggaaaaatgatacagaaagttcccaaaatgtaaacaacaacaagaacaacaacactgcaggattctgtggagagtgtgcttcaaacgggtatatacaagagactgtatcatcaggagaaaaatctcatcataatcatcatgagttcgatagttctgaagacaagagctgttcttcggttcacggtaggtttgcggatatgtggggtttgcgagaatcatattctgatgatggagaaaaacagagctcaaggaaggttagaagtggacggtggtcggagaatgagatgagacgagaactgagatggcttaaggcaaggcacaagattcaacttatgaaaatgagaggtcaaacgatctgcgagacaccgatagagatctctcttacaccgggaacttcagtttcgttacctcttctttacagggctatatcacttcctgtggatgccgtggatatgtgacattattgtaaagtctgatgatagttatcacttatatttgtatgtttcgacatttttaacttttgttaagttaaaagttaatgacatagtgtactttatttaaagagaagaagagtaaacgaaaaacataaattaggcattgtaaattgtggactaatcatctaggttttttccttgatggcacatatctcccatagactacatatgtctcttcatgtgcaataagtctagatatgttttcatcatcacatcgacgtttttctagactgctttcttgtttcctttggcatcctggaggttgcttgatttgcactaaacttggaacataagagcacacaaatagtggggaaaagtgtttgtcaacatcaacaggttgtcctagatgcagttctttaacgtttccagcctctcccacgatgtaaactgtctcgcgattcatcggtatatcaaaaatcatagcaactttctttacctcgtcaatgaaaaaactcccttccagaaggtcaacatacatattcactgtcaagaacttgctccacgaaatcttgtcagtctcaatcttagtcgtaatccatacctcaacagtagcattgttacaaaacaaaaccgcaagcttctcttctctaacacaagatagagtcacaaggcttccggacgtatatctaacaaacggcaaaggcataagcggaccaaatctctcacttgtaaaatcaaaacagattatgtgatcaagatcaacaaaccaattagtgtttgacttccttcttatagcacaccagtaagtgtttcccttgagagtaacaccacggttataacaaccacggggagggaaatttataaaccattgtggagtaacgtcaagagtcgtccacaaatcagagtcaaaatcgtagatttcataccaaaaagggaaatcgaatgcaccatctataaacctcaagattttgtgactacgactcttattattgtatccaagagcgtacacgtacatgtacctgccataacaattctgtatccgggaaaaatatctaggttcgatccaccttgtttgtccccaatacggattccaaacaacaagactacacttatcgtcttccaagacgcatagtaacaaaccctcgcagtgaaagacttgagatatcttgacttgttctgaatcgtcgtataggcaagtaagtttacctctttgctctgcagatggatcaatgtcaattccattgaagaagatgctcattgcaaacaggtttttatccatcaacacgatcatcctagactctccttcctttgctgctgcttcttctttcataaagctccggtttttgaataaagagtcccagtttttgcaagtcaatctcactgctctcgtagactttaatggtactctagagattatctcatctaataactccgttggaagatgagagattgtcgtcgtcatagtcattacaagttgcaacaaaggttttctcttccttagatctgttgttgcgcgcgcctataggaatcaaagacacataaaaggtaccacgtaaaccttttaatatcggtgagacatctaaatggtaaccgccttgtacaaaaaaaaaaaaaaaaagttctaaatggtaaccagaatctaactgattttttttgcttaattaatctagctcaagttttagtgatttttgttgaagataactgattttttattttttttcattggtaacacttaacagctgaattagttttactgattttaggcaaaatctagcaaaataattaagactttaactgaaaatatcttcaaataattatgaatattaataaaataactaaacaatatctaaataaaatagataaagttatccaatagtctaattaagtcttgtactaattaataaatactaatataaactaatattatataaattaattaattatctagtcaatgtatggtttggtcttagttgatgcatggttgatgtcttggaccggttataataaccaaactaaatcaaaatttcagttacttaaccgaaagtagtcaaattatttgtcggttataatgtaccggttcggttcggttataagtaagattctgcattagctcgagattccattagctcaaggagaatcaaagcgtcgtctcttgttccttccgctgccaacaaaatg

SEQ ID NO: 33158 - DNA, 3003 bp, Unknown
  misc_feature (1)..( 3003): 2750-1469P.txt file - cDNA_ID_3066252; gDNA_ID_1620497; Annot_ID_158723
tatggatatttaagctaaaagagtagcttcgacaaaaacaagatccgagccgacgaataagagataggagatcctccaggtggcattttagtaattaaccacgtggaaatagactgaaaccacgtggatattttagaattttgttgtgcacgcgctttgtaggcgcgtaacgttaaaaatgtgaaatctactggttagagttactccactgttattaattattagtaagagttatgaatcctgaccattgaccaaagattgttggtgttttcaaattcaattaattacacaaaatctatattttacgtggggcctaatccatgtcactatcattcttatatttaactataatcactaaatttatgtattattttaaataaatatagagtattaaacatttgaaaatactgttattgggttatgaagtaaaaatagaaatcctactgtattcctagtttccttttatattcccacgaacgattttgctgtatgtactcgtatgtatcttacgaagtgacgttttacaccatgtcagaatatgttaacagtggtattaaatagaaataaaactgtactttaatttagttatttttgttaattaaaatattaatatttaaatacaatatcctatattctaattagtttacaaaaaaagtcaaagttaacacttttgcttaactgtaattttatcttttcaatatgttaaaattattaaatggaaaccaaaataaaattcgaaaacaattttttttaaaaagtgaatagaaatacctaatatttagaaatatcaattcaaatttttacccatcagtaaccttggaaaatagcgaaacaagccaacttttatttttttttggcaacataccaacttcttcagaaatacttttcaaaagaaaaataatttataagtgggggtaattaaaaagagataagagcagtgaaagatgatttccacaaaaggaaaaaaaaaaaaagggaaaagagaggtgaaaaaaataaaaaataatgtaaaaagagcggtgaaaaaagtaataattgaaaagaaagaaaaaagatgataagagcaattccacattggcagctaactgtggaccccacacttctcggaagttccgtgaccgcgacttgagtgaataaggtcccacatgcatttccctctcttcccatctcagccgtttaatcttttctaaatcgaacggttcagatcaacgggtcgggtgccaactcaacgccttttttagtttttattttattttatgttttttttttggatgatgttttcttctgccaagtcagattgtttaaaaaccaaaaatagaagaaaataaaatactaatataatataaaacgatctaacggttgtgagagcatttagctaattggcaacaaatggtattggccgttgatttgtaattaatgagttaaattattttagactatggtaggacctgtttccttactttataggtttattgtttagcttaccttccctaatagaattaaaaaaatctaaaggatattatatggtttattactattttagaaatatccaaatatgaccagatttaattagttttatagaaatttatagttatgtcaatttgactaatctaacctaggaattatcaagatttaatttctcttttagattttttcattataaattaagaatgttgataaattagtaattaaaaatgtggtagatacttccaatattattctccatatattttcatttttaattattagattctaagaatttaaaagatcaattttgcaaacctggcatatttgaaaaggtaaatttaatttaacagcttttattgcatgcacgtaagaaatatcaaataaatcaataagaaggaaagtaaatatttgaatatttattttccatgagttgaagaaaaaaaaatagttagtggcaagtaaaaaactatttagccatttgatcttaatggagaaaagtaaaaaaaaaaaagatgaaggtagagaagtggaacctgatgtgattaatattaccggttggatcggtttgtataggtggtcacaaagattccattctgatcgtagattgcctttaccaaggtctctgtctaccggtaatagccggtgatacatcttctcaagacacattttgaattttaataattaaaataacatcatatttgtgcgtgtatatgtcagtatttttgttttcttttcacacgagtcatcgcgattagtggacaacagtacactaccccaggagcctttttattgcacaatatactattgatgattatttttagatttaaatattattatcttaatctttccgactttcaatatattttattgtttttttatttgtttgtttatttctagacagtgcaaagtcaataaaatattggtagcgataatatagacggaagcgtgtgatgtcaaactcttgacacgtggcagcttctgtttaataactggtaacagtccaaaataattttttcacatgaatccgactccgaaaataatattcttttaaaaccgaaaaattaaatgttatcaaatactaaaatatcataacaataagatatcatttttgagtgggtcctacctacggatgctgactaataaaataattaaagaatacgttttttaatttaataataaaataataatcggtggtaaaataattaataaaagaagaaatatcggttatttattattatatgcgagatctcttataacggagggccaagattttgtcacgctggtatatagcgtatcgtgaccgttggatgtattcacaccgacggtgaagattgagaaaatgttttacggcaggagatatgagccgtggatttattcgctactctgcttttatgaggagcacaaataaaggagataatgggaagcaagtagagagatagaggagagagagtttgataaagagagagaaaaaggggttgcgatttgggagaagagaaatagagaggagaagcattagagaagaagaagaagaagatg

SEQ ID NO: 33159 - DNA, 3003 bp, Unknown
  misc_feature (1)..( 3003): 2750-1469P.txt file - cDNA_ID_3066256; gDNA_ID_1620497; Annot_ID_158721
gtctatagaaaaaagattattactacaagcttttacttaaaaaatgtccacagtttttgagcataaacttgcggattagtttgtcttttcgtgtgctacaagtcttttagtcaaattagacgaattttacgctttcttgtatacattgatcctagagttccgtaattgctataaatagatgtcagtttaggagttaccaaatgcaaaaaaacaaaaaaaaaacactatcattaatcaagttccactgttcattttcgatctgcataatgatgatgagtcgtcgctatggagccaagctaatggaaactgctgtgactcacagccatcttttgaatcctagggttcctctcgtgacggaaaatattagggttccggcgatgggagtcgtgagagttttcagcaagatgacatttgagaagaagaaaactacggaggagaaaggatctagcggtggcaaggctgatcaaggtaacaaaggggagcaattaatcgttagctactggggagtgaagccgatgaagatcaccaaagaagatggaactgaatggaaatggagttgctttagggtacattacatctttggtattatattagaactctgtggtcgatttatatgtatgatttgagtttttgtgtggaataactgtagccatgggagacatataaatcagatctgactatagatttgaagaagcatcatgttccatcgactttaccggacaaactagcttattggaccgtgaaatctcttcgatggcctaccgatcttttcttccaggtgacagtcttagctttctatggttttgtcatttcaaatgctttgtatgtttggactaatcttgccaacgagttaaccgcagaggcggtacggatgcagagcaatgatgctagaaacggttgcagcggttccaggaatggttggagggatgttagtacactgcaaatcgcttcgacggtttgaacaaagcggtggttggatcaaagccctacttgaagaagcagagaacgagagaatgcatttaatgacattcatggaagtcgcgaaacctaattggtacgaacgagctcttgtgattgccgttcaaggcattttcttcaatgcttatttccttggatacctaatttctcccaaatttgctcatcgtatggttggataccttgaggaagaagcaatccactcttacactgagtttcttaaagaactcgataatggtaacatcgaaaatgtgcctgcaccggctattgccattgattactggagacttgaagctgatgcgacgcttcgtgatgtcgtcatggtggtccgtgctgatgaagcgcatcaccgtgatgttaaccactatgcatccgtaagtagtgtgaattgtattataggaaacttacttatgtttaaaagatgattagattgttttcatggttttaataaaaattgcaggatattcattaccaaggtcgtgagctaaaagaagctccagctcccattggatatcattgaatctgaagagcttctagctttgttttgtcgttttgatacggtccagttttgttttccttgttcctaaatgggctttaatgggtatttgttaaaatttagtgggccttagagtaagcttatttgtgcttgctttctttttgcttcataaaagagtgttttgtttgttttcattctcctaataaatcagtgcttacatgatatgtttacatatacacttaggctagaaataaaactttacaaacccaaggctttgaagtttgaatataaccatagatatgtccattaaaccccactaaaatgaagtaggcttgaatccatcatatataaatgttaaattaataggggtgggaaaaaaaacgaaaaccgaaaaaccgaaccgtaccaaaccaaaacaaatggtttggtttggttatggttttgtataaaaacccatttgattgtaatttttatttaagttttggtttaggtttggtttgattaaaaaccgtaaaaccgaacgttttttttgtttttgatttaaattaaaaataattgtatatatatatatataatgttcatttgataacatgatatctatcaaactatcgaaaaacaaaaccctaactgtaacctaaactaaaattctatataaattacatgccgtcatttaggatttgagtttacaaattagattttgattttatttatgcatcacacttataattttttttggtaaaaacatgaaaaaaccggaaccaaaccggaaccgatccgaaccaaaatacatatggtttttaaatggttttaattttttaaaaccaaaaactgtaaaactgttaaaaccgaaccgtaaccaaaccgaattttatatggtttttatatggttttacttttcttaaaatcgaaaaaccgtaaaacctaaaaccgaaacgaaaccaaaccgaaaaactgaacacccagcccttaaatataatgaaaatcgaataaatttgtttgaaagaatcgaacaaaattgacaataaaatctaattaggactattttcgtctaattttgacttagttgaaacagaatattagcaaaaatactaaaacaccacaacgcgtaataatacccacacacgatatcattaaatttgaccaataagaatctagctcttggcgaccacgcaagtatcttccatcttgctctccaagaaaaatctacaccggctttaaatttacataaacaccctcagtcaaagaaaagtcgtaaacatagtctctctcatgaccacaagggtaacacagtcatcctaaatataaaccacacaagaaaactgttatactttatacacgtgtcatagtctcattacatctacgtgaagagtttcgatcatcaaccgttcgttttcttactatataaaccttgctcgagacctgcgtgtgaagcgtataaagacgacaaagtaaaccaaaaaaaaaaagagttctcctacaattttcctaaattcttggatttgagatttcactttttccgatttgaaacaatg

SEQ ID NO: 33160 - DNA, 3000 bp, Unknown; identical to SEQ ID NO: 2163
  misc_feature (1)..( 3000): 2750-1469P.txt file - cDNA_ID_3066268; gDNA_ID_1620497; Annot_ID_158716

SEQ ID NO: 33161 - DNA, 3003 bp, Unknown
  misc_feature (1)..( 3003): 2750-1469P.txt file - cDNA_ID_3066272; gDNA_ID_1620498; Annot_ID_158745
tattgaatttgtccttttgtcgttatttaaagttgcttttcatctgttatataagactcataattgttttttcccgttatcttgttgcaggctatgtttgaagggattcttgttgatataccatttgcaacgtttttcctcagcaaactgaaacaaaagtatgtaaatttaatttctacctcaatttcctgtcacttcattcgttttttaagcccgcatagactttttgaacatgttgtgaaacttctattgttctttggctaggtacaactatttgaacgatttgccttctctggatcctgagttgtataggcaccttatatttctgaaggtgagttttgctgaacattctatttaattgttgctttgtagaacggggagatagttgctagcatagatgtgcgagaatgctgaaatctgtttgtttgtttttgtttcgaaactgaaatttgtttgtttacctacctacgataattttggctcttttttttttttttttttttgcttcttagctttatacacctttttatgtattcattatgatatttgcagcgttataagggtgatatctcagacttggagctttactttgttattttgaataatgaatatggagagaggacagaggaagagctacttccagggggccaagacatgcgagttacaaatgagaatgttataactttcattcatctggtttccaatcatcggttaaattttcaggtactggggaaccacttacctctcatttatcttggcatacctgaggtcaccctgtaaatcaacagctattgatatcatctcatttgcagatacgccagcagagttctcatttcttgagggggtttcagcaactcattccgaaagaatggatcgacatgttcaatgaacatgagcttcaggtgccaattaagtgtataattatacttgctttgttagttgttccctcgaggagcatgaagagagaaattttacctttgtgggctttggttgcaggttctcatatctggttcagttgatagtttggatatagacgacttgcgaaacaacactaattatgctggaggctaccacgcggtgagtggttcttcactgttagccgaaatgccattgtgaattagtgtagggacacttttggagtattgttatatatgattatatcgctatgttgttgacacttgacagggacattatgtgatcgatatgttctgggaagttatgaaaagcttctcaactgaaaaccagaagaagttcttaaagtaagcaaactttgcagttactactacagtctgtgtacgcaatgatttaccggagtctatgaattttctaagggaactaagaggtacctctatttttcaatttcaggtttgtgacaggctgctcacgaggaccactgctgggtttcaaatacttggaacctgcattctgcatacagaggtaatatacacagactcacaatcgttttgacttttgatgggccctggacaatagaatcataaaatatccatcctcgatggaatgtgtatcagggctgccggtagtgcgagtaatgaatcagttgatagactaccgacatcagccacttgtatgaatcttcttaagcttccgccctatcaaaggtttgtcctctcataacacaaactctttggttttgcttagctaagagacttgttttgttgccaaatagcttctcttggtgttgtaattggaaaaagcaaataaagcatgtcttgttgttaatgatgcagcaaagagctacttgagaccaaattgatgtacgccataagcgcagaagcgggttttgatctgagctgatggaatagcttcctgccttaaacacagacttcaatggccccaaattgacacccttttttctagcattcctcgttatggtataaaccgggtaacctgtagactgaggcaggcttgttggctctaagcatctaagagacggatctagaaggagaacatgtagtagagattacttgactaatgggtttcatttgcagctctcgggtattcgctttcaaaaagtgtgacaaaaaaaaaaaagtgattacagggaagtctttatttggaagctcctgagagttagtcttgggttaaaaattcaataaaagaaatggtaaataagactggtctcaagaggaacttaaatgctgtaaattattttgcttaattaatgcatgttacacagaacatagatgattattttgatacttatttgcatcataccatatatcttctataaaaagatgcattttagtgacttagtggtaagaatatccttttttttttttttttgtcatatgataattattaaaacagaaacaaaatgacagaaaaataacgagaaatacaaaatgaaatttaaactttactttccttagacacttgattgtgaagtcatgaaggctctccaagtgctaagtaaaacttagactgaaaccttctgtcttgaatcacactcccaagaaatggaacgcgcgatcagatttgcgtttgtggcaatatgacggaatgtacaagattcaaatgcactaacaatctcatggatttgtgttaaccaatttctatagaaaggctatttggacggctgcaaaacggcgttaagtgcggctggacagtccaactctattatcaccgtggtaagaatatctctatatacattttttgtcgcacttatcatgattaatcaagtaaacataattgttacaaacactttataaattaaaaaagcttcaattcaatttgcacagaaaagaaaaaaaaaagaagaagattcaatacagagtataccaggagcatctggtaatgtttatatctgaggacgttttatttaattttttggaacgaaaacaataatccgacgatcgtatttgcacgtcgcaaatccgctcttttaatcaaagatctcgaccgtccatttttagttaagactttagagagctgataagtggaatagtggagatttgcattcgcaggggataaggatcaaaaatg

SEQ ID NO: 33162 - DNA, 3000 bp, Unknown; identical to SEQ ID NO: 2170
  misc_feature (1)..( 3000): 2750-1469P.txt file - cDNA_ID_3066303; gDNA_ID_1620498; Annot_ID_158766

SEQ ID NO: 33163 - DNA, 3000 bp, Unknown; identical to SEQ ID NO: 2168
  misc_feature (1)..( 3000): 2750-1469P.txt file - cDNA_ID_3066313; gDNA_ID_1620498; Annot_ID_158763

SEQ ID NO: 33164 - DNA, 3000 bp, Unknown
  misc_feature (1)..( 3000): 2750-1469P.txt file - cDNA_ID_3066342; gDNA_ID_1620498; Annot_ID_158754
tgtgttctgatacagacacggaagatgaagataggagaagaatctacattgttggagaaggtgtagatgaattcgtctatgatgaagtttcaacggaaacatcccacaattggccatttctcgtcagttatgttccaaatctggttcacattgagaaagatgcacccatagtcgaagtgtaaaggaaaaggaaacggcaaaaggttagtcaaatgaattgccttagcttttatcttgctttttctttcggtcatgttcctttcaacgagattcgtcaatcattggtagggattgtttctatttagctgatagaacttacctttgtttctcttgtttgcttttgaaatatatcagcacaacaataccaatcaagctagaatcgacgaaagagaaacagaggaatgaggaagataaagtgaagatgggctcagaaacattacaaaggcccaaaacgattgaaaagaagcccacatatttcaagccccgacattcaacaaaagtcaagcttcactctcatggcaaaagcatatgttcaaggagacagccaaatgatactatctaaccgttatgaagctctcatggctctttgttgatgacaagattaacagctgtaaaaagagaaaccctataatgagtagtctatataaagtacctcagttgtaatcgaaattcactatcagataaagatcaataagaaaagcttttctacttacctttcccttatcccagttcttcttcaaaaaagacgatgatgacaacgattcccaatcttccagacgaattggaatcggaaatactctctagggttccggcgaagtctctagcgaaatggaagactatttgcaaacgatggtacgctttgttcagagatccgagattcgtgaagaagaacttgtgtaaatcagcgagggaagtgatgttactgatgaatgatagggttcactcaattagcgtcaatcgccatggaattgacgacagatttgaaccatctatggagttttcaggtaaactcaggagtctaattgattcgaaagacgtcaaagtatcaaaggaggcaaacttggcaagaagccttaacacaatgtacgcgaaactcaaatctaaccgcatatccaaattatgtggtggagtaatgaaccacttcaacatacgttagagctttacaagtcttactttggctatgaaaagtaaaagcaaacaaaaatcttttgtagttcatttgacttcaatgatacattccctaatagatatcgtattaatgcaaaaggaatataggtcaaacacccacattcaccgcatgtggaatttgcttttaaggttccttaaagaatgacagacatcacaaaatgcttgaatgaagtttctacagaatgcaaaaaatcttgtcttagaggtttgaaatctttcttgtagcagaaatattccttgacgactctgacagtgcattttcttgagtaatttcagaacattggtcaatcccagtgaagtcatgcaatgaaaactccgtaacgacgagaaactgaaagagaattcaacaaacgcaaatcaagaatcaaatgcaatttgagaaaccaaacgccctaaacttgattagcaagaaacctggacaagagagagtagacattgaacgcatagttgcacgcatagatccgatattcgtcaagaataactcgtcagttatgctccaaatttggttcacattcagaaagacacttccaaattaaaggccagaggaaaatgaaagcaaaaaaaggtaacacaaatcaacttactgtagtttctttcttggttttccttgtggtcaaacgaatcacataataggagctgtttctatttagttttgataagcagagtaactaaataaaacttccttttgttcacctactttgctttggtaattggatcggtgatctaatgaacttacccgaacatattttctatttggattgaatgcttattgagaacatcaaagcagtttcaagaccgtgtttgatctccagatcgtttttggattctagttccaggaatatgtttttaacaccatacatgatttctcttaccaatagaacagtttgcacttaagaaaaccctttaagcagagattttgagagaaatatcaacaaacgtaagtcaataatcattagaaaacctgagtaaatcattaattttaagcgtaaaaaaacaaacttgatcagcaagaaagctggacagacttttttctttgggaccattctcctcaatataattgacaaaattatttcaatcttctattttaaatgatttggatttatatctttaataaagtttttaaatgaatttaaaaccatgcgatttagatctttgtatttttaaactaagaaaaatttcaaaccaaattagtaaaaatccaatacttattcccaccaaaaaaaaaaattccaatactcaattgttttttctcgataaatatctcttacttttattttaatttctttttgtgctcaaacttttactttcatatttgtttatttttaactgttatcaaaactaattaaaaaccatgaaaagttaaagttgtctcattttgtctaatagaaaaataaaataaacatacatagattctcttctcctatataataaatatattgatcataaaaaatcttactccaaactctaacacatcaaatcataataaatatagggaaatatatagtttcttcttctttaaagtcattaaaatataatgtactgtttccaataagaatagatttaaaatacaacaaatcaatagtttaatcaattacactgaatattataactttgtaaaaattcataattgaataaatatgatttgttattttaaaataactttaaatgcttgattgcattacacagttatataccctctctatttattagacaagttgttaatgtaaaaacccttaattctatttgcagtcctgttgcaatcttcttcatagggaggtcagactagaaatcacaagagataaacaaacaatg

SEQ ID NO: 33165 - DNA, 3000 bp, Unknown; identical to SEQ ID NO: 2171
  misc_feature (1)..( 3000): 2750-1469P.txt file - cDNA_ID_3066354; gDNA_ID_1620498; Annot_ID_158751

SEQ ID NO: 33166 - DNA, 3000 bp, Unknown; identical to SEQ ID NO: 2178
  misc_feature (1)..( 3000): 2750-1469P.txt file - cDNA_ID_3066374; gDNA_ID_1620499; Annot_ID_158795

SEQ ID NO: 33167 - DNA, 3000 bp, Unknown; identical to SEQ ID NO: 2180
  misc_feature (1)..( 3000): 2750-1469P.txt file - cDNA_ID_3066376; gDNA_ID_1620499; Annot_ID_158793

SEQ ID NO: 33168 - DNA, 3000 bp, Unknown
  misc_feature (1)..( 3000): 2750-1469P.txt file - cDNA_ID_3066387; gDNA_ID_1620499; Annot_ID_158784
cacaaccattataccagtctcaagtagaaattttttctttttatagtttcctacttttgttttcttaaattacatttttctgggtacacttcccttgttgtttttcaagatcacacagatgagaacaaagaaaggaatgacgaaagttttctacaccattgcatcttgaaactcttatgggttccagtttctatacggtagatatacaataagtcaaggtaatcctcatcactcacttcgtgttgataccgttatttcataacgatatatataagtagtcccattagttcttagtcttaaaccgccgtagtttttactgtcagtccctgaacaatccttggttataattagtccctcgtctatacatagtactgtctcgataagatgtccgcaaagaaaataatcccaggttatgtgatttaagagacttaggagctttcattagatacacataacacaacagcttgcagaaattgtgtaatgattattgaaaaatcgcggtgataaagacaaaccgagatctatcctattcattgtaaactgccaaaaaccggtacgtaagctaaatggaaattatagaattgtcatcaaatgtcattttcaggaagggaatgatagtgaggacgactgttttcatcagttggcttcaacagcaagcagcttctcctgtgcctcaacagccacaaatcagtatttgtgggtatttatcaatctcttaaacgactctctctattattgataagtcgtatatgatatatgatattgatgtgatattttcttccactcagcctcttaattagtattaatatattgactcttggtattgtagaatcgtaccggtcatttggtcctagatttttattcatgcatcggtttgatttacttagtatacttactaattaaccttaggtaggcaaaaacattcatgtatgcgatcaacggttttaaaaacgtaaattttgtttttccaaaccgaatcaatcggtgagtttttgatgaataacaccggttaaggctgtaccggtcacggtttatgggaccttctgaatatgcaaaaaatcgaaattgattttttcaggtgtgaaagctataagctagattattagctcaattcaccaagtcaatattcgagataaaaaaaaatggtacaaaactatagacgtttttcattgcgtctttagctattgtttaatacttttcgtgttgcttcttgatatgatttaacaactttcgattattaaactctataatatatggtgagagatgcaaaatgttagatctgctcccttctttaacgtcatgcaacctaactcttaaacattctcgattttttgcttacagcttaaattatttatttgtatctacttattaatttacttcctcacgtctctgtttgcggcaactatgatggtacgctacgtcgacatctagtactagcctagtactcaaaagatcagattttgtaaaacgtcaccatgtatttttgggttattttatcctgttgtccgtaaaaaataaattgcatagtaaattaccactctgaattcgatcagaagatattacacgattacatctatcacaaataaatcatattatttctgaaaaagattcatagtgaagatatgggtaaatttaatgttccttgtaagcccttcttgccaaattataatcgtattatattggttctttgagcagtccaagaaaataatagagctagagatgaataaaatataacattaccggtagagatctgaggatgacatcatcaggataaaatgtcaactacacacacttattgccttgaattgttgaccctatcttcgtttttcactttcgtcgatagatttttctatttactcgtttaattaaatatcttgttgatcatttctttctgacgagttatgaatttttgctctgtagatagacattttttcttctacttatgcaacaccacccaaaacaaaagattctaatttttctaccaaaaatatctgaaagtatcttagcaagaaaatttcagaatacccaaattgacctctgtagtttcaaccaagatactaataaaaaaactaagcattatcattgtttttggtaaaaaatttaaaagatgtacaaaaaaagaagaagctgaaaaagcaacgaatcaaaaacgaaaaagacagagagaagaaaagtgtgaaaaaacattataaaggagagggctttcgattatataataaacactaccaaaattagcaaacaaaaaacattcactcgttaactcttctcctccatccaatttcactttctctcactcatttttattcgtcgtcgtcgtctcctctgatttgttcttttttctctaaattcgcttcgcttcttctcagttctacgaatcttcgattctctttggttttctccatccccgtatacgtttaaggtaaacccatttctctcatcatcaataacatccccaatgtctcgttccgataatctgttttatttaatcttttcaatttggtttgcgagttttgatttatcttatcaatggaatttttgatatatccatatattgttgtaatccatatagatatgaacacatgtcacggtgaatactttgatgataccaaatctataagtttctctgtgttttctgggtttttagttagtttatctctgtataaacattctatctgaaacatttcccaacaacttctgtggtctgcatttaatggcctcctatgaaaaatatcatttttttcttaactctcacgtttaacttatgtaactgttcgttaccttggccccatctatcttcactttcgatatgtgcttagactctcaccacgtattttgtctctaaggtcattaaagcagctaacttttttgaagtgtgaggtttttgtattagtcttaagatttcattaggattgttcaagttaaaaaaaggactaaactttatggttttgttgtggatttttgttgtttcagaacattgcaagaaagtgaagaaaaaaaatg

SEQ ID NO: 33169 - DNA, 3003 bp, Unknown
  misc_feature (1)..( 3003): 2750-1469P.txt file - cDNA_ID_3066403; gDNA_ID_2936567; Annot_ID_194660
tatatccgcagaaacgggccatatgtcggaagattgggttagaagctaccgaatcgaaagcccaacaagatatcgaaccaaaccctatagttttactttggcatactttaaacagattttctgtatctgacgccgttcatttgttttactttctccttaacatccgacgactattcttatgataaagaaataatatccaagttaaataaatatttactcgactaatgcgtccgctaaacactcgtgctttccttttatagcttgttgcctatttgtcggacaatgttttataattgttaaaaagtttattgaacattttaaaattgtatattttggagtcgagaagaatcaaaagttattactaatatttattaatgaaaatgactaacacaatttaaaaacggaaaagttattcgcaatctaaacgttacataaactataaactaaaacgttacagaacctatgaaatagcatacggcttagggctcactagttattgagagttctaaattttgacttaactaaaagtccttatgaatcaatatttttcattaacagtaaccatttcagtatttctacataggagagccttctttttctgtcatcacttattactgttgcctgaaactattccggtaaagattggtttttaatttcccttcatgcttaaccagatattcacctgattctcccagtacacatgtaatttatgtgctttacataaaacttaaaaaaatactgacaataattaaaatattcgtttgcagtttcataatttagtttatgctgcttatggacgtgggaacatgcttgtagtttaacttttatttggtcgtcaatttgattaaaaattataccttcattgattctttttgaaagatacgtattgtgaataatgtataaaggatttagaacataattatgatccttgagacttgtaatattttattaactaaccgaaaacataagcaagagaatcgtggataacgacctaacgtataagaaacatgagacatgtcacaatcactttaaaagttttcctatcaaaactcgagtagaagcacatgaaatttctggatattaaaaataaataaatcaaaatagccttatattattgctgtcaggaaataattctatttagactacctgaatttccagttgaacggcgtttttccaaattgcaagcatcatatattatgctcatcgtatcattagtgcataaataaactatggaccaatttcatggtgaaaaaggggcttcggatgaaatttttgatcaaattatatttgtttattgataaaacaaacgttttttttaaaggatgacagttgtgcgtttgagatgaaaaccaaacactgctcccactcaaaatttgtaaaaatggaatttataaatatttggtgctacaaatgtcgtttggtagcctttggaaacattaaaggtaaactagagatatgggagtatggaacttaatctctttatgtggttgtatttcatataatttcacgtggcccaacttgtttctgtcaatccattgatcaaagttggtagacaagagtgaacccacacacactcacacacatacacacggtcgatctttttttctattctcgtgtccctacgtcctctaaaccccatcattatacttcttgtgttttattggtatgctgagctagagatagttaacaactacccaacaatgcgggtctggcttagtttgaacctattcgaaactagttatactccgcttgaagtcattggttcgagactaactttggagatgagtatcataaacagctctaacttaagattacaatacatcctcttgttagtctaagttgagaggtgttgccattgactatatatttctttgggaatttggtttaccaggatgttgcaaagaagatttaaatagttataaattagtacaaattcaatccatatgatatgatattcaaaaaacaaaaaaaaaaaaaaactgatctaaaagtcgaaccaaattctaatttgattagagcatgtatataattgaatccctaagtaaaattcaacccaatacttgagaaggtagttatattcttataaattatggatatgatttgattaaaactcaaacctgaacccaaaacatactagaatatacgtttttactttgtaactatttgtcacattccaaaactaaactcggtactatatttgattctgatccatacaaattttgtatatctggtttatattctccatgtgagattaaagcggtgaccaatcaaaatcattgctggaatatcttactattaagctaaatgttgttagttatatacaagccaatccaaaaaaactgatgcaaagagagataaacgaacatatcccaaaatggtaggatttgatttaatattcccatcctcttattagaaatgcaaacaaatagactatagttttatttatttattttcactataaaataactaaataacatgaacttattgaagaaaaagtatactatagttgtgattctgtgatatactagttagaacaagaatctttacaaaaaaaaaacacatgggatgttaggagaaggagattcggattccaatgatccaacggtcagagaaaaatcagaagaaaatttcacaaccgtaggatctgttcccttaaccaccttgtaatgccggtctttattaattttgagaaaaaaataaaaacagcaccaaacttatgtctctcatgtgaccgaccaccgcatcctcagttgacctgtctctgcccccactttgtctccccacacaaactgaataacaagaagaagaagactttagatatcaaatgactccacgtgtcgatattggattggttttcattggttgtatcgtgtggaccaacgaagcaacatataaaaagcacgacgcggtgccattactacaataagagaagtgtaggagaagaaagttctcatttcataattgtatcaaattgtgagaggaaaaaaagaagttcaagaaatg

SEQ ID NO: 33170 - DNA, 3003 bp, Unknown; identical to SEQ ID NO: 33169
  misc_feature (1)..( 3003): 2750-1469P.txt file - cDNA_ID_3066403; gDNA_ID_1620500; Annot_ID_158863

SEQ ID NO: 33171 - DNA, 3003 bp, Unknown; identical to SEQ ID NO: 33169
  misc_feature (1)..( 3003): 2750-1469P.txt file - cDNA_ID_3066403; gDNA_ID_2936567; Annot_ID_143728

SEQ ID NO: 33172 - DNA, 3000 bp, Unknown; identical to SEQ ID NO: 2185
  misc_feature (1)..( 3000): 2750-1469P.txt file - cDNA_ID_3066411; gDNA_ID_1620500; Annot_ID_158858

SEQ ID NO: 33173 - DNA, 3003 bp, Unknown
  misc_feature (1)..( 3003): 2750-1469P.txt file - cDNA_ID_3066416; gDNA_ID_2936567; Annot_ID_194653
tttataaaaaaagttaaaaatgttggcaacaacatcatccgatccatatactcttatcaggaacggaaaacaaaaaggtcaataacaaataaaaaaatataattggccataagtagtgaatagtgattaaatatgatttatcctacaattattcgttaataactaactaaaaatatattttcttataccaaagaaaactatacaaactacttaaatcaaacttgtaagataagatatagttggatgaagtgggggtttgatctacgatggtcatcttcattgtttgattccccctttttcgtttctattctattttaagaatatgaaaagacgtataatatgcacaagttggagagaatatttatcagcttttcagagtttagtatactatatatgatcttatcgaaatttataccttttctatatatatatatatatattaaatcgaaactttctttgttatcagtagcttaatgtttagaaatattcttattatagtgtttgattaaatatgtttctagaatcgaaaaaaataaaaagaaatcattatattaaattacgataaaaaaagaaaaattaatttaataaaaaagggaaacattatttcatttaactagctagtattttaacaaacaactaaatagttgtaatttattgtcataatatatatattctgaataagaaaaatccacatatgtagcaaatgtattatacatgtgtatgacaaaagttttacaaaatggttgaacttaaaaaaaaaatatgtcttaaacatacgtaagactacacgtaatatcaaaattaacatgcttagacatagtaattataaagctttatgtaaagcaagactgattctattaattaattgatggatcaacacttttagcaattggggatattgtactatttactggattatgcttgtggagggagctcatggtgctccagattatcaaattttatatatggtagaaaaataattataccattacaatgtaaagcattcgagttcgaatttcattggcgcactttgattttatataggaagattgaggttaagttgtaataagtgtgatattcatattattattggaagtttattggtttagccatatggtttattcagcaaaccattaactaaactcacatgtcaaaagttgaaacttataccaccttgatatccacgtcatcaattcttaatacacttttgtattttgacccaaatttacggggttacacgttatgtaattatgatatatgcatgacatacacgttatgatatatgcatgacatcgctaaaatagcataatgttaattagttatctaaaactaaagacctgtgtgtggatattatcttccaacattaacaaaaaaatcccgaaaaggagaagaacaaaagcttttaaaaaaactttgatcaccccgttctataccaattgatgtatctttaatggaagagaaccattataaatagaaacgaattaacaccaaatgcaccgtgacacgaaagatattgagtgtaagaaaccccaaattccttgttatattcgcttagaattatttttacagcaccatgtacatgtgatcacaagatatcaattaaagttagctaattaactttatttttcattttttgggctactagtttgctaattaactttttaccgagaaaaaactatcagtagaaagccaaaaaattcaatgaataagaaaaaaaaaaaaaaagcctaaacttacatacatatatgatatatctacgataaatttgctgataaacgatctgacttctaactaagattcctgttttacctattttaaaaaaaaatcgagaaccatgaatcaaagctcaactatgttaatcatgattgaaatcacgtacgttctcgaatgcttaaataaatatgttaatcaataaaccgccataaattggttaaatataaatctacttgcaagaaaattgtaattgaactttattttcaattggtaaaatgttcctttttcacgtacacaaaaaagtgtttgaagagaagcgtgtttgtgttatacggacttacgaaaatcttgtgttcccatttctcaaccacaaaagcctaatttcttggtacctctgattgtatactatcgtttcacaattacagtttcatctgatttcaatcaaaaattacagtctcatatggatcaaatagaaaaataacgagagtctgcatcatcaactcgtgtttgttgtttgtccctctctctgatctttaacggcttttgacgaaagaaaaatatcccgcctaactcaaccaatagacacaagacatgtgtcggcttgtggtagttctatccgtatgaaaaacgctttccatgttaccatccagtgaactcatcccatcattcacttacacgtgttttttcttcttgacgaccaaaaaaaaacaatttggcacatacccattaaaaaaaaaatacttcttatttttcataatacttttcgtagattgtcactgttatgtaactcattcatagaaatttaccgcgtaaattgcatgaaaaatcactagtcttaagaatcacctaatttgtttttctgaacttacaaatattcgcaaattactttcagttaactccctaatacttgggaagaccattgacaatacaaaaaaaaaatcataagaggaggtacagtcacacacacaatattacaacattactaatataaataatcaactttatggtataggttcaaagaaccaaagggatcgcataaatcacgacgctctaattgatccacgtgtcatgataaacataaagtgggacccgtattgaggctgcacgttaacgaagattgggcggcggtgtaatattatattatatatatacatacacgagtagcagagcttcgaaatctttaatctcagaatacaaaaaagaaaatcaaagaagatagttttgtgattgttttctataaaaagtgcagatattttctttgtcctagagaaagaggtgataggaaaaatg

SEQ ID NO: 33174 - DNA, 3003 bp, Unknown; identical to SEQ ID NO: 33173
  misc_feature (1)..( 3003): 2750-1469P.txt file - cDNA_ID_3066416; gDNA_ID_1620500; Annot_ID_158851

SEQ ID NO: 33175 - DNA, 3003 bp, Unknown; identical to SEQ ID NO: 33173
  misc_feature (1)..( 3003): 2750-1469P.txt file - cDNA_ID_3066416; gDNA_ID_2936567; Annot_ID_143724

SEQ ID NO: 33176 - DNA, 3000 bp, Unknown; identical to SEQ ID NO: 2192
  misc_feature (1)..( 3000): 2750-1469P.txt file - cDNA_ID_3066428; gDNA_ID_2936567; Annot_ID_194640

SEQ ID NO: 33177 - DNA, 3000 bp, Unknown; identical to SEQ ID NO: 2192
  misc_feature (1)..( 3000): 2750-1469P.txt file - cDNA_ID_3066428; gDNA_ID_1620500; Annot_ID_158832

SEQ ID NO: 33178 - DNA, 3003 bp, Unknown
  misc_feature (1)..( 3003): 2750-1469P.txt file - cDNA_ID_3066444; gDNA_ID_1620501; Annot_ID_158908
gctctatcaatctccttcttgactgtatacgttttcatgagtttgatactgcaggacaacaaatgcatagcgattgattggcgtgcgactaaagtattggtgtctcttagaagtataacggatcttatattcttcattaacattctgcttcaggtgtgtctccattgctcctatctcatatctaaggaaattcattggctttaacgcttctttggtcttatgtgttgcagtttaggttggcctatgtagctcctgagtctagaatagttggtgccggccagttagttgatcatccaagaaaaattgctcgccattacttccgaggaaagtttctccttgacatgttcatagtctttcccattccacagataatgatattaaggataataccattacacttaggcacacgcagggaagaatctgagaaacagattttacgcgctacggttctttttcaatacattccaaagttatatagactcttacctcttcttgctggacaaacatctactggcttcatatttgagtcagcttgggctaattttgttattaatcttctcaccttcatgcttgctggtcacgctgttggctcttgctggtatctctctgctctgcaggtatatagtagaagatcagtgtctttaaagattctcttcatatctatcaagtgatttaaagattgtttttgttgtattgcttttttcagagagttaagaaatgcatgctgaatgcttggaatatttctgcggatgaacgtagaaatcttatcgattgtgctcgtggaagttatgcatcgaagtcacaacgagatctgtggagagataatgctagtgtcaatgcttgttttcaagaaaatggttatacctatgggatctatttgaaggcagtgaatcttaccaatgaatctagtttcttcacaagattcagttattctctgtattggggattccaagtaagttcatttcaggtttggttgatgttgcagctattagtctttgaatcactctttaactaatgttgaaatgttttcaactctgaaagcaaataagcacacttgctggaaacttatccccaagttactcagtgggtgaggttttctttacaatgggtatcattggactagggcttttgctttttgcgcggcttatcggtaacatgcacaacttccttcaatcacttgatcgaaggtaaatcacatttcatcaacaatgttctgaaaagggatggtgaatttcttggctaatgcatgttctgttttaggaggatggaaatgatgctgagaaagcgtgatgtggagcagtggatgagccatagacgtttgccagaagatataagaaagtctgtgcactgtggcatttgattttctcaggctgtgtaatgtgatattcataactaatcaactgttcaactttttcaggagggtgagagaggttgagcggtacacttgggctgcgacaagaggagttaacgaagaattgctatttgagaacatgcctgatgaccttcaaagagatataagaagacacctcttcaaatttctcaagaaggtaataagcaacagcctcatgacagcattagtcagtattcattttgtgtactcagactccacagtgttgcaaaaagctagttctgaatccaagtgttaatgagtttgcaggtgagaatattttcgttgatggatgaatcagttttagattcaatcagagagaggctgaaacagaggacttacataaggagtagcacggtgttgcatcacagaggtctagtagagaaaatggtattcatagtgagaggtgagatggagagcattggagaagacggttctgttcttcctttatcagaaggagacgtttgtggtgaagaacttctcacttggtgcctctcttctataaaccccggtactaataacatttgagtgttcataactcttaatgttttttggttagaaacttggaactttggagctgaatacgttttgaaacttgcagatgggacgaggataaagatgccaccaaagggattggttagcaacagaaatgttaggtgtgtgacaaacgtggaggcgttttcgctgagtgtagcagatcttgaagatgtaacaagcttgttttcaagattcttaagaagccatcgagtgcaaggagctataaggtacgagtctccttattggaggttacgagcagctatgcagatccaagtggcttggagataccgaaagagacaactccagagattaaacactgctcactccaattccaaccgttaaatttgatgatgatgtttggtttggtagattagtaattttattttgaagtataaagcttagtgattcactataaaagatgaatcgatgattcattcgttgtaatcaattcactcattagtgtttcttaagtatctttttgctgtttttccaatcatacggtataattttacttcaggtcactcggcttgagtaacttgggctcataatttcggcccattctaattgatcttaaattaataattaatcaagcctggataatgaatgatttttgccttttcggtacttctttactgtaagaagttaattaagacaaagaaacggaaacagccatgtagttaatgacattttgcctccaataattagggccaattaattagttacagttggtaatcaaataaaggaattttcgaattcgtgaatattcaaaaggaaataaatgttaaaaacacagaggagagagaagcctcacggacacgaaataataaacaatgtaataaaagtcagtgtttgacttttccagacatgagttttatttacaataatacacttccttgacctgggctacgaagaagaagacccctgacttggtcatcatctcctttcttatttcttcttcttcttatcaaaattactaaaactctctgcttcaacttccttctccgcctcaaattttccctttatgcctagattctagccttctagggtcttcttgaaaccgtgattttggtcaagaaatg

SEQ ID NO: 33179 - DNA, 3003 bp, Unknown
  misc_feature (1)..( 3003): 2750-1469P.txt file - cDNA_ID_3066448; gDNA_ID_1620501; Annot_ID_158907
tccacaatctgtgtatgctgtagagttaacttgcataacattatgctggtcacttttgtagttgaatactgttgaagaagagagacagacttagcaaggtaaatgctgttatgctggaaataacttatcatgttttcttactattgatatggaacagaagactgctgaagaacagaggcagaattgacataaatcatcgtcttttttggtgagatagtatgtatgggattgcaacattggttctgctgtatttaggcatcgtagtacaggagttagaaaaattacctaagacatcgccgacatgaaactctcttccctgtgtccagttggtatagtttgtaaagagttcccagccattgctgtcaccaactatatgctctgttccttcagattttagcatgagagaagataaagagaaaatggcatagagtataatcaagctagagaatcggcttccctgatgaagcattgctatctcttaacttcttgttttctcaatttcttttcagaaatacagtatatttataaagcagtaagcatttgtgggtaggaaggtcatgacattgttgtgttaaccagataagtgagtcatgaaaaccatacatatgtggatcaaggagccacagattgtatgcggggtacaacaaactgtgcatcagggcgatgcactgaaaagcattaaacctaataaggcgatagaacatacacagttatgtatgcattgttcatagtttactaatacagcaaaggattaagctaataaggcaagtcgaaagtgcagcatgatggagcagcagccgatgggttaaggctgcactttgtaaacaggttaatggtgttcagtttcttcaaccacttgaatccaggcttcttctcttcggttttgttctccttcttctttttggtcttatgcttatccaggccaaagcatccgtatgagaccttatcagagacgggctctgagttcctagatgcctgaagcgagtagatgcggttctggagaatgcagaccttgtgaaagtggtcatctctcatcttaagcacacacctagcaagcccaacagcttcgttcttcatgaacaatgcctcagtggctagctctctgttctcctccaagagagaagtgagtttgtagccaagattagcgttttcctccacagccacttctttctccatctccagcaacatgacaaacttcttcaacagctctatagtcttggaggcttcatgaaactgttggtccttgtgaagtaactcgtgtttcagaatctctttgtccaagcttgctgtcacaagttgggatacaagctcatcgactttctcagaaaccgcagtaggatctttcatctgttgaaaggataaggtgctctcaacttcagaactgacctcactaacggaatcaatgtccgaaatgcagtcatcatcatcttggagaagctggttcggaagagaagtagtgggtttaagtctggtctgatgagaagaacgacccaagagagtgacgtagccgttgtacaggtccagacaaagtgagagaagcaaaggtcgtccctggtaaaaccattcagctcgttgagcaaaggtatcatcatctccttggctttcttgaaaaccagactcacgcaggatttgcatccgagcttcaaggtctgtttccaacattttttcagacaagaagtgatgagagagaaagacaaacagagcaagagagagagagaaaaagggggtccactgtttctgtagcatgctttgtgatttgaaaatttgaaaatgtgaaaaagctccaaaaagagagagagagagtgagaagaaatttgaaaatggaaaatgaaagtaccagagagagatggcaactgtggagcttccatggatgctttgttcttcatcttcttcaacctgaaagatatacttgttttagttagtgattcgtatataaaattataaagggaaaatgggaataatggcatagatgatgaagacattgatggcttttccaagaagataataaatgttaagaaagggatattttagatcatcgagattaatgaaggatcggagtggggagaagaaagatacaaacccagaaatagtgagagagagaagatagctgacacgtttgttcagttgtatcagtgcagagcatataacaggcaaaatccgccaaagttacaagcatttgattttgttccactcatattttaacacgtggctttagtacttgggtttggtagttgcggcccattgtttgttgggcttaataactcaaagcctttaggtttttgagattctgacatcaaatttagaaagcaaaaagagggagagagcatattggttggtggtaaatgacaattttatatatccagaagagttcataaagttatgtcatcgaataatgttttcataaataaataaaaatgtgcgttttagaaaataatatttatttcatcgtctttttccataaacgcggatctctttattcacactcttaattattttatcatatgagacaattgcatataaaaaaaaaaaacctgaactgtgtgtttggtgagaattccagtttattctttttcactaatgctcagaaatcatcattcttatttggaaatatgcactaaataaaatacacaatggacaaagctcttggataaagttttcaaagtaacacaagaggcagcttcttgaggttttctctcttccaacttttttgctttacttactactgaggttttctattcctttggaagcttcgttgatgggttcaacacaagatctaaaatgtaacatttcttttcttaaatttcctgcaaagttcgatgtagttcatgtttttttttttccattcttttccttataaagtgtcgtccacatttgcttgacgggatacaaaacgaaacccaagtctctgtcttcgtctccttctttcttcttctctctgtcatcattttgcttttttttcttctcctacatgccctagattttgggtttctgaaataaaaaatg

SEQ ID NO: 33180 - DNA, 3003 bp, Unknown
  misc_feature (1)..( 3003): 2750-1469P.txt file - cDNA_ID_3066452; gDNA_ID_1620501; Annot_ID_158904
tgcctcttctggcattgccttcagcggtaaagaaactcatcttcacattgaaccagataattgagttagaaattgattgtgtattgccatacttttgcttgtgcgtgtgtttgtgacattctgatataaaagtacaaatccttagtcttttgtactcaaaactcaactgctttctctctctttctagttagttatgttaaggtttttgcttaataataaatgcatctacttgggcatatgaaaatatacaggaggttttgggacatacctctttggcatgagtgaacgaattgcgacccaatcaggagatgtatcccgtggcgtcaaggacccttctttgggttggattatcggtttcctctttgtcgtcagctttcttggcctcttctcagttgtccccctgcgaaaggttggtcgcagtttttgtttcctgctttctctcttatgaaccaaaaaggaacaatgagtttatgagatcttgcattgccaatttctgtgtgtttgcagataatggtaatagacttcaaactaacatacccaagtggtactgcaacagctcatcttatcaacagctttcacacccctcaaggcgccaagctagccaagtactaacctttcacttcactttatgcgcttttatgtctttagttctctgcttccttttgactcgatgctgctctctgcatcaggaaacaagtgagggtgttggggaaatttttctctttaagcttcttctggagtttcttccaatggttctttaccggaggagaaaattgtgggttctccaacttcccaacatttggactcaaagcttaccagtacaagtaagccaataaacaatatatgtaacttgaaattatagagcattggcttgaaccacaatctggcttattgttttgtcagtaatcccaatgctcgttcctttctggtgagagcctgatgtagaaacaggttctactttgatttttcagcaacatatgttggtgttggaatgatatgtccgtatataatcaacatctctgtcctattgggaggaatcctctcttgggggataatgtggcccctcattgaaaccaaaaagggagattggttccctgataatgtcccatccagcagcatgcatggtctccaagcttacaaggtaactaaactctccatagcattcctttgttaattatctctatggatcttcctgcttcaagttaatctctctgtactggaccaacttttttccctctttcaggtgtttatagctgttgctataatcctaggagatggcttatacaacttttgcaaggtgctgagccggactctttcaggattatttgtacagctccgaggccctactacatctatttcaagaacctccttcacacttgaagaagaccctcatgcttccccactaagcccaaagcaatcttatgatgaccaacgtcgtacaagattcttcctcaaagaccaaatccctacttggtttgctgttggaggttatatcacaatagctgcaacatctacagcgatactccctcacatgttccaccagctgagatggtattacattctggtcatctatatctgcgcgcctgtcttagctttctgtaacgcttatggagctggactcacagactggtccttggcttcaacttatggaaagttagccatattcacaattggagcttgggctggctctgagcacggtggtatgctggctggtctagcagcatgtggtgtcatgatgaacatagtctcgacagcttcggatctaacacaagacttcaagacaggctacctcactttatcatctccaaagtcaatgtttgtgagccaagtgattggaacagcaatgggttgtgtggtatctccttgcgtgttctggctattctacaaagcgtttgatgatttaggcctcccaaacactgaataccctgctccatttgctactgtatatcgaagcatggctaaactaggagtggaaggtgtcgcatctctaccgagagaatgtcttgttctatgctacgcgttcttcggtgtggcgattctcgtaaacatagtaaaagatagtctccatagcaattggggaaggttcattccacttcccatggcaatggctataccgtttttcttgggaccttacttcgcaattgacatgtgtgtgggaagtttgatactttttatctgggaaagagtagatgcagccaaggctgaagcttttgggacagcggtggcttctggtttgatatgcggagatggcatttggtctttgccgagctccgtgctcgctatagccggagttaatcctcctgtttgcatgaagtttctctcttctgcaaccaattcaaaggtcgacaacttcctgaaaggatccatttaaaactcaaataagtaacaacatctcaaccatgtgaaagtgtaatgatgcttcaattgttcttttaccattatgacgattttgaatgtaactcgtatataaagatcttagatatgaaagggctctgattgatgattgtcaaaacagtttaaaaccgcagacttacgtggggtaagaacacaaaaatagatttttgctgtaaccctttaggctcagacgagagaagatgctaacctgagctgaggaaaatgaaggtaaaggaggggtttttggtgattcgccgattgtgacgccggtgataggagcgattagcaccgagaagggatgaaaaaacgattctttcaattgggttatcgaaggaatcttcgtatgagcatagtgatcaagtcgggttttcgagagctagggatttgaatttattgctttgctttgactccatgttggattaaaaatagagagatgatgtgtcgcagtgacagatataaaagggtacgagaaaccgtcatttcttttctctcctctccttcaaatccgttcttccttgaaaccattttggctctctgtttacaaacttggtttgatttttcaattgcctctgtttctctctcattctctgattcatcttcatcagaatg

SEQ ID NO: 33181 - DNA, 3000 bp, Unknown; identical to SEQ ID NO: 2197
  misc_feature (1)..( 3000): 2750-1469P.txt file - cDNA_ID_3066459; gDNA_ID_1620501; Annot_ID_158896

SEQ ID NO: 33182 - DNA, 3000 bp, Unknown
  misc_feature (1)..( 3000): 2750-1469P.txt file - cDNA_ID_3066470; gDNA_ID_1620501; Annot_ID_158887
ttggttcaattcacgtggtacttcccactctcaaaaatctcattcttgtcttctcttcccttgccacgtcattaaatatgtgcttaatttctatatcaaggttttacaactttagaaaaatcgaaaccgtattaaattttgttattttctgaatggaccaaattatgttattacgatagccacttgaccaaccagaattggtattttaggtggacactacatatcgattttgcgtatctcaagccgtatatgtggtgcgcttatttaacatattatataatatgtttagatatatttggaacaatatcttctgatttggttttatatattactaaaaatatataagtttgttaacggaaatattaggttgtgatctttcgaacatatattgtcactgcataaatggtataagtttgttctagtcggattaataatatcgtaatatcattatgaaattattagactaatgcatgtagatgtttaaagacgatttttcatgtatattttgactacgcaccatttgcaatgtccaaacaactaagtagaagttaagatgtgttttcaattcttaaatgttatgagaatcagacaatctattggctagctatgagcattaacatgagttttggcacgaaatttgttatgaaaaaacaaaacttctccttttaaatacttcattaattgtttaccattaccattgttgatttggtacatatgatttctcgttccatcttgggttaatatctctttaattaatatgttttagggttattgggctcgtatatgtagtgagagactctacataggaagctagagttgtaacacgtagaatcaaaggctaatattaatgtttcttaatcaatggttaatatctctttagtttaacattaaaagagcacgagcaaaagaatataacaagagaaaattgtggtataaaatatttgcttgagaaagtttatataaccacgaacgagttactcttttatttatttaaatttatatatataacacacctagtcatctacacacaaaagagagagagagagaggttctgataacatagatcaatcaatatgttactcactgccggcagcaatactatcaccggccattttgacacgtttgagagactcgaataattttaattattggttttttctccttttctatatagtatctattcatttcagccacatcatttactaactacaaattttaataaaaaccttgggaaaaagatgtgtagagaaacatgtgacatatgaccttttcattaccaaaaatatgttgggacgactgacgagagctaagaaccactacattcttcaataatctatgtatccaataaaaagatataatatggagttttccaaattcaagagattagcctggtgcccaggccctggtttattgaaacttttggattctcaaaaacaatttatttattttaattaaatacacaaaccgcataagaaaaacaaatataaattgaatggttccatgtgatttaattaattgtgagccgacaaaggacgagacatgaaatatagtataaattaccatagttttttttaaaaaatattaactttaagtgtatcattaacgattgtgtttctaaacgcttgcctatattgcgaattaaaaatttgtaaaagtctacaactaatattattagtctacaaagacagaaacaatataaaactgaaagcaccatgtttatttccccccaaaccgaaagcactatcgtaaaaaagtgttttaaatctaattatcaattcatgcacgatatcgacgtatataaatggtttattaccaaattatctcttaaactgaaaatgccacgacaatgaagacctactgtctatgaaaccaagtcataagttcaaaatttccatagaaacgaatgggttatgaacgcgttgtttaatttgttgtagtgtgtatatataacttgatcttaagtttaggtctcttttgatctcctcttttataacaaaggtacaaaactaaactgtaactttaagaaatcatagttggacttcaacttttaagtaactccaacatgaaaacttggaaagtatgtgattccttgtgaacttttatgtgtatacaagtttgtttctacatttaagaactaaaatccgaaagccaaatcaaaactgctccagtaacaagaactataaaactgcaagcaccaatctttttgtagcgtttctttctgactttaaaccaaaagttcttatgaatatattttttcatctattattatttaatttcaacataaaactaatgcaacaaatgacgtgggcctattgatgcatacaagtacacacataaaatacacacatattcgcaatatacatcatatatagaattattctgataaatcaatatactctttgcgtatattttccatattttgattgttgacagaaataagatcctttttaaatttctccttataatgaacatagacataatttcatttgataggagttttatttgaccaataataataaatctcgataagtaccctactaaaaaaatcttatttcgataatatcaaatcttatatggtttgttagattaatctttttcttttgtgaagattaatatgtttctagttatccaataaaaatctggctaacaaaaaccaaaaaaaaatagttaacgaggaatatatatataaaaagaagtgaatataataagaagagaagaggaaacaaagagaagtagcgtcctctcttcaatttcaaccggcactttcttctcttcttcttcttcttcccaatcttcctcgtctctttacctacacctatatatatatatatatatatatctccttccctcacacacatacctgcacagctacaataatctacttcccctctttcaataacggaattaatagtaatctaatcggaagattcaagcgagaaatcgatttggttgtctgttaatttgttgggaaataaattgaaataggagattgattggatg

SEQ ID NO: 33183 - DNA, 3003 bp, Unknown
  misc_feature (1)..( 3003): 2750-1469P.txt file - cDNA_ID_3066474; gDNA_ID_1620502; Annot_ID_158939
tcaatggcggtttgatcagtcttgtccatcttttttttttggtgtttaaggatagagagatctttgtctttgtcttttataatgttaagtgtttaaagtcataaacgacaaaacagtcgctcaagcattcaatataatcatgtgattatatgacgtcaccagtctcaattttaggtgactctttttctctattttaatcatttttttttccaaatttggtattacgtaccagaagtaaagagatgtgattaggccttcgtaattaatgatataggttgtctgtttattcatttatgattttcgggtatggactattttctctcaatccttgttaagaaaattcattcacatgaatggtctaatactttttgcacatgttaggaaggaccgtctgcacaagcagagactcccatccatgttgacatctttacctaagttatttcaagaacattatgtacgcttaagtctactttataatagtaaatgacataggataggacgaccatataaatatttattttttgtttttttgacaaccgtcaagacagaacgaatagaatctgaatagttgaaatgtgaatagtattgaattcgtaacactagttatcgcatcaaaatgagatttttagtatcgacctttgcatattccacgcgtcacctctccaagcagcatacgagtatcaaactatagctacctcgtgactaaaatttatgggtattgagaaaataaaacaaagtaatactgttagatatatctcaactacttttgttagcagtacaccgtatatatacatgtttttgctaaagaataacaattgacgtactaattttacctcattaatatatatggtgaaataggtgattagtatatttacctaattcaccatatatgaatatggtggcaaactgagatataagagggaaggtgattttcatgcaaattttttttttatttttttttgaatgaatgcaaaatttattcaaaaaaaaaaaacctgggctacatcaagtacttcatttctgagtttttgaaaaatctaaagacaacaaaagactttacaatttaataaaaaaataataaaaatactttatcactctcaacgaaattgttgatttaataacgtatctcttggtaaaacagcgttttatttgacgaaattgttataaatgaataaaatgataatagaaactagtgtggtacgtaaaatacctctcatttggcaaaataacggttatgtatcatgagtattgcatacgacagcgtgcttaaatagtgtgctttcaggagaaaatatataccaagttatttgctgaaattaccacgcaaatctgaggttcgaatggcaaaataaaaaaccaatgtcatttccttaatgtattaaggtcatttaaataaaattgtacacttttttcacctgtaagcgttccaaagtgtagaatggataactagaagggtcaaaggtataatattaataagcgaactcactttttgcccaagtgatttcacttcttacatttgcttgatatagttacccaaaagtgtatatatattcccttatacaattgttctattttctggattataaggggaataagaaaaaagaaaagagagagtatataataatacttttataaagtgatgttagattctaatttgtaacgaaaagttcaaagtgaaagaaaaaacgaaaaagtttttctgttttgttttatatctatagccaagaaagtttctcagatttacaagaagttaactgagaaaaacaaaaaaaaaacttatgaagcatgaaagactaattaacgaggtgattaattttgagacaaattaaacatcgaattaaaagtaacatttggagggtttatatgttatatatgtgacatgataagtccgattcatgactaatgtatatctggaatctaacatggaagaatagagaacgaagcagagccaaggtcaacttgccagacacgaatcaacagattgtgaatgagaccaaatcaatggtcataaaccggttgggtttaaaccggcaagtcatccttggctcaattccattcgttattccttcatgcaagaccctctgatacaaccaaagactcccattacaatattctttcgatcacgagctacttattttcaaatgtgttacctctttcgtgactcttgtgttgtgtggtaaagcctagtcgagatgtgtcggtatatataggcatacatatacaaatgcgacaaaataagtatattatattgtttaatttctatattccatttctatatgcatggctgggatttttgaccaaaaccctaattcaagaatagaatccaaaagatgggatcaaagaatataatctaatgggctgaccacattttccgatttaattcgcatagttaatattctttccactactttatgccgcagaaatttgtaattaagtaagacaaagaaatacagatataagatggtcgtagaaaccagtagaggaatttcatttttcgtggataagtggaatattaataagagaatggtctttactctttacagtgggaaatgggaatagtagcccattataatttcatcagattctatatatgcatgtttgtataagctaaaataaatacgtttaagcattcttcaaaaaaatttacaagttctagagactctcttaacgtcggcaatttatattctactttacatgacactttcaggaaaagaaaactatactcactagcagatcattaaattttctttttctttttttgaatgaaccttagttgtggtttttatttttgttagctagaaacttcagtgttttttttccgccaatggtagtgctttgatgatggtccggcccaattcatagaaggccttgaaaatgggccagaccaattcagagacccaacaagctcgactgtatacacaaaattcacaaaaacagcttttgagaagttttcttcttcttcaccttattttcgggtatcaaagccacaaaaccctgagaatg

SEQ ID NO: 33184 - DNA, 3000 bp, Unknown; identical to SEQ ID NO: 2209
  misc_feature (1)..( 3000): 2750-1469P.txt file - cDNA_ID_3066477; gDNA_ID_1620502; Annot_ID_158929

SEQ ID NO: 33185 - DNA, 3003 bp, Unknown
  misc_feature (1)..( 3003): 2750-1469P.txt file - cDNA_ID_3066481; gDNA_ID_1620502; Annot_ID_158926
ggtctcttagccggtgtaaaaaatggggagctcaaggtggcaagagcaatgtcttctttgctaaaaccctggacgatcgatttatcatcaagcaagtcaccaagacagagttggaatcattcatcaaatttgcacctgcttactttaaatacttgtctgagtctatcagcacgaaaagcccaacctgcctggcaaaaatcttgggaatctatcaggtacgtaactgctaagatgagagatttcccgttcaggttagattcactcttgataaaaatatgtcttgtgttaataggtcgcaacaaagcaacttaagagcgggaaagaaacaaagatggatgttctgattatggagaatcttctgtttggaagaactgtgaaacggctttatgaccttaaaggatcttcgcgggcgcgctacaatcctgactctagtgggagcaacaaagtcttgttggatcaaaacttgattgaagcaatgccaacttctcccattttcgtcggtaacaaagcaaaacgattgttggaaagagctgtctggaacgatactgcttttcttgcagtgagttttattcttctgcaaaccatttactcttcactactctttgaaaaggtttattagcaataactatatttttcgtgtttgcagttgggtgatgtgatggattattcattgctagtaggcgtggatgaagaaaagaacgagctagttctcgggattatcgacttcttgaggcagtacacatgggacaagcatctagagtcttgggtgaaatttacaggaatcttaggaggaccaaagaatgaagcaccaacagtaatctctccaaagcaatataagagaagattcagaaaagcaatgacaacttacttcctcatggtccctgatcaatggtctccgcctaatgttgttgcaaataactccaagtctgatcaacctgaagaaacctctcaagccggtacacaagcagagtgatacaagaatcattataatgtaagtttattttttggtcttgtatagatttttggcatttgggaacacattattattcgttatttctttctttattggaaggttgggtttctgtcagatatcgattttgtttgcgtcttttagattttgggtcgttaaagtagagacttaggagattgtctgaaaaattcctcagaaagatagagagacatttctcttgtgtatagcttttgctttaatgtgacatgatttatgaaagattcttttgtttatatgttggatcctcgtacccttttttttggtgaaagattgaaatcaaaatctggacgtaagtttcttacaaaagagaaacaagaaagaagcaaatcgctgcttctttcatagccttttttctgtacattcttattcaagaggcctttttgaagagagaaccagattttgatgtttcgatgaagaaaaaagaaaggggatttagaggaagtcaaagctgctccatttgatcatcatgaactcttgttctgaagcaattatcggtctttgaccatccttgtttgaatcgctcagctcctgataacttctttgcagaagatcaagaatctccacctctctgtttttgataccaaatccatttataaaacaaactttgaaacaagatcgatctgattaagaatttaggttaggattaggaatatatcataccttgagtaagaagctaccattggactctgtgtgggacaacgaggaccttcatcgtatccttcacatataacctctccattatcatctgtgtaacagatgatcccttgtatcggatcttcaaaaacctgttccaagaaaaacaatttcaacattcatatttttaccaaatggttgtgtctgaattttcaagaaaattatgatccactctaaggagaaacaaaaagagagagatgatcttacaatgttcttggtggagtatctgatcggctgaggctgtgaaactgtggctttcttgactttaacatgaacttgactctgttgaagcatcaaagtctttgctcttactgtctttggaacaaaacatggtgttttaagaggaagataaagtttagttgaatatgccatagcttttgtgtttctttctttcttcaagaagaaactttgatctcttctttttggacaactcgtttggtttatagttctcagagaagaaaattataaattccgatgattgattgaatctgagtttaattaagatttttttttaagtcaattatatatagacgcaaggtgaagataaaataatagccaataagagtggcaatctcattaacaagtttggttgtctttttcgtggggtttggttagttcttctaatggtttcgtttttcttcttacgtttgatttttgatgaacgtcaatgtgaaatcgttgaatatatctacacatatacatgtgtatgtctagtcaggtgtatttttattacataaatttttataaaactattattgggatttcttactccgttaatgtttaaaaaatattactaagaaaactacttagattctgtaacacttatatttgagaaacaaaatgagttttataacccgattctttgacaaaataatatgagacaaaaacaaataattccccaactgaaatagtttatagacttaagacattttaccttccttctgacctaaaaaggtaaaaaagacatttgaccttccatcgaaacaattaatctgtcattacattaatttcaaaaacttgcgtgctattagttgcacttgcattcaaccaattttttcgttatgttgagataatattaatattagagtaaaagaaaaactaaacatcgagcaaattagttgttacagtgcttatctgccgtccaatgacgaattaactcctacttaattaaaccgtggcacgtgtcgatatatcaagcgtcatgataagcttttaggagcatttttaattgcaaaatgacaataattggtgttatattattgctatgatttagacaagagactaattgtaggctaaacatg

SEQ ID NO: 33186 - DNA, 3003 bp, Unknown
  misc_feature (1)..( 3003): 2750-1469P.txt file - cDNA_ID_3066485; gDNA_ID_1620502; Annot_ID_158924
tttgtgtttgttgtatataaggaaaccttgcatccaaaatcaaatcatgaagttaggctaactttttagctgtcaatgattgcaatttgctcctttgtttgccttctaacataatacggttgaccaaaggcgtgtttctgattttaaaacgatactatcataatatctccaccgtatttttaaacgattgtataacataatatctccaccgtatttttttgtataatttctaggtttgtcaccttccaccgaattatttttattttgtatttccaaatgtattaaaatcttaataaattcaatttgggttgatatgttcgacttgaaatagatactaattagtagtaaaataaaggttggttgaataaagaaactgccaacggaaacggaaatgactagtggatttttttgttaaaattttaactagtaatcgagaataagtaattaggagtgaaggaatgttctttgttgataacgttcttaaataaggccctgttcgtttgatcagtttgatggatcatctggatggagatgagttttgatgtttgtttggtgccaaaaacgggagtttgaaaatttagcctaaattttcaaattcatttggctgaactaaattggatcatttggatggaaatgattcagtcaaaaataacaaatgacaaaaatatcctaattatttcaattgattatttagatgtatttttagatacaaaaacaaatagactaaatcttcttttacaattattttttaaaaaatagaaaaattaattttttctctaaaactgcaaaatcaaaattttccgctaaaaccgtaaaattacatttttccgccaaaaccacaaaaatcatatttcccgcaaaaaccgtaaaatcgtgttttcccgccaaaaccgcaaaatcacgttttcccgccaaaaacgtaaaattttattttccgccaaaactacaaaattctattttcccgtcaaaaccgtaaaatcatgttttctcccaaaaccgcaaaattacgttttcccgtcaaaacctcaaattcacatttttccgtcaaaaccgcaaaaatcacgttttcccgctaaaaacgtaaaattttgttttccgccaaaaccataaaatcgagttttcttgtcaaaaccgtaaaattacgttttcccgctaaaaccgtaaaataaatttataaatgtaaaaaattattatttaaaatttatttacttttaaatatattttagattaagaattaaaattaatatgtttacaagtaataataaaaatataattagatgaaagtatgggtattttaggtatttggattattacaaatcatttggatggagagtagagataagcaaacgaataacatctcattcggatgatccaatcaaatgaaccgactaaaaataaaataaacaagagtcggatgaatcatccagatggacatgttgaatggatcagttggatggatctgtcaaatggaaatgactattggaattttttgttaaaattttaactagtaatcgagaataagtaattaggagtgaaggaatgttctttgttgataacgttcttaaataacttgtgaaggaagaaagacacataaacgtatttggttggcttatggaaacaagtaaagaagtcacgaaagaactaatcaaagaaagcaaatgccgtgtccgtctcatattcaaaaaataaattaaaataaaagagtgcatgtgattgcaatctattcgtattatcatgtagatctacgatagtatttttgtttttccattacaaaatttgatattagcgattccatgttttgggtgttagaattaataatagtattagtatgataacatctcaataaatgtaactagactgcacatatattgatgggatcagtttaataaagtttaacatatctatatttttttcaagaatttttgtaaaatgaaatatatctttcatatttaatttttccaaattttactcgattttctttctaagaacaaaagtttatgatttgatttgtatgtatttttagaaaacgcgtttataaattcacaattatggaatctctatagtattgttgggtccatataattcattccacgggccaaaaagacataagttacgcaaggggttaggattaggtacatgaaggtgtatgttaagatccgtgagacacagataattgacgtgacgatgtcgctttctctgccacagaaaaacatgaatatcatatcagtcaatacctccaaatttttgtttttttaatttttttcaaaaaacctgaaaatcaaagggggaaaaaaatccctcaaaattcgagtattgaagaacgacgacgacgatcttctgggtgactcaaaggtttcagctcaattcagatgattttttgggttgaagatatttgaaacgattcgccttcttttggaatttggaattttaaaggatttcgattttgatgtgaattttgcacatgatcagggactgataattattgggttttgcttgattttgattgttcatgaacaaaaattctggaaaagatctagcttgttcataaacaatttttttagaaaacagaacaaagttttctccgatcgctcctaaaattgtatatatacttttctgattcgtgttaatctggtgataattgaattagatcgtcataaaacacgtcttcttgttgacactgattttagcgtttaatttttattttttttcagtgagaggttaagctcaaggtctctggattgcttttgaatttgcatgctgttggaggatgatagaccatcggtatgtgcttgagttttctcgaggaaggatgaaccgatacgagccgtcttattgattaattatatatatgtagtggagtgcctgaaggagatatatatatatatagtagcagttggatattagggttttcatttgttaggtgtgagtttcttttgttgttgttaatttggattctagacttccatgaccatcgtagcatgatggttgggaaggttttagatg

SEQ ID NO: 33187 - DNA, 3000 bp, Unknown; identical to SEQ ID NO: 2199
  misc_feature (1)..( 3000): 2750-1469P.txt file - cDNA_ID_3066493; gDNA_ID_1620502; Annot_ID_158918

SEQ ID NO: 33188 - DNA, 3003 bp, Unknown
  misc_feature (1)..( 3003): 2750-1469P.txt file - cDNA_ID_3066520; gDNA_ID_1620503; Annot_ID_158957
atagtttctcgtttagtttagatatataaatacaaagacttgagacgacttctaatactccggcaacgatgattaataccgacgataacttattgatgatcgaagctctcttgacctccgatccgtcgccaccattacttccggcgaatctcagcctcgagactactctcccgaagcgtttacatgctgtgttgaatggaacccacgagccctggagttacgccattttctggaaaccgtcgtacgatgacttttccggtgaagcagttctcaaatggggcgacggagtttacactggtggcaacgaggaaaagacacgagggaggttgaggaggaagaagacgattctgtcgtctccggaggagaaagagcgtcggagtaatgttattcgggagcttaacttgatgatctccggcgaagcgtttccggtggttgaagacgacgtcagtgatgacgatgacgtggaagtgacggatatggagtggttcttcttggtttccatgacgtggagttttggtaacggatccgggttagcgggtaaggcgtttgctagctataacccggttttggttaccggttcggatctgatttacgggtcgggttgtgatcgggctaaacaaggaggggatgtagggttacagaccatcttgtgtattccttcacataacggagtgttggagcttgcatccacggaggagatccgaccaaattcggatctttttaataggatccggtttctttttggaggatccaaatatttttctggagccccgaattcgaactcggagcttttcccatttcagttagagagcagttgttcaagtactgtaaccggtaacccgaatcctagtccggtttatctacagaaccggtataatttgaacttctcgacgtcatcttccacattggcgagagctccatgcggcgatgtactgagttttggcgagaatgttaaacagagttttgaaaatcggaaccctaatacttattctgatcagattcaaaacgtcgtccctcacgcgacggtgatgctggagaagaagaagggaaaaaagcgcgggagaaaaccggcgcatggtagagacaagcctttgaaccacgtggaagcagagaggatgagacgtgagaagctaaaccacagattctacgcattacgagcggttgtaccaaacgtatcgaaaatggacaaaacgtcgttgctcgaagacgcggtttgttacataaacgagctgaaatcaaaagctgaaaacgttgaattggagaaacatgcgattgagattcagttcaatgaactcaaggagattgcaggacaacgaaacgcaattcctagcgtttgtaaatacgaggaaaaggcatcagagatgatgaagatcgaagtgaagattatggaaagtgatgatgcaatggttagagttgaatcaaggaaggatcatcatccaggagcgagattgatgaatgctttgatggatttggagttagaagtgaatcatgcgagcatttctgtgatgaacgatcttatgatacaacaagcgaacgtgaagatggggttgagaatctacaagcaggaagagcttagggatttgttgatgtcgaaaattagctgagagtttctgcggtgtgttttgagaaaattaatcatggggtcaaagtgtaattaagttttgttgattttctcataagttaatggccgttttattagattttggataatatacagttctaatcttgtgacccaaaattagggggacttattgcaaatggtcaaccctggaatgaacgagatgaacacaaacacaaatggtgcttgaattctttttttttttgtttcctcttgtttgttcatcttactaacatgaaaaagatgaatatttatattttgcactttcagcccaaatggtaaaaatttgggttgaatatatttttgagaaaaatccaaaaaaagattattgcacgtttaatatccaaacttttttggttggaaggaaaatatacatagtttaattaaaacatataatttaatttctacaattttactcaagatctaataacaaaagcaaaattctagttttactcttaccatctcaattaatttataattgacatggtatatttgatttgaataaaaattattttttgttgataggttgtttttattaaaattattttattttgactaccaaaataaaaattagaagaaaatctttttaaaaaaatcttcaactttccttttttaaaacacaccctttaatagataaaattagggtttttggaatgaaatgttgaagaagatcaaaaaatttagattttttctatcccaatttaagtgggtgagtaagacaatacatttcttgctatccttttgtttttaattttcaaagaagaaatttaaagcatacatgtatcttaggtttaaaactgatcttgttattatatatagtttcaaaatccaaaacacacatcacaagcgagatattcttcattaaaagaaagaacaaataaaatggagagtagaagatcttcctatgcttttgtttcggttttgatccttgtggtgctcttgttttcagggtcaaacttgttgttgcattagaggactatcatcatccacaaacacttaattgaacaactccgtaaggttccaatttgtatcattaatgtgtgatgtgtccaactcctaaactaaagtctcaataaaataatggagttatcttgcttactcgtacatgtatggaataatggtgtagtagtgactgatgagatttacaatgaatcaattctgaaaccaaaaagtgattcagcccaatgatgtgtgttttaaagcccaatgactaatgggcttatttaacccaaccaaataactaatgggctgaattcggatcatttaaacccgacccggtatcatctctatggcgctctctggttaaaacatacaaacttttagggtttcttcaatctctctctccctctttcttcctcttctctcattgaaatcgaacgaggatg

SEQ ID NO: 33189 - DNA, 3003 bp, Unknown
  misc_feature (1)..( 3003): 2750-1469P.txt file - cDNA_ID_3066605; gDNA_ID_1620508; Annot_ID_159045
aaaaaaaaacctaaattttataaaccataaatttgaatgaaaattacctcattttccttcctcacaatagagattatgagctggaactcctattccactaatataagctcttcacgatagatgcttatggaacattgtcgtcgtgaaagaaaaagaaagaaaaaagaagaaggtgatttaagacgacaaaaacgacgtcgttttacaaaaatttgtttgtctcttctttcatctaaaacgacgtcgtgtcatacgtggcatccacgtgagcaaccgttaacggtttcgtaacaccgtcacggcttaggcatgtattgacatgaatggtgtgagtttgggatttgaatttgaaaatttggtttgttaatgtatggatttgcacaacaacaaacgttgggtatgaattgaacatactactttagctggggtatgaaatgaccgtttttcctagcataattagtcctaaagatgaagataagataaaattgttagtattaatgaatagtcataactgataaataattgtatgcgataacaatttgctaacaattaattgtagttgaacacaagtaaactgacataagtataaattcgtttttttgttttaacattttacttgcaaaaaaaattatttatggtaacaatttgaactatgatacgtccttagctgccagtcggttgagcaattttttttttttttttaatatcaggaggttctgaggcgaaacctgtaatttccctaaacccaaaactaaagtatgtaatattaatttcatctcaggcgtcgcagtcggttaaacaattgatacgtcagtatttgattttgaggtggcagctttcatgcatctaagagcaacctcatcaatggtttctaaacttaagtttcttattttaaagagataaattttattataaaaaaatgtgtgagtttcttgattaacaagaaaccatctccaaaataccttatataaaaaaattttaagagaatttctaaaatatttaagaaacacacataattaaataatattatttttgttgtttcaatgttaagaaacttatatttagaaaccaccaatgaaattcctataaagatgcaatccctaaaatcttgatagatgtaatgttactcgatagttcccgtcatgtcaaaaatattggtggttcgtaactaaaaccacctgacatatatcttatcgtttgacttatcataggcatgaaaacattagaaaaaactcttggaaattataagttctcttatccattattgtctatgccacacatattaaatactcttaagagtttttgatgtgcggatcatttgattgattgaccaagaaacttaacacaacaagtttaaagagttcccgacctctatccggtacgtcgcatgagggtctctccccacaaaattcactatcaagcatggcccatgcttgcatgagggcttgaacatgcgacatagaaactagactgatcgcgtgactagcccccttatggtatgtaaaccatcactaaagtagtgtggtaggtaaatttcgatatatttttccttagttcatgcatctaaaacatttgaaacaattatttttacatcgtgaaatcaaaacgtagttattgtagaaatcggtacacattaattttaagtaagagaaaaagtcgaccaaattagcaaattctattaattattatcgttcaaaaccgcttcaaattcaaaaagttccatatgatgttacgtcattgtgtgggacaatgcaaatgtcaacaactcagagtgaacaagtcgccttcttcgccaacgcgctcacataatttgtgtaatattttatcttagtgtttctagaagcttgactcgctcgcatattgcaattctaccaaatcatatttttattttaatgaaatttctatgattttgacaactaattcttgattttgaccttactatatttcttgtagaattagatagggtgcaattctcatagaatgtttctttaaatttatttctaactaatattaaaaaaaactataatatattcggatttagtcttaagaagatttaccgttacttctaatgatatatttgaatatttgatggcaaatcgaattcaaataaccaacaagttgttggtccaataataaattttttagataaaggtattgagttttagacacgttgggagagatttcttcgtcaaataaaatgaatttattctagtgtgggtctcgcatgtaggaaatgtaggtcttttaattttgaatttccaaatattcaaaaaaaaaaaaaaaaaaatcgaattcaaataactgaaaattagtgtaaattatataatagactatctattagtttctttgaaaaacatatagtatagtaatagacattttgataaatcttcatcttttacatttctaagtatccaaatgcttttccaaaccatatgttttcgggcttttttttttttatcaattcggtaagaaacacattgacggcattaattaacataaaactaataaactacatgttttctatgtttttttgctaatttttcctaaagctaatccattagaaaattttactattctaactatcattgtatgaaaaaggtattatctaattgtattcacaattctataggaaaaaaggttaacatgtcattttcttctcctttttagccgtccactcacgactaagaacttattcgtctaaacatgaattacatgacaatgtcaaagcgtggttaaaacttcagaaagaagtataaacctacctcaagaagtcgtcgtcctctttctctaattaaactattatttcccataatagaaaacactaattttttgcctttttggtaaggaaagtaacatagttgttagtaaatatgaattaggaaataatatacaaagtcttggtcctcttctcatcgactttaaaatctctttctcccattacaaaccaaaaccattagaagatttcgaaaaagaaaaaaaaacacctccacaaacaaaacaatg

SEQ ID NO: 33190 - DNA, 3003 bp, Unknown
  misc_feature (1)..( 3003): 2750-1469P.txt file - cDNA_ID_3066632; gDNA_ID_1620509; Annot_ID_159058
tatacaagaaatgagatcttcctcgagaacaaatgactgttgaagtcagcccgcatggagcgtgttatggaagttattgtcactgggagctaaactttcttcatcatggcggggtaaatggtggatgacttgttcaaaaagaaacataagagaatgcttggggatccgcacaatatcgtattatgtttttaagaagaaagataattttgtttgtttgagctaagtgggattaatcgagagaatcactgtttttctattagctaggttggctggttatagaagacaagttatcatcgagcttacacttcagcttaatcactgcatgtacatggagcaacgaaagtatgattaaagagttttataatcttaaagtaccacaagtggtccaacctcgaagaaatatgaataacacatgaagtatgaaagaacatataagcaaagtgaaaaggtaaatttgggattttgcgattaaaatacttgaactggccaagtaagctaaaggctaactaaacaacaaggcaaacgaaccaactaaacaataaaaaaatgataaagataagcacaaaagattaatcaagatatatataacggagcatgggtaaggcaattgataaggattgattactagctagtcaatcccaaatgcttgaaccacacaattatcaaactcattcttaagattttataggatcataacatgaatcataatatttatatctgtactttgagtaattcatttgcatgcatagatattgggccttaatgggctataacatatatcaaacaagttggcccaaatgcaaattggctcacttaaaaagaagaattacgagctctatggtcagagtattaacaaaacccattctttaacatgttttttcttctttgtgtggcttttgttatttggttacgtcttgcatgagctccagttttcaagtatttgtgtatctccagttactaataattgcagggtgtttactggttgattattggtttttcagtattcatgtattttcgggatagatagctaatcatatattatatactccgatcaaattatgaatatcgaatttgtttataatattatcgataggattaaaatattaataaaggtaaaacagttttatgaatgtatatttttgttgcttagttactaattcgtttgtgtctctttttcctcatgcatggaagtttttggattagatatggaatatgaaatttttattgatggtggctcaaaattagcacttcaccaaagaactacgatttttcgcagttcctatttttccggtttatcatgctgttttttttatatatatccgtcgttttataacttttgttttccttattttatttatattatatcttatcggttgatccgatcagcttacaaagtagattacttttgatccaaatagaattgagcaaccacattgtttgatctgagtttggaatgtcttccgactaccaaataaattaattaggtcaaagtacaacttacagatttccaaaagtaattatgtttttgtttacaaagagaatcgaattcggatatgaaagtttcacctttcaccaaattttcctctaccaatagaccataaaagctttggccaaattattttgtaaccgagttcgaaaccttggattaatcaatgcccaaatatttgggttgtataccgttcttttaatattaatgcacctgttaaaatatataaaaaaattactatttttatctattaagagaatatatgacgattgtcaactcttataaaattttggtagagaatattttgaggattgtcacaacttttaatactttagttgatacataatttagatttttaataaggttatcaacgtcatcaaaaaacaaaagaccaagctcccgtaaaatcgttattctatatcaatctcaaacataaagaccaaacaaaagaccaacctctacactattaatcaatttgttagttattctatatctatctcaaaacaaaatatacaatccataaaatcatacactacaaagttaagtctttttgtttgtatttttttttcatttactaatagcaagttatcatttgtagatagagagtattgaattgtattgttaatttgttattgttgtattattgaatgaacgtcttttttcttctaagcaagttatcatttgtgaatagggagtattaaaccgtattgttattgttgtattattgaataaaagggtacagcttatatataagcatttcatattattgaatgaaagggtacaatttatatataagcatttcatattttgtccacataattggggtttagtggtggttgagaattagagaaatattgaaagaaactaaccctggtttaataaactttgaaacaaaaaaatacatgtacgagaagtttggatttgggccaaagatccaaacagtttacacggtaatcagtaacatgcgatctgactactttctaacgttactcagaaagtattccaaatttgggaaagacattatagtggtcttttaggcagaagtctactagacttttttcgcttatttaataaactctagactctccatatatagtcttcactaataaaactcttgcaaatatttaaagttttggacacgaataacgaatttaatatatatattttaatcaagttcaggaacgatatatatatttataaaccctgatatattttatatatttggttctccgattgtaatcagtatgttgaaagaacacaaagttctcaattcaaatgagtcttaagtcgacaatttttttgattgaaaataattttttatgtaagatgtgattctttggctttgcttatactccaacgagaagtaagagcatacaaaaagtaatgatcgaaagcgaatgaaagacaaacgaagcaacacctctttactcattctttatattaatacctctcaggcttcttcacctgttaacactttttcttcacttgcctacagcacctgagctctcttaaaaatg

SEQ ID NO: 33191 - DNA, 2600 bp, Unknown; identical to SEQ ID NO: 2241
  misc_feature (1)..( 2600): 2750-1469P.txt file - cDNA_ID_3066643; gDNA_ID_1620510; Annot_ID_159105

SEQ ID NO: 33192 - DNA, 3000 bp, Unknown; identical to SEQ ID NO: 2242
  misc_feature (1)..( 3000): 2750-1469P.txt file - cDNA_ID_3066654; gDNA_ID_1620510; Annot_ID_159099

SEQ ID NO: 33193 - DNA, 3000 bp, Unknown; identical to SEQ ID NO: 2243
  misc_feature (1)..( 3000): 2750-1469P.txt file - cDNA_ID_3066662; gDNA_ID_1620510; Annot_ID_159094

SEQ ID NO: 33194 - DNA, 3000 bp, Unknown
  misc_feature (1)..( 3000): 2750-1469P.txt file - cDNA_ID_3066666; gDNA_ID_1620510; Annot_ID_159093
tctaaacatgatgctgatgcttacccaaggttatttgtttttttagctaattctcggaatgtgatattcaaatcaaataagtttttttttttttttttgctttacagatacgagaagcagctagagaggttttgtggattcatggatcctcttttggattcaactccacctgaatctctgcaaagtgcctcttcttttaatgataagttgagcaacaaaatgtacaaatctgctttctgggctcgttgtctccggcaagcagtttctttggggcataaagatatggtgtatgatctcctttttcaaaaacaattaagctgatttgttttgttatctttcactgttttgtttacatgctctttgtttttatattgtgaagggcttttatggatcttttattggcaccagcttcaaaagttttgaacaactggtttgaggtgcttttcttatcttaacacatattggttatacaactagcattagcaagtagtctgatgttgtattgacacacgtttttgtgttggccttatgcttgtagtctgatgtcctgaaggcgagtcttgcaacagatgctgtgattggatctacggtaattgactttcttaatatcttactcgttctatattgggggattaatgtagtgatctgaacattaattcacaggccagtgtccatactccgggaagtggatatgttctcctacatcatgtgatgggagaaacagatggagagaaaggcatttggtcgtacgtatcttgattgttaatttgtattttcctcttgatattttgggaatgtagaaatagctgtgtatgttttacataagtgttgatgcataagcaattgaagaactatcttaccagatattagtaaacatgcatctctgtaaggtgtaaatgaagagcacaagactatctgtttaataaaacaaggcctggctatcgtgagtaactggtaagaaaataatatgcagttacgttgaaggtgggatgggctctgtctccatggctatagccaatgctgcaaaggaagctggtgctgagattttcacaaacgcagaggtattaaattctagatcattttgaggttatccctctttcctacgatattcagaacagtggagttctagtatcatttctctcatcagaaatcagagcagcttagtacattcatattttccaggtttctgaaatactaactgaagactctagcatcgtgaaaggggttagtttgtcttcaatgatttgtggatgaagtgaaaacgtgaatcaaactgatatgacattacctggtataaggttttgcttgctgatggtacacgggtggagtcatcggctatattgtccaatgcgaccccttacagaacttatgtggtaaatctttttaaatcataagttccaaactcccagtatatgtcagttaaaattttgttgtttgctaacaaatttacgtttgttctttctgtcttggataacaggagttggttccgaccaatgttcttcctgaaaatttcgtcagtgctattaagaactcagattacagctctgtaaggattccatgtcgtttaagtccctcactctctggatcaagagaagatagatttctctataggcggaattggttttttttttaattacaccatctagctaattatctggtgatttgttgtttaattgttgtgaacaggcaactaccaaaataaacttggctgttgacaagttaccacagttccagtgctgcaacacaaatcattcaggtccaggtccagagcattttggcactatacacattggtgcagagaggtatcattcgtgctaatttgttcctcattatatgtatctcgaagaacaaataataatacaaataaaagtgatcaatggctctgttctatcttctctctgtcagcatggacgaggttcactcagcatgtcatgattctgaaaatggcttaccatcgagaagaccagtgatcgaaatgactattccatccacactagacaacaccatttctcccccaggtacacattctcccccttttgcttgtttaggatttgaactctgaatgtgattttgtatgtagggaagcatgtaatcaacttgttcatccagtacactccttacaagccctcagatggaagctgggaagatcctacttaccgagttagtttgttatacacgcttggctaaacattcctttacactacaagacatgccaaacccatctggatttgcttttgcttgtgtaaaaatcaggaagcctttgcacaaaggtgtttcaaactgattgatgaatatgcacccgggtttagctcatccatcattagctacgacatgttgactcctccggacctggaacgggaaattggtctaacaggtatataaagtgaagtacttggagaaagatcccaagtacatgcgacatggccaaaccatattgacatgactgcccatttgtattctgcaggcggaaacatctttcacggtgccatgggattagactctctcttcctgatgcgccctgtgaaaggatggtacgtgactccgaagtactcaaaacagtctttacgatttatgattatgaaattcaaaactttgttggactgtgtgaaacaggtcaaattacagaagccctttgaaaggtctctacttgtgtggcagcggagctcatcctggaggcggagttatgggtgcacctggaagaaacgctgcacatgttgttcttcaagacttgaaaagaatctagcgagtataatctcagactgtgcaatgttaactctcatgtgtaagttgtttgttactgctctgaaaacctctgtcgtagggagaggcttacagacatggacaatagttgatatcaacgaataataagcctccacgtgtagcttaacctaaatatcactaattcaacaaatatggaaagtgccctaaacaacagaagagccattgtttatttgtctttgtctttgtctttgcgaaaagaagtaaatatcctcatcaatg

SEQ ID NO: 33195 - DNA, 3000 bp, Unknown; identical to SEQ ID NO: 2238
  misc_feature (1)..( 3000): 2750-1469P.txt file - cDNA_ID_3066681; gDNA_ID_1620510; Annot_ID_159081

SEQ ID NO: 33196 - DNA, 3000 bp, Unknown; identical to SEQ ID NO: 2247
  misc_feature (1)..( 3000): 2750-1469P.txt file - cDNA_ID_3066688; gDNA_ID_1620511; Annot_ID_159114

SEQ ID NO: 33197 - DNA, 3003 bp, Unknown
  misc_feature (1)..( 3003): 2750-1469P.txt file - cDNA_ID_3066714; gDNA_ID_1620512; Annot_ID_159143
gatctgtaattagaaaaataatttctttcttctaccaagtttatgtttactcaatttctcgaatttgtacttggaaattgcaaatttcatttggttttcttgaatcgttgttagatatttccgatcaaatcgtttttagataacactgtttcaaagtcaatgtcgtcatcatcatacaagaagaacgtatagtttttggtttatctttttgttgcttcttaagtcactctttctcgcatagtttttgaggtgacgaagttacgtatacggtgacgtagcaaaccaagcccataagcccaaattctaaacaagcctaagacaagtgagcaaggagtgggtaaaccaaaccataccaaaatgaaaccgacaaactcgtcgatatgtgccaggaccgggcttagagggtgtgctgagggtacatttgtacattgtccattactttttagtcagatttcttaaagcaattagggtcctatttctaaacaagcctaagacagcatcaagtgagcaaggaagtacttcatgttcatgcacaatttctaggaatgggaaagaccgtaccaaaatggaaaccgagaaactcgtcgagaccggctttgattagatagtctatcgaagtaaaatatcgaacttcgatggactatattgaagtagatttgtgctctactgccctcgaaaaaaacattaaagtagattactactacgtcataataacaaacagtctttaacaacaacatcatcatcactcgatacatctctgcctctgtacagttttgctgacatattcacaacaccgttgcctcagtttcagccaagtacactacttcttactaatccagggggcctaatagcaggaaaccaagcctacaaagcacaaatcccaaacacaaatttttgagtataatataaggactgagctaataagttaaaacatttctgatttttctgatagaaaggaaattttactatttggccctctttgaacacatccttccctctcctcctcctccttcccccaaaaaacctggagaaccatgcagttgcaatttcctctttaacccatttcaaagattcgtttttttttttttgtaaatctctttctcctttggcgaattcgtattccttcttttccaatgtaagttcttcttccttgataatcgaattcttcttttgatcttaaaccaatcactactccgtcgttgtaatcgtaattctcgattcaccgttgttcggttataagatcattcatcagaatcggattccattatttcggtgacctggattttgattttgattttgattcttgctgctatgatcacgatcttgatatgtaaactctcttcttcttttttctgattcgatgaaatcaggagttctagagacagaggatcaccttcttcttcttcgtcatcttcttcgttaccaggaatagaaaagtataatgaaaaggtgaagaatcagatacaagctcttgttcgtgttattaaagttgctcgtacctatagagacgacaatgtcccttcccttattgaacaggttactactactactaatactcataggttttttctaccaaccaaatgaccaatgattcattatcaaagatcaaaccttttgttgaatttgactttttcagggtctttatcttggatctgttgcagcagctagtaataagaatgttttgaaatcttacaatgttacacatattttgactgttgctagttcgttgagaccagctcatcctgatgactttgtttacaaggttgttcgaggtataaacttattaaaggtttcactttgttatctagttgaagagagaatatgtttttgattttgggatggaattgcttgtttgattgtttttctatgtgatagtcgtggataaggaagatacaaatctagaaatgtacttcgatgagtgtgttgatttcattgatgaagccaagagacaaggcggtagtgttcttgttcattgctttgttggcaaatcacggaggtcagttttgtttgcttccttcaatatctagcggttttcgccttgtttgctggatagtattcaaaactaagtacatatttagcctggatggtttgtcccttttacttgcagtgtcactatagttgttgcttacctcatgaagaaacacggtatgactttagctcaagcattgcaacatgttaaaagcaaaagacccgtggcaagtcctaatgctggtttcatcagacaattacaagacctcgagaagtctatgcaaggtatgccttactataatatcttgaggtctagactattaggttgagatctctgtggtgaatctaagttggagatactttgtctgtctgattcagtagtgagtgaccagtttttttccttttgaggatgaaaagcaagtggttgtggaggagaagacagttccatgtaaatatctcttacatgcatcttccttcttctctataaaacagggaagcaagttacgattgcacaatgtcaggcgtgaagatcattgatcgtaccattgggagaaacttgtaaatctcacacgaagcatcaatcaaaatgttttgttgtttcttctccttaacaactcgaataataacatggaaacgaatttggaatatgttcatgttctctattcgttttgtatagtttcatcatcatggatataaaagtgaacataaataaaaatttgtaaattttttgtaccgcaatgaaatgtcttttttgtgtgtaaaagttcatgggctgtcattgtttaatttgagcccgtatagtttaaacagttcatggaccttgtgaaacattgggttttatagtcaataaaaaactgtggggtgatttaggacagacttataaggttaggggtcatattagaattctcttaaagttgcttccaattgtgaggaggcactaaaaccctagactccatatcaatcaatcgaaaaacctttctctcttctttcggagccgtcgcttgtgaaactttccggcgatttaacagagtcatg

SEQ ID NO: 33198 - DNA, 3003 bp, Unknown
  misc_feature (1)..( 3003): 2750-1469P.txt file - cDNA_ID_3066718; gDNA_ID_1620512; Annot_ID_159142
aattttatgtcttaagggcgcttgcggacaaggttgcagcttctggattctatgttgtggttcctgattactttggtggagatccttataatccctctaaccaggacagacccatccctgtctggatcaaagaccatggctgtgttcgttcctcctcctctcctccttataataactgtcctatacattctcaacttctatttgaagttttgttaacaagtttgactcaatgtatgtgttattgttctgttattttgatagattccatctgaatcagttcatatcctcttttgtttttcaggataagggctttgaaaacacgaaaccagtacttgaaaccataaagaacaaaggcataactgccattggagccgcagggatgtgttggggtggtgagtttttgttagaaatctatgcctaagagatgtgacgctctctttttgtctaatggatagtacttttctctcttgtgttattcatcttcagcaaaagtagtggtggaactgtctaaagaagagcttattcaagcagctgtgttgcttcatccttcttttgtcaatgttgatgatatcaaaggttagtgactttgctacttccatcttgattcctcacatagaaccaaggaacattagttgtcatgccttgcctaatgcgttgtaacatttagagtcacctataggattgcgtaactgatctcgccatgattagatactatcattattactgtaaagaatactaattcacatttgcaaacataaaaaacactgtgattggtccggtttctttactttcaccggtctttgatgatccttatcaatttcacgggtttattgcaggtgggaaggctccaattgctatattaggagctgaaattgatcaaatgtccccaccagcactcttgaagcaatttgaggagattctatcttccaaacccgaggtaagctgctttatcaccgcaactcaacagtgtaatttaatcacctttatctaactttaaaacggatcctgtaggtgaatagttacgtgaagatacacccgaaagtgtcacacggatggacagttagatacaacatcgatgaaccagaggcggttaaagcagcagaagaagctcacaaggagatgcttgattggtttgtgacctacatcaaatgatttgagaaagaaagaaaggtattgtctattacttcatatatgcaaagaataaaaattaaagagagacaaagcaaaactcttggttggtgtttcaatttctactttctatagtcttttgaagcattctctgagattctgtgataccttttgttaatcattgttttatgatttttatatgttgacgatacgttacccttctcatcatcttcttgtggtaagcaaaaaaagttaccaaaacaaactttgattgaaatcaatgtcttcttcgactaaagaagtaaaaaagatattgtacatatatacagaaataatcaattcttcttcttcttgatgaatttgatagtcaaaacgcaaaattattgattgttgagacttgagaccttgagtaatttttttttttttgggtcaaatgagagtaatttataagagtcaaaatcattacatgaaaatgatttaagagagtttgtccacacacaaaaacctaaaaaaaagaaaactagtaattgacaaaattatacgataaatttattgtataagaaattgatccatatattatttatattgttgcttaaaaatcgtgcaaaaatgtggacagaaaaaaaaaacttgccaaaacaagaagatattgctcaagaaagtcactaggttctttagagaaatcaaataaaatctcaattcataatcaatgtagatttctcataattaaatttgtattacaaacttacaattatcaaaaacaaaatctgtaattacacaaaaaaaaaaaaggaaaatagaaacaaaaaaaaatccgcagaatatctccaaaaatcaattctactaacacaaaaacaataatactaataaatctatttttctattttcaaggaaaaggaaacaaacctttatagctcctctctatcgtctcgtctctataaataaacgagaagctcacaaattccacaaaaatccactctaactatgaaacaattagggttttgaaatttacctaaatctctccgtaatcatcgatcaaaacgatgctcgagtgtcaatcaatgatggagaaattatcaccgttcgtagacgtcgcctctctggaaatcgagtctctgcgaagaatcaaacgcccgaaacgcttctctgaagaagaatcagaagaaaccgagaatacgacgaattcatcaaacgcggtattcggattccctaacttaccagaagaaccgaatcgcgatatggatcaaagcgttttgtgcagaatctgcgttcgattaccagatgggagaagaatacagagaagtttcttaaagagtgaatctgttcagcttctttggtcgttttgttattcgcagattggtgatgaatcttctgagagaaagcggcgttttaaattgattcaagggtttcctggggattataagaatctttattttggatctaatactacttttgaacaatctgggcttgctaattccttggtttctgttacttggctctgaagaatcttctttcgatctgtaattagaaaaataatttctttcttctaccaagtttatgtttactcaatttctcgaatttgtacttggaaattgcaaatttcatttggttttcttgaatcgttgttagatatttccgatcaaatcgtttttagataacactgtttcaaagtcaatgtcgtcatcatcatacaagaagaacgtatagtttttggtttatctttttgttgcttcttaagtcactctttctcgcatagtttttgaggtgacgaagttacgtatacggtgacgtagcaaaccaagcccataagcccaaattctaaacaagcctaagacaagtgagcaaggagtgggtaaaccaaaccataccaaaatg

SEQ ID NO: 33199 - DNA, 3003 bp, Unknown
  misc_feature (1)..( 3003): 2750-1469P.txt file - cDNA_ID_3066720; gDNA_ID_1620512; Annot_ID_159140
gttgaacagacatgtttgatttatctatctttcttcgatgtacaggaacacactgttgaatatcttacaagattactatccccacccgttccagcagattattccagggctgaaaatcatttgattggttatgcctgcatgttgaatgttgttattgttgggataggatctgttgacagcattcaaattttctctttacatggcatggtatgtaaattgtacttccaagtttactagacttaatagtgaatttgctgaaagatgtaatgtacgattttgatggctactttttaggttccgcaacttgcttgctcactaatgccaatttgtgaagagtttggatcttacaccccgagtgtatcatggactcttccttctggagaagcaatatcagcatattctgttttctcaaatgcattcactcttcttttaaagctatggagattcaatcatcctcctattgagcatggtgtgggagatgttcccacagttggctcccaactcactcctgaacatcttctttcagtgcgtaattcttatcttgtttcgtcggagatccttgatagagaccgaaacagaaagagactttcagaagttgcaagggcagcatcttgccagcccgtgtttgtggactcgttccccaagctgaaagtctggtataggcagcaccaaagatgcatagcagccacattatctggacttacacatggatctcccgttcatcagacagttgaagcacttctcaacatgacgttcggaaaggtcagaggcagtcagactttaaatccagtaaattcgggcacaagcagttcatcaggagctgcaagtgaagatagcaatattagacctgagtttcctgcttgggatatcctcaaagccgttccatatgttgtcgatgctgctttaaccgcttgtactcatggaaggctttcgcctcgtcagttagctacaggtttgttttgttttgctggatcagattcctaattgtgttgtcatgtgcgataacatccgtctatatgacctttggcaactctgaatgccaatgagagatgtttgactgtgttgatcagttgttatatcagatgcatttcttacagtaaagtgaatttatttacagaataacaagtgtttttctttcagggctgaaagacttagcagattttctcccggcatcattagcaacgatagtaagctatttctcagctgaggtgagtagaggtgtttggaagccagtattcatgaacggcgtggattggccaagtccagctacaaatctatccactgttgaggaatatataacgaaaattcttgcaacaacaggcgtcgatatccctagccttgctccaggtaaaactattcaacgtgtttaaaatgccagtctgtttgtttggcttaccatctctgtagtctgtaccatcctctctttataataagctttttacctgtcctgatttgatgtgttaaagttaaagttgtcttttgaacttatggttgacttcttgctgtggtattgcaggagggagttctccggcaacgcttcctttacctctagccgcatttgttagtctaaccattacttacaaaattgacaaagcctcagagcggtttctcaacctggctggcccagctctggagtgcttggctgcaggctgcccttggccttgcatgcccattgtagcttcattatggacccaaaaggcgaaacgttggtttgacttccttgttttctctgcctctcgcaccgtcttccttcacaaccaagacgctgtgattcagctcctcagaaactgcttcagtgccactctgggtttgaatgctgcccccatgtcaaatgatggtggcgttggagctcttcttggccatggattcggctctcatttctatggagggatctctcctgtagcaccagggattctttatctccgtatgtatcgtgctctcagagatactgtctccgtatcggaagagattctctctctgctgatacattcggtggaggatatagcccagaacaggctctcaaaggagaagctggaaaagctgaagacagtgaagaacggatcaagatacggccaaagttctctagcaacagcaatgactcaagtgaagcttgctgcttcgctgagtgcctcgttggtatggctaaccggtggcttaggtgtggtccacgttctcatcaaagaaacgatcccatcttggtttctatcaactgacaaatcagaccgagaacaaggaccatcggatctagttgcagagctaagaggtcatgcccttgcctactttgtggtcctatgtggagcacttacttggggcgtggattcaagatcatctgcatccaaacgccgccgccaagcaatcttgggaagccacttggagttcatcgcgagtgccttagatgggaaaatatcagtgggatgtgaaacagcaacttggcgaacatatatttccggtttggtgagtctaatggtgagctgtttgccgctctgggtgacagagatcgatacagaagtgttaaagagtctaagcaatggactaagaaaatggggaaaagacgagctagcgattgtattactctccttgggaggtctcaaaacaatggattacgcagctgatttcatcattcatttgcgttcatagcttcttaaaaagttttgatcttctccagatttcagatagttgtttgatagatgtttttcttctagtgtttgcttccttgttgtgacttgtgttctctagctccagtgttgtgtgatgaaatcaatcacgcatatgtatagagagaaacagaaaaaaaaaaaaaaaaaaaaaaaaaaaaaatcttgtatagaaaatattagtgtactattctagaccgttagatggattagtgttctatttggaaccgttagatgactctccgttgattagttggtcacaagtcacaacaacatgttaaaagaaaacgaatgattgagtttggtttctttgtatcatctctctgtttttccgaagaactaacacatg

SEQ ID NO: 33200 - DNA, 3000 bp, Unknown; identical to SEQ ID NO: 2264
  misc_feature (1)..( 3000): 2750-1469P.txt file - cDNA_ID_3066722; gDNA_ID_1620512; Annot_ID_159135

SEQ ID NO: 33201 - DNA, 3000 bp, Unknown; identical to SEQ ID NO: 2265
  misc_feature (1)..( 3000): 2750-1469P.txt file - cDNA_ID_3066726; gDNA_ID_1620512; Annot_ID_159134

SEQ ID NO: 33202 - DNA, 3000 bp, Unknown
  misc_feature (1)..( 3000): 2750-1469P.txt file - cDNA_ID_3066749; gDNA_ID_1620513; Annot_ID_159191
gatgaaaccaaagcaaaaaattaaacgaacgaaatgaaatcatcttgcaaatgaagaagaaggggaatagtaaaaacagagtttcagatttgtggcagatctgcaatcgagtattcgaaatcaaagcttttcaataatcatttgcgtcctcactattcaccattaatgatattttgtttattggaagagaattccattcaaaaactaaaccctaatgattattgtaaagggaacccaagcaaaaaaaatcaaacgcacattgataagtttctgagatagaatctgatgataaagaggaagatcagagaaaagaaaaagaaactgagccatctctctcatgattcacggccgccgacgccgttcgttaccattgaaggagctcatcttaagggacacaaccaatcaactatcgtcaccggagctagccccgcttcaatcacgttgtaaaaaatcaattgatctgcagagagagaaagagatttgatggaaacggagacagatccagttgttaatggcgatgatgatggcgtcggtggttacgttggtgatgatgatgatgagggttgataacgacgacgacgacaacacaaaaaaatcatacaatttttatttgttttctctaaatgatgaatcaagggtaatagcgtcatttcaaataagtaaaagtacctgatttcgtaagccatcttaaaagtaccggattctataaatttttatgtttttgtggttttttagacaaataagtctctgtaatttctttgattatgcactggttgaacatatatatttggcaacttaaatataaaagaatcatataagggttttgaaaattttagagcatttatggagtggtatttcaaaattatcagctctgcgagaaaacaagacaatagcgttacgagtggatttttgttctgaaagtatctaatagaacagtggatgacaaactctatatgaaatatagaattttactataagtatactatttaacgagaagatatataaataaaatttcgccttataagtttgttaaagttgtacatggttcaatagatatgcagactaatccaaaagtcacccaatacctatagcaaacataaaaataataatatttataaaagaatgaaccaaaaacttataaaaagttaagaactatagaaattcgtgatgagatacatgtgaattaccaacgagagactcgattacatgagtttctcttaactagtttaacaaaacatggttcatcttatactacaaaaaataagccaatctagacatgattaaaaacaaattagtgttatattacaaaagtttccctcaaaaaaaacacattttgaggaagctaatcatgtctaaacaaagtaaattcattacatcacaaaattgtggaaaagagcaagatgtagtatatctgtaatcaaatatgttcaaacgagcatcaaaattcacctaaacaaccttctgaacactatgataatatcttcaatctgtttagtatatcttttacaatcgtgattattctttctttggttccccgctcgctccattgaataggactaatttatattgttcacattgcggattcacctactggaagtgtaagagttaatgcagccaacctcattttttccagagagattacataaagacctaaataaaaattggggaaacatatattcttttctttctttttgttaatatgttggcggaaagatttcaaaaggggatttccctaaatgatagctttacatttagaaaacgaactatgagcatgacaattcggtttaggtaaaagaccaacttgctctcattgcacttgtaaaaccctaagcaagagagttgaaaacagtaaacgtctaagcacctacttggttggtgacacgtcggaaaggccaaaattttggtccactagaatgtaccagaatggtacttgcaagatttttaaggttttagtgctcataagttgctgagctggatagatacccacccacattttaggttttagggttttgattattccccacaaattttatgagataagatttaggttaatttcgcatgccgacatcaatgtgcgcacaacatcattcattcgtttcatttgatgaacaaaaaaaaaaatggtgaaattacccttctcatcaaagatattattatagagtgaacattatgtgaattttcttgaaatggagagaattctattcctcacgatatatctagattatatatatatttttttaatatatatatctagaatatatatttcctatcaagagtcactgatttatattggtcacccaaaattgatcttacccaattcatacacaattacattattttgctaaaactttatacacgattcatgctaataaaacagtaatatatgactcgtattatgctatatagagtgaccactgaccatacattcttcttgaggaaactagtattcgagaaaacttagtcatgttcagatatgcagatctaaaagctcataaaaattaacggtttaaccatttacataaacacacaaaaaactatgtataaattgagtacatgagtcataaaatcgatagatgggtaagatcattatgcttaggtgaaagaaaaaaaagggaaccttccgaggcaatggggcatgaagtatacaactgtaaagtaagagataatgctctttgattcttttttccccactatacatcccattgagttcaaactcttctttctctctctctctctctctaggtctctcactcacagacgcattttgcaagttgatacacttttcttcctcctatataaatcactacacttctcaatcaaaaattgtatcatacattgaacataattctcagtatgatcctgtagagtttactcgttcattcacttgtattctctttcatagaggaagagagagggagagagtttctaattaattagaagatttttctttctttattttctaaacaagtattagactactttgagagagatataaaaatg

SEQ ID NO: 33203 - DNA, 3000 bp, Unknown
  misc_feature (1)..( 3000): 2750-1469P.txt file - cDNA_ID_3066768; gDNA_ID_1620513; Annot_ID_159166
aaaaaaggttttcaagattctcaatatccagtagggttcgtttagagtagaaattctttggttaccttttagagattaagaagaaaaaaagtctttgttcaaactatatttttcttgaaacaaagaaataaattaatgaaaacgccatttagaaaagattcatttctacaaacagcgattttgtatatggaaatcaaatgaaatcagaaacgaatattttgactgagggaatacagagaatataaaatttgtgaatatacaaaggaatggaatatttaccataaatagttttatgcatgttctattaatcctcactaccacatgtacttatcatcctataaattttatctcttgaagttttcactttaacgttaaagaagaaaaagataaaattgttctttctcatattaatcacccacaagtctgaaactgcttcttcactctcaaggcaaaggtatggtttacagaaaccacctttgatatatggctcgtgttatttactttgattttattatttaggaggcttcttttctgtatttcgttgggatatatatcagattttagagtacttttttttggtctctagcctgtgcctcgggcataagaaattaaatcatactaaagcgtttgatgaaaagttttcccactttctactttctgattatcaatctttttcttttgcaggatcaaaactaagagaccaaaagatattgtgtactattttaacagcgatcgaaaacgaccctaagcttgagaagaatctcggaggtgtttcatgatcacttgggtactaacttctcatcatcatcatcattaagatcatcagatcgtctcagcatgtgggcactattccgcgctttagcatgaagtgtgaatatccaatatatgcaaagatcacagcgttatgtgtgttccatgttggaagttttcaagcttttgagtatccggctccattgatgactagtgttgtttcatggacttcatgctaattcattgttcacaggagtaacacgagccatcgatggagctagacacacttcaaaagcttcaaatggcttgcaacaatgaacacaaataatcatgtggtctttaatttgcatctattatttatacattatgctacaagaacggcataatgaccataagctgcgaccatctgaggatgataatgatgatgaattagtacccaagaaataaggaaacaacacctccgaggctctcttctcagaagaataatttttatatttgccagttatgtttttccttcagtcaaaatacaaaagctcagtttgaaaataataataataacaaaatatcagtttgtagaaccgattcattttaactaggcgtttctatatttctctttctttcatgtaaacgatacattgaacattaattgtctctctttttttctctttcttagcctcgtttatatcaaatcaatagctggtgaataataaaagagaagaaagctgtaaacaaggttctagtgttaaaacctttttgaaaaaaaaaaggttctagggtttcaacagaacctaaaaggaagaaaatcctttatcaagacctagaaggaagcaaagacctacgagacttaggaaacaagataaagtctactaaaatgaaagtgtaagtcaaaataaaaataaaaattaagaaataaattttgtgaattgtacttggtttgttttcgttatctgaaaccctatttcctggtgagcaagaaactgtcgagtcttcttagcaggatatgtaacagttttaaactggagttacgacatgattgctctctatttaataagtctttacatctctcagaacaaaatagaggaacaatatcttataagctccacttctcattgcaaatcacataaaaactttgacataaatgatgataagaatttcaaaatgatataacatatgatcaaactctcattccaatcatatagccctgcttcgagatacattcatatttagccctgattagtgactcctctagtgactaccgagtagattatattcataccgacgactcttctggtgacaactctttagttatatcatagctcggaaactgactcagtctcgtgatttgttgctgcttagcataattctatcgattaaaaaggattatccatggagcaagtactcaattgctccaaagggcttgcgataatgagcacacataacataaccatttgatctttgcatctatttggatattcatcctgcattgatcaaaaaagatgaataaaatgtggtggttatgagtgtttcgagtcttccagatgtctaagacttcgacaaggatcagactcaagctttgttgagagaaaaccaagtttgggctacttatgatgattatggaatgccacagtggtatgcactggtccataagtttgtctctcaagaaccgttcaagatgtgcatttgttggcttaatggcaagaaaaatggatatgtgggttcaatgaagaagtggattgatttagggtattacaagacgagtggatgcttctcaattaggaaacatagcaacaatgattctctcaactcattctcacatagtgccttgtgaacaatatgtgagaaaggattgatgcacatataagcgacaaaaggcaatattttggctctttatgcaaattggtcacatgatattttaactccccaagaagttgtggacaagtatgaagtgcctcaagatttcaatgaaaaagaatattttaacctacggtgtctctcctttgattcacctacacatacggtggcgcagactccggggattagagcatttcagccgttggcccgagcggttcggtcatccctccgccgtaagaccaccgggatcgcttatctggtttcacgccgtctcttggattttaatctacttggcccccaaagctcgaaacattttctgcttagcccccgatataagaaaaatgtctttatctatttattttaattcagataaatgataaaagacaaaaaaatctgatg

SEQ ID NO: 33204 - DNA, 3003 bp, Unknown
  misc_feature (1)..( 3003): 2750-1469P.txt file - cDNA_ID_3066787; gDNA_ID_1620514; Annot_ID_159226
ttattttagttgatgtaataggtgacacaaacttattagcgtaataattttgatagtgatgtgttttaaatattgaactataaattaggttcgttgattttagaaggccaccaaacaaaacaagaaaaagttctgcttggcagagatatttcggctcttataatttacaccactttagaataaatccaaaatcaaagaaaagttatgtttcatgtggtcgattttgtcatctctactgtcttgattgttttaaacggtaaaaatagtaagtgaaaacaaatagaaaaaccgtaatttatgatcattctagtggatttctgttggtttagtttttttttttttttgggtgtgtttgttgttagtatatattatcagttagatttacagttaagtgatgttttttattggtttgcactttgcagctagtaaccaaaaaatatatatactataaactaattttcaattattgaagttgcttaatccgaactagaagaactccaaaaaggtatataatctgaatctgatcaaggtcaacaaaccggagagtcatattttatgttcaaaatttttgtgatacttgttgatacttcagcggtgacatattatattgagcaactcccaaacgtatgggaacattttgtgatacccgagttatataaaccaaaaatgtaagactaaatcagccattttttgtgcagtgacgtcgagacaccgaggttcacgttttggtaatacaacctattaacaaatacaaaatataaaagagacaattggagaagtttattatttaaaaagggtcaccggaacgaagaaagcgtgatggaaaatgaaagttcaactttagcttaaatgttaaattattatcacttatttgacaccttgccttacatttttattaatatatacaatttgtgtggcttacgagttgagattctttttcatctataatatgtaaataagtctttttcatgcttttagctaatggaccgactttatatctcacccatatgtttacaaaaatctaaacttgaagaattaaattattcatccaataaacttatatcaaagtctttaatattaaacttataataaaccatgagttaacgtaattacgtcaacaatataggctaaaaatgtgaatggcgaagttaaaatatagtacattttagtccaaccctaacagaaaacttagtctcttcgttttttttattatcaaattaattaattactcaaatacagtataaacaatcgatcatttgcataaatttgaccttgacatcgataataattaattttcacaagtaatattatacttattttgttatttatttatgttacacttgaaagagagcccaacgaagacttgcaagtaagttacaattttatttaccttgagcttaacgttgtagcggcaacaacagtaactaaggaaggtcgcagatcacttgcggatgtcattatcctattttgacacttaatcactactatacattatacaagaaaaaaaaactaaaaactcttttatcatactattaaatttgcgacatgtgtatatacatatataacacatgtgaaattaatgttaacgatgattaggtaagttttactgctatgtaaacttgtcggatttattatgttatcttatctttatcaaatttattgaaccattaataatgacagagatcaatttaatatgttatcttatctttatcaaatttattgaattaccatttataatgacagagatcaagctaataacgacttaactgctctgagatctacacttttggtaaagttagatagaaaatcaaaattaccaataaatattacataatgtatttttaagaaaatagtggttgaatttttatgagtgaaataatttgagggtgacacctaaaaatattgaaattgcaacatagaaatattttaaatagtaaaaccggtccatcggtagttgcctcacaacgggtcaatttcaaaaagatcaccgacagtggacctaacaaaactatcaaccctcagagttttattaaattacgaaattgccatatcattcctcgtgacctgtaccccgtacccaataagtaccacgaaaattgctaaatttaggaaaatcacttcttcttctttttttttttgaagaaacaacaaaattagaatacacggaaattaaaaagaaatcacattgcttataaaaacatttctcatcttcagatttttattttcctatccgtcttttctccgatcgctggatcttgaagatctctagattttctcatctctctctgttcacggactctgtgtagatagagttcgtctgtttttcggagttcttgtgagaatctagggtttttttcttaaatctcgatcgggttttggtttctgtgatttttttttaaaatttgtgattcgaagaattgccattttctttgattagtcatattttttaattgcgatctctacatagagatcatcgaggggtttttaaattgaattttttgaaattgacgaagacgatagagttgttgagcggtattgatcttttggtgtgaagacgatagagtttaaatttgatttgaagaggatgcaaaaaactcaggagaagaaggttggttgcttcttattcatcggaggaccttatgattcctttgttcttgacatacgatttttgataatttatttgctaatgctatgtttcagaacatgaaagagatggagtttttcactgagtatggtgatgctaatcgttatcggattcttgaagttattgggaaaggaagctatggagttgtatgtgcagctattgatacacaaacaggagagaaagttgctattaagaagattaatgatgtttttgagcatgtctctgatgctcttcgtattctccgtgaggttaagcttctacggcttcttaggcaccctgatatagttgaaatcaaaagtatcatgcttccgccttctaagagggagtttaaagatatatatgttgtttttgagctcatg

SEQ ID NO: 33205 - DNA, 3003 bp, Unknown
  misc_feature (1)..( 3003): 2750-1469P.txt file - cDNA_ID_3066793; gDNA_ID_1620514; Annot_ID_159222
tttatgttcctagaacttttagcaaattatctacctctatctttctctcttctttaagagaaaaaaaaatggagatatcagtttcttcggtaacattttcactagctgtagttgttgtgtcttggtgggtatggagaacgttaaagtgggtttggttcacaccaaagatgcttgagcgttccctgagaagacaaggtctttccggaacttcttacacgcctctaatcggcgattttaaaaagatgatcagcatgttcattgaggcaacatccaaacccatcaaaccaacagatgatatcacccctcgtgtcatgcctcatcccttgcaaatgctcaagactcatggtatccttccatagttcgcttcttgattcttctctgtttagaacttataacaaaactgttgcaaagtatctgatctatatataaacttttgtatctttattatgctcttggaacaggaaggactaacttaacatggtttggaccaataccaacaatcaccataatggatcctgagcaaatcaaggaagtgttcaacaaagtctatgacttccagaaggcgcatacgtttcctttaagcaaaatactaggcacgggactcgttagttatgatggcgataaatgggcgcaacaccgaagaatcatcaatccggctttccaccttgagaagatcaaggtttaaggctttatttctcagtcacatatcaagttgtattttttcatttggctcttctgacccaacttttgcgtggatctgcttctatctattatatatagaatatggtacatgtgttccacgaaagctgcagcgagcttgttggtgagtgggacaagttagtctcggataaagggtcctcatgtgaggtggacgtgtggcctgggcttacgagtatgactgcagatgtgatctcccgtactgcttttggtagcagctacagagaaggacacaggatatttgaactccaggcagaactagcacagctagtcatgcaagcttttcagaaattttttattcccggatatatgtaatgaaaaaactctacttgtctagctttaatatagtgcttttaaatctggattcttgatctttaacttttagtgctgcaatctattagagatatgacctgtgttgtcataatcatgtgcttattgtttgtgtagttatctcccaacaaagggtaatagaaggatgaaaacagcagccagagaaatccaagatatactgagagggatcattaacaaaagggaaagggcaagagaatctggagaagcaccaagcgaggatttgctaggtatacttcttgaatcaaacttggggcaaacggaagggaatggaatgagtaccgaggatatgatggaagaatgcaagttgttctatttggccgggcaagagacaacatcagtacttctggtttggacaatggttctgttgagccaacaccaagattggcaggctcgtgcacgagaggaagtgaagcaagtttttggcgataaacaacctgatacagaaggccttaaccaactcaaagttgtaagtataaaccaaattttttataaaacaaactttttcaaatgacttcactacttttgttgcattttgatgatttaagctgatccctcacagatgacgatgatattatatgaggtccttaggctttatcctcctgtagtccagctgacccgagccattcacaaagagatgaagctcggagatctgactttaccaggcggtgttcagatcagtctacctgttctgcttgtccatcgcgacacggagctgtggggaaacgatgcaggggagttcaagcctgagagattcaaagacggcctctcaaaagcaacaaagaaccaagtctccttctttccctttgcgtggggaccaaggatctgcattggccagaattttacattgcttgaggcaaagatggcaatgagtttgattctacagagattctccttcgagctttctccttcctatgttcacgcgccttacacaatcatcaccctttacccacagttcggagctcatcttatgctgcacaagctctaatcacataaccccttgttttgttatcaaataaactcattatctttttatgtatccaagtcagaactcgtgtcatagtttaataaaacccttcaagatgtgtcaaaccctggattgcaatataatcatcgactgttgcttgacacttcttttcaaacatcactaacaagagacaaactatgtctttattaactctgattcttcctccctaataattatgtgttgcaccaaaagatattagaccgaactcgtgtctctcaaactattatgaaaacttcccacattaacattaccaaaacacttggaattcatatctttatttgaaaagcaagacccgagatacagaaatgatcgaaatgaataatacagtctcacaacagaagaaactaaataaaacacttccagagatacagaacaaaaacaaagggaacagagagatatgtaacttttttttttattgaagtaaaatattataacaacccgttgaagaaatacagaacaaaaacaaagggaacagagagatttaaagtttactttttattttatgtcgacaaaacaaaatacttcaagttcaatgtttaggtaccaaaaaacccattgattggatggtggtggtaaatgacaaagacacgtcacaaagttgaagacgttcgtcccttgcccgccagtcaagttatgacttatgagagtcacataaccaatattaatatatctcctattttgtctacttttttttacagaagtccaaatttggttcttgcgccttcgtggcacgcaaaatatcgattacttcaaaagaattatatcaacacaaacactataaagtatataagacatcatcggtgatgtcatcaccacatccatatcttttccaaagttttcaaccttttattccccgaaattttttagcaaattctctacctctatctctctcttctctgggaggaaaaatg

SEQ ID NO: 33206 - DNA, 3003 bp, Unknown
  misc_feature (1)..( 3003): 2750-1469P.txt file - cDNA_ID_3066797; gDNA_ID_1620514; Annot_ID_159221
gagagttattttccctcctggtgtattcatcaacaagttgtacgctcgatctttccatataaaatatataatcaccttctccaccattgtatcctacaaaatcaatacaaaaacctctatcagatatactagttatactacaattctgggtaacacaagtataactagttatactacacatatctgtataatacagttataactaataatagtacatgtaaatgggtaatactactgtacctaagaaatactacatgtaaatggttaatactagtgcaactaagtcatactacatacatctggataaaactagagctacgggtaatactacatatatatttttcaattgaatcatgtgcaattctactcagttctaccagttgtatttcccgacaataactcaaatcgcatggtttcgggttcaaaactacaattcactctgattcagttgttgtaatccatttcttacccattttacagatctattcaacccaggcagtatgcataaacttccaatgtgcatacccaaacacaatttgcttaatctcaaatctaattgacaacaatctcctagttttctaggttcaaaacttcaatattaagctctatgcagctcgagtaagataccttttctttctatctcgacgcaactcgtcggagggagaggatacgacaacaatggcgactgaaatcaaatttcgatgatgagagcgatgagagctcgagcgagaagaagctgagaggagagagagaggagaggcaagagagagtcgagagagagtcgagagattttttttttcctgttttattttttttttcttttcaaaaactaaataatttaaaaatgaataaaataaagaaggagagggtaaattcgtcaactcacaattcattaatagagtgggggatatgaagacaaaaataggatacaagaggttagtgtttggcaaaaaaggagttataagattatttctcttataatttagactgaacgacgccgttcgaatagtttttttaatcattgtttttttccgttccaaactatgtcgtttgatcaaactcaatttgtgctaccaattattaatttgtgtcatacttatgctaagaccatgctaatcttcttcttttttcttttttgaagctaatgtactcggaggaacaatcgatatatccacttcaaaactgaagctatttctaggtgatttaagatttttaacatcgttaatgagtatttcatgggaagttcactataaattataaagtaaccctataattatggttattggtgagttaattatattcagtagcactttaaaaagaaatgtacgttcagtccagaacaattacagcttacgatcgaaatctgaaatcaaatcactctaactttaaaaaaaaaaaaaaaccttaaatgtgtaggtttttcttttggaatgaaaaagaataatccttgcgtaataagatagcaattgattgaaaaacaaaatagctcatgtcggcctatacactataatattctagacacgtccctttctgttggttgttaactaaaatagctcatggcggctattacaaaatgcaccacttgagatgactatgaaggtacaacaaaataaatatttgtcatatgtgagagcaaactaattggaaaaacaggatgagattgagatcataacaaatgagcaatactaaaatacactaaaccaggtttagtaaaccttatgtccttatcagagttttacgccattttatatagtttgtgtttttgagggagttgtatattatttctgacgttggagggatttagtagttttacttttcttttctttttttttgtcgttttacttttttttttgatatttctttatttcacgtttctatttaacttagagttttttttatatatttatgtttttagtttcttctctacatatataaaaattcttaagttatttgtaagatacgttttattatctaattaataaaagtaaagagttttttttctctaattggtagaatttcaagaatttcaatcctttcaagttcgacagtttgacataatacttgttattcctatcatagacataatgcttgttattcctagatattctaaatgtgtcaatttctcaaaacattgtaattctcaaatttaaatatgaaagtttttagttatttttcttttttgaaaaaaaactcttacggtgatcatcgacaattttgttacgatgatcgtaaaacaatattgttacgatgatcgacagtttttattcattatgatatattttagatattaataagaagcatatcctaagatctaagttaagaaaaatttagatattttatgtgattatttatcagttttaaatgaatatgttaaatttactttaatcagtgtttgtttagctaatgtgctgagaccggagagtgctaagatacaaggtctaaaagtaaaaaaataaaatatatagatattaatttatttttaataatagatattttaggtttttgtatatataacagcatttggtctataaaatatatgagcagggcctgactttaatgcaaaaacaacagtagcctatgtacatgtacaaaaaagtcgttttagtcaaatgtgaaaatcaaatgattttgtaattatttttgttttaaagaaatgtcaaaaagttgaagacgttcatgtcagagcatctttactggtgatatatccaatatggatgtctaaaacattttttatagttaacttattatatatttttttgtttggtcaacattatattatattttaatacgagtaactaagaaacaggatggagttaggcgagatgtcaaattttgtttattacggcttcgtggcaagggactgtgaaccacgacatcaggggtgatgtaatcaactaatcaccgcatccatatcttctccaaaagtttcaactttatgttcctagaacttttagcaaattatctacctctatctttctctcttctttaagagaaaaaaaaatg

SEQ ID NO: 33207 - DNA, 3003 bp, Unknown
  misc_feature (1)..( 3003): 2750-1469P.txt file - cDNA_ID_3066812; gDNA_ID_1620514; Annot_ID_159216
cctcttttcgtcgcttttcacacaaagtccaaatatgcttctgcgctttggtggcatgtgactgtgagggtccaagtaaagcaaaagatcaattaagcacaacaaaataattgtccaaaccaccaaaatataaaatataaaataatttgtgaccatcatcaccacatccatatcttctccgatattctaaaccctgagaatggtcacaaattctctaactctctctctctctctctagtagaaaacatggagatatcagttgcatcggtaacagtttctgtagctgtagttgttgtgtcgtggtgggtatggagaactttacagtgggtttggtttaaaccaaagatgcttgagagttacctgagaagacaaggtcttgctggaactccttacacgcctcttgtcggtgatttgaagaagaattttagcatgcgggctgaggcaagatccaaacccatcaacctaacggatgatatcacaccacgtatcgtaccttatccgttgcaaatgctcaagactcatggtatgcttccttgttggcatcttgattcctctttgtttagaactattgtagagtatctagaaaaggtttcaactttcgtatctctatgtggttgaaacagggaggactttctttacatggtttggagccataccaacaatcaccataatggatcctgagcaaatcacagaagtgctcaacaaagtttatgatttccagaaggcacatacgtttcctctgggcagattaatagccactggagtccttagttatgatggtgataaatgggcgaaacaccgaagaatcatcaacccggctttccaccttgagaagatcaaggtttaaaggctttatcttccatagtccccaatcagattagattgctttatgtatgtatgttcatttggctctgaaccaaattgtgccttctgcttctatgtatagaatatggtacctgcgttccaccagagctgcagcgagattgtttgcaaatgggacaagttagtgtcggataaagagtcatcatgtgaggtagatgtttggcctgggcttgtgagtatgactgcagatgtgatctcccgtactgcttttggcagcagctgcgtagaagggcagaggatatttgagctccaagcagaactagcacagctcatcattcaaacggttaggaaagctttcatccctggatataggtaatgaaaaactcaacttatctgatttaatataggtccttctgagcttgactcttgatcttaaaatgtcgcaatctattccttaaagatatgaaccgtgttaacattatctttctgccaatctttttctgtagttatctcccaacaaaaggtaacagaaggatgaaagcaaaagcaagagaaatccaagttatactgagagggatcgttaacaaaaggttaagggccagagaagctggtgaagcaccaaacgacgatttactgggaatacttcttgaatcgaatttggggcaaacgaaaggaaacggaatgagtaccgaggatctgatggaggagtgcaagttgttctatttcgtcgggcaagagacaacatcagtacttctggtttggacaatggttctgttaagtcaacaccaagattggcaggctcgtgcacgagaagaagtgaagcaagtgtttggcgataaagaacctgatgcagaaggactcaaccagctcaaagttgtaagtaaaagcaaatcataaacctcttggtgacttttgttgtgttttgatgatttttgatgaatgatttgatcccacgcagatgacgatgatattatatgaggtccttaggctatatcctccaatacctcagctgagcagagccattcacaaagagatggagcttggagatctgacactaccaggcggcgttctgatcaatctacctatccttctagtccaacgcgacacggagctgtggggaaacgatgcaggagagttcaagccagatagattcaaagacggtctctcaaaggcaacaaagaaccaagcctccttctttccttttgcgtggggatcgaggatctgcattggccagaattttgcattgcttgaggcaaagatggcaatggcattgatactccagagattctcctttgagctttctccttcctatgttcacgcaccttacacagtcttcaccattcacccacagttcggtgctcctcttatcatgcacaagctctaatcgttcgtagcaacccattttgttgttatcaaatatactttccattcacagatgaaacaattccatatcagtctacctataatgctagtccaacgcgacaccatgatgtgggaattcaagcctgagagattcaaagacggtctttcaaaggcaacaaagagccacgtctccttctttccatttgcatggggaccgaagatatgcatcggccagaattttgccatgttggaggcaaagatggcaatggcgttgattctacagagattctccttcgagctttctccttcctatgttcatgcgcctcaaatagtcgtcaccattcacccacagttcggtgcacatcttatcctgcgcaagctgtaattctagaatcccatgtgctcttgtcagataaacagaggaaaataaaccagatcatagtataaaactcaaatctttttattaattgaattcagaactttgtgctcacatatgtcttgacaaaccaaaatatttccaagaaaaagagtgaaacgcatggaccaatatatgtcttcctattttcgtcgcttttcacacgaagtccaaatttgcttcttgcgccttggtggcacgactgtgagggtccaagtaaagcaaaaattaattagtcattacaaaataattgcccaaaatatcaaaatataaagtatttaagacatcaggggtgatgtcatcaccacatccatatcttctccgaaattctaaacatttatacatcctgagaatggtcacaaattctctacctctctctctctctctctctggtagagaaaatg

SEQ ID NO: 33208 - DNA, 3003 bp, Unknown
  misc_feature (1)..( 3003): 2750-1469P.txt file - cDNA_ID_3066824; gDNA_ID_1620514; Annot_ID_159212
gtctgaacaaaacactggagttatcttcttttgaacatttttcaactttttttttgttctagatatgatacaatattaaggtgactcatctccaattttcgtcagtttccaaagttttgctgctttagtgtaatgttgcagaaagttcaaaactgtactatctcccactatcataaaccaatctgctttgtatgccaacgaccactaaactagcaacacttcattctcattcttgtatgaaactattctcgcaattccataaatgtcttcatctgcagtctggtttatgctacatgtccccggagctctcggcgtctgacacacacttcacccaaaaaggattgagagcagttcaattcatcatgctcagtggatcacttttcatgatttatcgattaaaaaaattgcaagtagacgagaacagatggaaaactcttacacgcaagtacacagaaaaagccccttttccggcaaaggatttggagtgtaacttgtataatcaaaactccagtgacagccaaaaagtctcaatctttataaagacccacaaaaacttgcggactccagagtgagtgtgagaatcggagatgtctttttcagtagtagcagctttaccggtgcttgtagcagtagtggtactgtggacatggcggatcgtgaagtgggtctggataaaaccaaagatgcttgagagttctttgaaaagacagggtcttaccggaactccttacactcctctcgtcggagatataaagaggaatgttgatatgatgatggaagcgagatctaaacccatcaatgtaacggatgatatcaccccacgtctccttcctcttgccttaaagatgctcaattctcacggtatagtgtcttttctttctttgtttcagcagagttgggaagtgaattgtgtagaatttagtttgacttgagatctctgttaggttgaattgttggtgcttgattgagttatgttggtggaacaggaaagactttcttcatatggattggaccacttccaacgattgtgataacgaatcctgagcagatcaaggaagtctttaataaagtcaacgactttgagaaagcttctacattccctttgatcagattgttagcaggtgggcttgcaagttacaagggagataaatgggcgagtcacaggaggatcatcaacccggcttttcacctcgaaaaaatcaaggttttggtttttttctgttgtttgaattacgttagactgtgcatatgtgtgtgtgatcgtttagtaaccttttgtttggtttacagaacatgatccctgcgttctaccattgttgcagcgaggttgtctgtcaatgggagaagctatttacagataaagaatcgcctcttgaagtcgatgtttggccttggcttgtgaatatgactgcggatgtcatctcacatactgcttttggaagtagctataaagaagggcagagaatatttcaactacaaggggaattggctgagcttatcgcacaagcttttaagaaatcttacatccctggatcgaggtaaaaccacgatctccattgtctctttgttctgttgcaaactaaagattttgagaatttgttgtttggtgtaggttttacccaacaaagagcaatagaaggatgaaagcaatagatagagaagtagacgtaatattgagaggtattgtgagcaaacgggagaaagcgagagaagctggagaaccagcaaacgatgatttgttggggatattgcttgaatccaattcagaggaatctcaaggaaatggaatgagcgtagaagatgtgatgaaagagtgcaagttgttttatttcgcgggacaagagacaacttcagtacttttggtgtggactatggttttattaagccatcaccaagactggcaagctcgcgcacgagaggaagtgatgcaagtactcggtgaaaataataaacctgatatggagtcccttaacaaccttaaagtcgtaagtgaagaaaacacaactttcaccattctcgtccatctaacaactgcgtttatagttaacaaagtcagttaaatttcaactgaaaggttgtctttgaatgttttttcaacagatgactatgatcttcaatgaggttttgaggctataccctccggtggctcagcttaaacgagttgtcaacaaagaaatgaagctcggagagttgacccttccagctggaattcaaatttacttaccaactattcttgtccagcgtgacaccgagctttggggcgatgatgcagcggattttaaacccgagcggttcagagacgggctctcaaaggcaacaaagaaccaggtctctttcttcccctttggatggggacctaggatttgcatcggtcagaattttgctatgttggaggcaaagatggcaatggctttgattctacaaaagttctccttcgagctctctccttcttatgttcacgcgcctcaaacagtcatgaccactcgtccccaattcggagctcatctaattctgcacaagctctgattttgtatatccatggatatgtcatcaaaagtctcatattatgtaacaaaaagatgtcatagaaagccctgtagccatatgttgtgaaattgtcaatatctttgtctgaaactagtcgctattctataaggtaaaagtcttcttcagtcaagtctaaggtcgttttctatcctggctgcattattaatcttgaaaagtctattccaagaagccaatttcaactctaccatctttagcatgtgttttagataagccaatcgttttttatgtcataggccagtggagaaagatttagcaaaaacataagtattttatggatttagataatctagaacattcgttgaattttcctctgcctcacactttaaaataacatcaaatctctatctatttatacaaacccttttcatctggcatcttcagttcagtaaaatagaagaaagcatctaacgaattttacaagtaagtgcgtttatg

SEQ ID NO: 33209 - DNA, 3003 bp, Unknown
  misc_feature (1)..( 3003): 2750-1469P.txt file - cDNA_ID_3066828; gDNA_ID_1620514; Annot_ID_159211
cttacaatttgacaaatgatttttttgcttagtattttgaacattgtggattcatttggaaacaaacatcagaatctcttatctcatctgccaaaatttctagctaaactgtagtttctcaaaaggattgtatcattattgcaacgtacacacaccacttggctgttctaaagctcgttttggttatctctagttttcatcaactatagtctttggtcgcaggttatgttgttaatggagtaagaccaacagaacacggtcgttgttgcggtatcggcattggctgggtattgtaagtgatctttatcatttatttttacctaacttctcttctcattacattcttgataatttttgagagttttttttggtttgatgtgtcttgaagattcatccttggtttcttcttcgctttgccctggtacatcggtttcttccttctattattctctaggaacccgcgtgagagaccaggatatatagcttgcgcagttggggtaagtccactactctatatatctctctcactcaacaagaaccatttctcttttctttatcacaaatataaatcaattctgactaacccttccttttcgcaggctgtttttgctaccattatcgtcatctttggaaccgtaagaggatcaggggtgtggtcatgaaggtgaagatgtcaacaatctgaatccgttgagattttgtttcagaagaagatcgatccataatgtttgtttacataatgtgtattgtctctagattacaaaacagtactgtatatgtttctttgaaaagttcttcttctgaaaacatactagtgtttgcattttcaaagaattttttttatataaaaaatttgcatttgtttagatgatacgaattcaaatgaatctgattataagctcatttagtaaatgtgtttgacctgaaccactgactcataaaaacacttgagctcatttgaccggcgacagtaaaaaagtaaatttaatttacccgatttacccgctgcaaatatttttgtaacgccaatgtaatgagaagaataattaaaggcccaagtaggaaaaagaaaagcccacagagacggcccctagggtttgtcctttagagaaacctcttttatagttttctcatgagcgccaccgtttagctcttttctctctgttttgctcttggctgattcgttggagcttgatctctccgtggaaatgggtggtttccgggtaagttacttctttagtctgtgtataggatacgtgattctgggtatttggacttctgaagatttgatttggagaatcatcaactgtgctcggtcggggatagtgtattataaggataaataggttctgattcgcttagaaagtatgaaactttttctatgtgcatccgttaaattaatatgaatttgaagtgtttatttccggatttggtttgttctgtatgaatctctaggatgattgttttagtgcttaatgtcttctaaaatgatcattgtgaatcattttaagcttcattagctatccttaggcccagagatcggtgttgtcttgtgactcactgagagagttgatatgatgtaaggattagggtctggtgctgtttaaggttttaccaaagctgatatttttgttggtttgtgattaattgattcaatgtacattgcagtttcaccagtatcaggtggttgggagagccctcccgacagagaacgatgagcaccctaagatctacaggatgaagctttggggtagaaatgaagtatgcgccaagtccaagttctggtgagccattcgatttgataccagtttgttaatgtaaactccattttgtcttgtttatttcctgatctaaaatggatttgctcgttgtatctaggtacttcatgaggaaactgaagaaggtgaagaaaagcaacggacagatgcttgccatcaatgaggtatggattgcattttacttagatatcttagatatgctgaaagatggctacttgtatctgatcttgttgttctactttattatagattttcgagaagaacccaacgaccatcaagaactacgggatctggttgcgttatcagagccgaactgggtaccacaacatgtacaaggagtaccgtgacacaacactcaatggtggagtggagcagatgtacactgagatggcttctcgtcatagagtgaggttcccttgcattcagatcatcaagactgcgactgtccctgcaaagctttgcaagagagagatcaccaagcagttccataactcgaagatcaagttccctcttgttttcaggaaggtcagaccaccaagcaggaagcttaagactacatacaaggcatcaaaacctaaccttttcatgtagaagcaaccgacatgattctcatcagaataggcttcttgttcctagtctgaacaaaacactggagttatcttcttttgaacatttttcaactttttttttgttctagatatgatacaatattaaggtgactcatctccaattttcgtcagtttccaaagttttgctgctttagtgtaatgttgcagaaagttcaaaactgtactatctcccactatcataaaccaatctgctttgtatgccaacgaccactaaactagcaacacttcattctcattcttgtatgaaactattctcgcaattccataaatgtcttcatctgcagtctggtttatgctacatgtccccggagctctcggcgtctgacacacacttcacccaaaaaggattgagagcagttcaattcatcatgctcagtggatcacttttcatgatttatcgattaaaaaaattgcaagtagacgagaacagatggaaaactcttacacgcaagtacacagaaaaagccccttttccggcaaaggatttggagtgtaacttgtataatcaaaactccagtgacagccaaaaagtctcaatctttataaagacccacaaaaacttgcggactccagagtgagtgtgagaatcggagatg

SEQ ID NO: 33210 - DNA, 3003 bp, Unknown
  misc_feature (1)..( 3003): 2750-1469P.txt file - cDNA_ID_3066832; gDNA_ID_1620514; Annot_ID_159210
agaagtgaacaacaaactagtccaaagattcttgcttttttttcttaaatccaaaggatcaaacaacaatctcatgaaacaaaaccatccgaaacgagtcgcacttcatgtgtgttggttaggaaaggacaaagaaacaagtaataagatgatttcagtttttgtttgttctcgtggattttgattagttagttcagagaaaaagacacagagacagaaccaaagaaaaaaaaaacatttcgatctaaatttactctgttttcttccgcgaagccaaagaaaaacgctgtcgttttttgaaaagcgaaacgcgtcaaccgcctgaaagagtgcaaacgtgtcagacacgtgtgaggagacaaggataaaggtcccactccaatgtcattgttcaattaatcgtgaattagacgatcctatccgttcatttttaaaagcattgatctgatggacggcttacaatttgacttgtttcatataatctcatctccatagaatatctacttttattagataacaatagctatctattctacattttatattaaaaataatgaaataattccactaaatggtcaacaaataatttaatattaaatgttattctaatctattgttatgtagaagaacaagtgggatatttttctatattcatctctctctttatctcttttattatataatcaaatatttttttgaacttgcataatcaaatattatgcatctcttatttgaacccaaaataaaaatgaaaatatgcaaattagaggtgcatgtcacttgttttaatagagaagaaaattgtcttttttaaaagtgaaaaattgaactaaaaagagtataatttataaggtgaataatagtggaaggtgcagtgtcaattgagaaagccattgcgactgtgacataaacattaaagccaatatgattaaacgatatatagttagagaatatagatacaagaaagaaattgaacaaaaaatttcatttccgtcggtgtttgtttttatatttaggaaaaaaaaagagaagcgaatgtttcccctgggattacgcaaatatcaaagattattataggaaaatctggttgaggaaagctgactaaccaccacataaaaagccacgtggcacatgcacttcccctagaaatacgaaactttaataagaagcatccagcaaaaccgaaatcttggttcaccaccgtctccagatcaaagaaaacagagaaacatctgtttttttgtttagtttgatctgttgagagatgacgagcggtggcgacgataaaaacagatctgtggtgacagatcatcaacatcaacaacagcctcctcctccgtttcaaggcgtctctaactatccaccgcagcagcagcctcccgccaccggttatcctcagcctgctcagccctacgcccaaggtttctttctttcctcatctctcattatatggacaacatcatcaaagctgtcgttttgttttgttttgtgttttgtttggtatagaagcttcattttattcttgatccattatatcgaagatcctttttgatcaactttttacctcatctaagatgctaagattcgcattggattaaaatttgattatttgaaaattcgagtgatccagtaattagagagaaattgtatattgcctcttctatgatataaatcaagatgctagattcacttgagaataatgacatgaagaaatgaatcttttttataaaaaaaaaaatcaggtttttgaaatagataatgcaaatagaaggttctcttttggcgtttacgtcttacaatttgacaaatgatttttttgcttagtattttgaacattgtggattcatttggaaacaaacatcagaatctcttatctcatctgccaaaatttctagctaaactgtagtttctcaaaaggattgtatcattattgcaacgtacacacaccacttggctgttctaaagctcgttttggttatctctagttttcatcaactatagtctttggtcgcaggttatgttgttaatggagtaagaccaacagaacacggtcgttgttgcggtatcggcattggctgggtattgtaagtgatctttatcatttatttttacctaacttctcttctcattacattcttgataatttttgagagttttttttggtttgatgtgtcttgaagattcatccttggtttcttcttcgctttgccctggtacatcggtttcttccttctattattctctaggaacccgcgtgagagaccaggatatatagcttgcgcagttggggtaagtccactactctatatatctctctcactcaacaagaaccatttctcttttctttatcacaaatataaatcaattctgactaacccttccttttcgcaggctgtttttgctaccattatcgtcatctttggaaccgtaagaggatcaggggtgtggtcatgaaggtgaagatgtcaacaatctgaatccgttgagattttgtttcagaagaagatcgatccataatgtttgtttacataatgtgtattgtctctagattacaaaacagtactgtatatgtttctttgaaaagttcttcttctgaaaacatactagtgtttgcattttcaaagaattttttttatataaaaaatttgcatttgtttagatgatacgaattcaaatgaatctgattataagctcatttagtaaatgtgtttgacctgaaccactgactcataaaaacacttgagctcatttgaccggcgacagtaaaaaagtaaatttaatttacccgatttacccgctgcaaatatttttgtaacgccaatgtaatgagaagaataattaaaggcccaagtaggaaaaagaaaagcccacagagacggcccctagggtttgtcctttagagaaacctcttttatagttttctcatgagcgccaccgtttagctcttttctctctgttttgctcttggctgattcgttggagcttgatctctccgtggaaatg

SEQ ID NO: 33211 - DNA, 3003 bp, Unknown
  misc_feature (1)..( 3003): 2750-1469P.txt file - cDNA_ID_3066837; gDNA_ID_1620514; Annot_ID_159206
gatttcgttgcaaaatgatgatgagatgatgaattggtgtacggaactttcttacatggatggtgtggtagatagtggtgttcttgagattgaaggtggtgattattattctcatattaactatgcactcacatttgaggaaccaactctttctctatggcaagagaataatgatgtagttatgtattgattgatttcgtgaagtcataatataacaaaggctgtttcgtaatccgttaacccccaaaaaaagaaggaataagaggctgtttcattaatctttaacaaattaaaaggaaagaagaaagggaggctgttttaatcagttatctaatcttttaaattttatgtatgtattcgtaaatgttatgtatgttgacgttacatgtttttatatatatatatatatattatgattgttgagaaagcaataccaatatacatagaattattttaaaagattctcgtgattatcaagactagcatgcatcaagatgtaactgtagcggccggatgcaaacatatgaaagttcaaatgttttttgttttttgtttttaatgattaatgtttttacaaagtatattttaaccataatataacttgatgtaaaaaaacatgatcgtgctaattacggtaacttttaggaagtttttttttctccctttctatccaatgaatacccgttgacgatagccagaactacaaatttgtacattttgttgaatagaaatagtcgaatatttaaatggtataaaattaaaagaaatttgaaacgacattagccattgaattcccaccaaaatatttattggattttgttattcatgaatcatgattacataatggatgcatattcgcataattaatttatgataaaaaggggtagactctagaggcatgtccactgtcatatcaaatgatagtaacataacttacataagtgatcaaatgggctggtttatttgagactcttggtgtggaatgaatgaatttggttatagaatcttgaacgtaatcataatttctgagtgaaaatcatgtttattttcatagcaaaaaaaaaaaatcatgtttattgactttagaaatatacataacaacttcttttttttttttttggtaatgagagctttttttttgtcggcaacatgaaatacgggagtttggattcagatcgtgacacataaacaatatccgtacatagtgctgattggaggtgaaagtttttttttaataaaattttaaaccataagatattaaaaatttattggataaagatgatttgaaaactaaaaagggttaaagcatagtatattgatttgcttataaactgcataacataacataaggcccactttaaccaaaacataaggcccataagatatgggcttttgattaaacatagtggtggatatactcaaaagtccatttctatatatcaggcacagacatcagctcatcacactaaatagtgatacacacttttggttagtagttcgtaactagcatcaattaagcttcactacaggcctatcacctttttttttttcgggaggcctatcacctatgcattcattatacaccggttaatgtatagaaattaaattattgtttccagtacatcaattatccataaatctagtggctatttttagaatataggttgttgaataaataacgtaggagtaattttaagacaaacaataaaaatacaaaaagaaaacttgagtttggtggtgttttttaaaaaaagaattggttttgatttgtacaccaagttatttttgtatagtcctttagtatattcttagtgactaagaaatagatacaaatgcacatcaagtatatgctttatattccaattcattagaaaaagatttggctgctttacagtgaataaactttttcaatgttttttcttttcccatgcacgttgatggtgtagattaacaaacacttttttttttcccatcaacaaaactagtaaaactacatgtgccaaaatgcctgtttctgcttatcttattaactttcactttaattaagtatgtaatttgtttgtttcggagaaaaaagcttacttaattaaaaagctaagctttccaactttaatctttctgacatttaagaccaattatgcaaactaattaacacttccctctattgattgatttaatataataaataataaatctcaactttcttctatatgaatatgacaatgatttcaaggatttaatcacatcatgtactaataaaaatttggacctactacttacaagttacaattaggaatccaaattacatttcttccaaaatcgaggtttattattattttattttgtttgtatgtgaattaattaacccaattagactaataaaaaaagccggtcaatatttatatttcttccaaatatactatatcacctatttataaattactaaaagagctctatgacgtaactttaaatagcaaaaggctacagtaaagtgaaaataaattgtttcacatatccaacgatgaaaaaaaatgacaaaaaaataatcatggtttttttaaaacaaaaattcgccgcaaattctattactgtaaatcaagaattttatcatctatctaactcctaaatttttttaaaaagaatattttctaaaagttttctctagttattaaaatacatattgttattgttactgagaaataaataaatccatataataaattaacctatagttttccctctcaaaaaagaacggccaactaaataaaagaaagcaaaaagccaaaaagaggaaatcgcacccattcatcattctctcttcaaaaaattccgccatggaaactaacctcactaagcaatttcctctttatataactccttccttctccactcctctcttccctccttccgatgcttccctccaaaaccccaccgacgacctaatccctagaacacgaatcagcttaattcgtctgattctgattgattttctcccaaaacatg

SEQ ID NO: 33212 - DNA, 3000 bp, Unknown; identical to SEQ ID NO: 2283
  misc_feature (1)..( 3000): 2750-1469P.txt file - cDNA_ID_3066879; gDNA_ID_1620515; Annot_ID_159243

SEQ ID NO: 33213 - DNA, 3000 bp, Unknown
  misc_feature (1)..( 3000): 2750-1469P.txt file - cDNA_ID_3066883; gDNA_ID_1620515; Annot_ID_159240
ggtgtcagtttccgaggttaaacctaaaaacctcggggttcgacctggggaagctctagccgtaaactttgcctttgtgcttcatcatatgccagacgaaagcgtgagcaccgagaatcaccggtatagtttttattattaaaatttgtttacacgtaggatgagtcttttgtttagtcctttgactaagttgaatataatttgcagcgaccggttattgagaatggtgaagagcttatctcccaaggtggtgactcttgtggaacaagagtcaaacacaaacacagccgctttcttcccgaggttcatggagacaatgaactactatgccgcgatgtttgagtcaattgatgtgactctaccaagagatcacaaacagaggattaatgtggagcaacattgtctagcaagagatgtcgtgaacatcatcgcatgtgaaggagctgatcgggtggagcgacacgagctcctaggaaaatggaggtcacggtttgggatggcgggtttcactccttacccgttgagtcccttggtgaattcaaccattaaaagtctgcttaggaactactcagacaagtacaggctagaagaaagagatggagctttgtatcttggttggatgcatcgagatttggttgcctcgtgtgcttggaaatgagacagtgacatttctctagtgtgatggcaattaatgtgtttctacttgtatgcaatttagtcgctcatttgaatcttcaaaacatttgaagaatcttatgtttactactagagaccaagagtgtgcacaattgctcaaatgtcaaagtcaactctttcctcaatcaaaatttaagtatgtagttcacacgaatggatctttgtaataatgtaatatatgaaatcaatctagtttcaataaaattacaaaatagtcttttcatacttttgtgacatcgcagcgacttcaataattttgagagagaacacgtgtaaatgtctctttcgcagtgtgtctgaatttaatttgacacctacttttaatcttttatatatcatcattaataataatcttcgacatatattgattagagggagtgaaaccaataaccctacgcgactaaagaaaagcatatatgaacacaacaatggtttcttatgagaaatattaaattcttataagaaaaggactacgtattgaactatacatacgaactagacctaaaatttcttcattaacataatcaaaaatataaaatatattcttagaatataatttaaattttgtaaaaatgttgtttgttgaatataattttacattcaattcaaaaagaaaaagaaaaagaaaaaatcttcaaaatttttattttttaattttcttataattgaatccttaccaattatgtaattttggttactcattgcgatcattccatattggtcgatctctaattcttgatctcatttggtcttctaccacctacgaaaaactcataaatgttaattttgacccttatagaatatagcgtgatctatgtatgcaacaacatttaggtaatctcatgataacattaagtttgacgcggctgtagattgatgccggaaaatcaatcccaataatttctctcacgctttggcttgcttgggacttgggagtcaaagtataaagttttgtcagtgtgttttgcgcctcagttctaaaccaaacttacaattagtcaaactgttgcacgtttttttgttacgcttgtctagtaaatcagaacaataactgtctcctcggggatatctccccaacttttccgattcttcacaaaaagtaagcttgaatgaggagaatagacgagtacgaagactatgtagtatgtcacgaagatataagagcaccaaccatgcatatcaatattttattttgtaaccacatgatttaagatacttatttccaaaaattaatattaatttctttttttttgataaaaggcttatataaataaatttctatataattaaatatttactttttgaaatgtatttcatcaacatatcagatttattggagtatatatatgtatgctataaaacttttaatcatgattataagattattatgttgttctaatttaatctaattttgataaacctttctcgtattttaatttatcatgttaataaaattatataaaatgattagatccttaagattctactcaagactcgttagatgtttttttcattgtagtagttaacctctagacattgagtttcaattaggagctatttgtttgtaacatccctaacgaatttttttaagtgtaccccaagccaatggaaacaaccatcagtccaatatagaactctctctcaatttacagttgccttctaatctctccaacctatttttatatagttatgactcctaacgtaaccagaaaaagagcttgcaacagaccacacatatactccacagatctcacaatcgatatttaggcctcattacgtctggaaatagtcttttttttttttcttctaaaaatgaaatccaaaaatatcgtttaaacaagctgaaaagtgaatggtggagaagaaagtggaactttcaaatctctctcctcctagatactatataatggtagcaaaacatagaaacaaaacataaaaaataaaaaatactgtaaaataaatagatagtcataactagtgtattacaaaaaaaaaataaagtaaataaaagtaatcactagctagtgactaaactaaatcccaattatgggtcgtgtacattttggtgtatcagcattctttgttttttgtttgttaggtttatcagctaatgcaaagatcttcaatattaattctcctccaggttctgatatcactaacgtcagttctaaaacctaacaacaatctcgtttatctatacattttcttcttgttctccaagtaatttttaatatctttacgatgtaggcattgttgaaagcattcaatgaggcatgccaattcccgacaaagagcaccgttatg

SEQ ID NO: 33214 - DNA, 3000 bp, Unknown; identical to SEQ ID NO: 2297
  misc_feature (1)..( 3000): 2750-1469P.txt file - cDNA_ID_3066909; gDNA_ID_1620516; Annot_ID_159283

SEQ ID NO: 33215 - DNA, 3003 bp, Unknown
  misc_feature (1)..( 3003): 2750-1469P.txt file - cDNA_ID_3066924; gDNA_ID_1620516; Annot_ID_159300
accactcaagatctaactcacactgatctcttcaagaacgcattaaacgaagtcatgcaattgatcaagatggtaaaataacatctctctttcactctcttacgcacgccttcaagctattctcttgattctcatttttttgtgctcatgaatttgaagaacttggtaagagattactggtcatccatctacttcatcaagttcaaagaagaagaaagctgccacgaggcaatgcataaggaaggatacagtttttcatctccaagactgagttcagttcaaggctctgatgatcctttctatcaagaacatatgtcaaagagttccagatgcagtagtcccggttaaggagtctaaaactggtactagaccagaacccaaaccaatgttcatagcaatccaatccatgtaatcttccttcacatttcttgtacatgtcattttctctcttgttatacctaactgtaagagaaaatgtccggttcggattttggtttagttttaaatgtgtataccggacaaaaactatggaaccatactaattaatatctcgaagaatttatacgtatatgccatctgtttcaccaagaataaaaaagcacctgcagattgatcttcatgtccttgcagagtgatgatgttgcatcacatgtttcatgatgtgatgacatatccattggcctcgctaaggcttttcatcaacattttgacataatgtttttttccaccactatattttgacgtgtacaacatctataacgagaaggtgggatggtcatcaaatatttcaattttagaatataatttgttactgaaaagagaaagttgaagaattttttaggtttatcatatgattaaatgatattaaaagttttaaatatctataaaatataaaattaaatattgttgagcagcaataaaatgtctttaggtaagtttttaaaaaaaaaaatcatctgttaccatttaagctctaaattattcagtaaaattctgcaagaaatgtcaattaaaccctaaattcagtaacttagccagatttattctgctgttaacatataaaaattaaatgttcaaaaaataaaacttatatgtgtaggtaagaagtcttgtcagcgaatgaaaaaaaagtttaaattaatgtttcattattatggtgaatctttcccaaatattagtggttctcatctcaccataaataaatattatttcccaaagaagttttttttattttatttttggctgtctaccatatggttttggtatatatatgggtagcaattattgggtgttgtcgatgttctctccaagatagtttataaaactaaaaggaatctttatcagtttatctttcaccaaattagttaatttcaatatatttttttggttaaattgtttagcttatggggaattctctaaatagtaattacatctattttctgttccaagactattatgaataaattttcgaaaatgctacaaattagttgtgataatgttatttccttttcattcttatatctcaatcttaatatcttcattctatctttgtttaaaactcaaactaaaatgaaaactctataacatctagacatgaaaactctcactaaaatgaatttaacaaaatttacttctattttcggtgaaaataatactccttataaacatgaaaaagaatgaggatgtcatcatagtggataactatgtaaggactcatgagtaatataatcaaattattagcagatattaataaactactataaagatccgttggatagatagatagataacttgttctaccactcaaaccaagttttggatgcacacgtctatatacacacataacacatgcatacatgtattgatcatcatgatgttatattccattacaatcaaacatatatgtgacatataatcacaaattttcttataatttgttatgttatttactgagaaagagatctgatcgctttataagtccgcataaagagacaccacaactttctttcttcttcattcacttctatcaacgccaaatttgcagactttcccaggaccaaaattatattaaaaaaaagttccttttttctgatcaaattgtgaaattcgcttgcttgctttcttcacagtcaattaattctctaacaaaacattcttcgatcgttcgttttcatcttctatgcttctctgatcagacacaagaacacaaccaaagaaactcactatagcttgtctgtagattctgatgttcgaattcttgttgttgatgatgattgaattgatgatgatgatggtttgatgcagatgggttttcaaaaatctcatcttttttcttaacaagtaatcatttttatccatctcaagtctctgttgaattttctatgattttgtctctgattgtgaatctgggtaatgatcaaactgtagtattagttactaacatttccccaaatggattgatctctctgatgtgtttgtttggtcaatcaaaattgatttctgggttttctgttgtgatcatggtaaggtcaaaagttttgagtttccgtgtgcagaggagaaggagtagtcctttgcgtgtgacaaactgttttcttattatcttccgtatcagatccaatctttctttaagattcctttttcatctttatagaataattcattgttgattcctacacttctcttccaagttttcttctttcattcttggttgatttgatttgattgattcacagattctttctctgttcttcattagtcaaaaggtttcaccttttctagtttctgtttataacaattgattatgatttggaaccttacttagtttctgtttcttatgtagatcaaaaagcttagaacttgttgaacaatactagagactagagaatttgcaggtaagtttttggggatcttgttctgtttgttttctcatatttcaggctaatcagagtgtgactttcttgtcttaatttgtggttttgtagataatctgtttcaaaaatg

SEQ ID NO: 33216 - DNA, 3003 bp, Unknown
  misc_feature (1)..( 3003): 2750-1469P.txt file - cDNA_ID_3066931; gDNA_ID_1620516; Annot_ID_159296
aagaagctaacaaagatttttcagttttcagtttctcagcgaaaccaccagatttggggataaaattagggtttttcgatctccagagaaaacaaaaaaaatgggagaatcaatttgtcttgtgagatctttctcgcaaccttcagagttttcatcgcgtgaaatcaacgaggttagtgcttaagatttctaaatctacaatcttggatttagggttttgataatagagattgattttgctagtgaaatttctgtgtatagtgtgttgtttgatgaatctgaagagaatttgagatttggtttttggtttttggcaggtggtaccgaatcgagtgcttacggaatcagtatcgtttggtagatatgcgaatgaaacactagcgtgggcgagatggtcagcttttactcagaatcgttacttggaagaggttgagaggtttactaaacctggttctgtagcagagaagaaagctttctttgaagctcatttcaagaaccgagcttcagggaaagcagcaacacagacgaagaagattgaacaagtaaaggttaaagatagtgttgagattgtttgtgatatacctaaggatattctcgttgattcagaagtaccactagcggtgaatagagaggtgtctagtaatgaggtggactctgttgttccatcaatttctgtaatagatgaaactggtaaagtggagaacttgaagtcagtggttgttcctgatgaggtaaatgcatttctgttacattgcaatttcctgtttttattttttctctctaaacgtccatggtgttttcagggcaattctacttctttgagcaaagaaagacctcctagttcttccggatcgaaggtctcaagctcaaaactggaatcttccgttgttatagaactggatcattcacttaagaacactaaaaaagagtcatcctcgagtagtacaaggtcacttagtgcatcgaagaaccgaagtagatcacctcctgagcccattcacatgtcaatcagctgtgtttcttctagtaataccgagaaaactattgtggggaggccccagaacggttctaggagtgcagtgaaagcagacaagaagaagagatcaggtccaagttcagttcacatgtcactcaattttgcttcttctactcttcgtacgaccaaagaagccccaaaaacactggcaagaaactccactacacagggaacaacttcaacaaatgctagaaacaaacttttcccaaagataaacgaaccaacgggagctttaaaaagctgcaagagaccattgtctcagacatccaaagacggttcaaccaatgtaattctcttcccaagtttctcttcttgcgtatatcccaagcatatttgctgagactgactcttacatatattgcaggcctctgctgtcacgttacccagacttcctcttctcagtaatctgctatcagaaaacaaaaggttactgatcaaaccatcttcaacaccaattcatcgctttatactattactttattattaactcaaccctataattaactttgcttcttctgatatacaggaaaaacatatctgtaaggagttcagtttcatgtagaatatccaacaatgagcaaagaaaaccttctgtcgggtaagcggtttaagtaccaacctcttagagaaatactatcttatgtcacttactgcaaatggcctgagttggttaattgaaagtgtttgtgttagttccctgatttatgtggacataagacgagatgtttttgtctaatgcattttgcagctgtgaaaatctgtcaactcatagcagaaccaaagcaaagtctttgactgtatcttctcccttcgtcttcagaagtgatgaaagggcagagaagaggaaagaggtagaactaaagaagatccttttactttatctttgagattatttgaggacttatagagccgtagtttaaaaaagatctcttttgttgtggatgtgtcttgtctgttagttcttcaagaaagtagaggaaaaaaacaagaaagagaaagaggataaattttcttgcggcttcaaggcaaatcaaaacactaacttagcatctgaagaacacaagaacccacaagttggtggttttcaggtatattcaactctcagactgtaacttgtcataaatttgggtattgaatctttgatgtatgacattataatcatgtgcaggtaacaccgatgaccctgacttcaccaagattccgcaggaaccaaactccaggaaaagagaacataaaaaaacctcatcaaactcctcataaagcttcctcaatgaagatcatcaacaccaaaaaagtagtcatggagaagcacaaaagcagcaagatccatccctcctccaaacagcagacaacaaaaagaactcaagaaaatatgtctcctaatattcttcagaactaaccagagacaaaccagatcaatcgattcctcttcttcaagtctctagatcatcgtaaagattcgacttttcactttgaagattccgaaagttttgtcccttcagctagtaatctcatctcaagcttatggtttaggtgactagcccttgattcagattgtgtaaccacaagcttttaaggagctgtgtagaatagatagaactcaagtctacttactcttcaaagtaactatgtactcaatagttctgtagtatcaatcttgtatcatttgtatacatagagatttgaaataaagaattatgtctacttttcaatttctcattgtgtttctttcttgaattagtatagacaggaacatggcaaagctttctgttttacatttgttttaaacgacgacgttttggtatgatgttgtgatgttgtgttgttgtggtgtgggcctctcgtttcagaggtgagagaaaaaatcttatctctgtggactgtgattgtgtgatgtttccatatcttcagcttttcttctactacatgctctaatcacgtccttgtagaggaaaagaaaaaaaatg

SEQ ID NO: 33217 - DNA, 3003 bp, Unknown
  misc_feature (1)..( 3003): 2750-1469P.txt file - cDNA_ID_3066933; gDNA_ID_1620516; Annot_ID_159294
cccataaggtcttgagaagagaagtcgcccataataaggtttggacaaaaaaaattaagtcattggagtcgtcgtctgtctttcccatattagggtcttcttcttccttttactcctttttttacgcttgaagcttcttctcttttcttcttttcttctcattgaagctttccttgttgcaggatttaatttaggattcacaattccaacacatacaaattgtttaaaaaatacaataagtcataaagtcagaatacgttaaacattgaaaatgtgaagtataatatttggttttctcttcttgttttttcacaagttaagaagtgtctgaaaaatagtcatggcttcttctcaaaaggtttctgattgggccttatgaggtattgagaaaagagaagtagcccattaaggtattgagaaaaagagaagtagcccattaggtcttgagcaaaaaaagaagttgagtcgagcaagcaagagtccctgactcagtcctcttttctcagctgtccagaaagtagaaaccctaaattcgaaaatggaaacacgaaatcgaaccatacatctcactgatgcgatatggacggagattctagcgaggttaccactgagaatcatcgctagattcaaatcggtaagcaaaacatggaaatcaacaatcgaatcagtctatttccgccgtctctttgtgtctgtgcaccgaaaatcctcaacctcgtggtcgctaatgtggtacggacaaaaagatctcgtaggtttccatggatgcgagacatggggtcttccaaagtctctatctttttacatcccatcgtctctttgtattatcgagggttcctcccatggattggttttgatttcagaaaatgatgatgattgttgctttgtgggtaatccagttttacaacagtggatcaaaatccctccacctccagttcactcttcagtgtttggtttggtgtctcgcgtcgacgatgatggctttgttttgggcttcaaagtcgttaagttagctgaagtaatagtgacgaataactatgtctcgtgttctttgagtgtgtttgtgtattcctctgagactgggatttggacttgtaagactattcactgcccttatcaaatcaccaactttggttctttcactttggatggtaccatttactttgaccatcttagtgaacctggagtgctcgtagcttatgatttctattctgaaatctccgatcagttttgggttatacctctcccggatcatccgaatcacggcttcaatagcgacttcaaaggtgctttgactacgtcccaaggatttgtcatgtatatcagaacattagctcaatcttcgtctaatgttttcaaggcttggaggttgaacaatgattcaacttggcaacttttgtggaaaatcggcctcccgtcacttatcggtgattatgtacctatggcaatgcatccatttgatagtgacattgtccatctttggagtcaagatcatcgtcatgtggtatcatggaacttgcggactcagaagaatagaatcctcggagctgaagataatgatgaagatcataaagattgttacttgaaccagcctgtttgtgaggagtgtatggatgagatatgcggctgtaaagcttctgtcaggttactacaacttgttctcccacggtggatggaatcggtgccttgtcctccccaagttgagatgatgaatacagcttcggtaatctcttacgttacttcaatgcaagagacaatgataaggaattggcttcatcaatgatttcaatatctgcttttttttcttttctcgtcttttggtttctttcttctatctagtaccatctatgtaatggaagacaaccatatccatatcatgcaatatttgcatcttcttatttttgtatcagttcaatgacatgttttgccatttcatctttctaagttgttacacaaattgtcacttcctttgaacaagagtttcttcaattgcagttttattccagccgcacgtagtttcttaaagatatgttattcgatagctttaccatatgtactagcaaaacgaactaaacgacggcgtacgtagcgtaaagtagtgcccgcttcaaaatttcgtaatcaaaaaacacaagaagacttggtagcccaatccacataattaaatactattttaaaacaaataaattaattaaaaaaataaagtagcaaaaaagtacgatcgatgaaactgagaccgttggatcaaacctatcgaattataaaaactagatcacgagaataataaaaagaaaaagaaaaaaataaagcagaaaattcatctccaaaaaaaaagaaagaaaaattcatacttccaaaggaaaggggaagaaaaacaaaaacaaaaaaatctcaagtcaacaaacaacaacgaaggtccgaagaactttgaatgttgttatcatcatcatcataatcagaatcatcaacatcatcgttgtattcttttctgggtattttctcttgttgaccttctaattatgccatctccgattatcgatttttgtagagcaatcgtattttatcgaagcccttgtttctggttttagtctcttgtctgaaatcaatctcaaaaaggttctgttttttcggggaaatgtgcagcttttgattgtttcattttccgattgtttcagaagaactggaatcgccgtaaagttcgaatttttttttgttagattgtacaaaagggtgttgtgattaaggaagaagaagaagaagaagataaaaaggttttttttttggctgttgttgtaatctgggaaagtttgggattttgtatcgatctcaggtttgtgatttgattctgtttctaaaatttattaggctgatctaggatttgagtttttttttatatggactttgctttttttctcagatggtgaaaagacgaagaagtgtgattgttttggggatatgattaaagaacctgaattgttctggtgttgagaataagaaactatg

SEQ ID NO: 33218 - DNA, 3000 bp, Unknown; identical to SEQ ID NO: 2295
  misc_feature (1)..( 3000): 2750-1469P.txt file - cDNA_ID_3066948; gDNA_ID_1620516; Annot_ID_159284

SEQ ID NO: 33219 - DNA, 3003 bp, Unknown
  misc_feature (1)..( 3003): 2750-1469P.txt file - cDNA_ID_3066958; gDNA_ID_1620516; Annot_ID_159277
gaattatggatatacattgaattgaacgtgcatattcattttgtttttgttttttcaacaaattaaaatgaattctaagatgtttttgtttttttgttaattgaattcttaagatgttgacagaaaataaattgaagtcttaagaataattgatttgagattttaagacttgtacttttctttggagattggagatttgacatgctcgaagtcgatgtatacaatttggttttttatcaagtgtcattctcattcgatggagctttttttttatcaaaaacgtggaaattagtgatttctaatgatctgaaataaaaattgggtttacttccatggtttttttttggacaaaggggtttacttacgatcaagcaatcaattacatagttattctggattagtcatttggtaatatttagcatcttatgaagaatcttaaacacgtccattatacaactaaatatgttgcaccatttgatggaaaaaaaatatgttgcaccaaaaaaatgatccaagatgttgaaacttgaaagaaaaaatcgaataataataacaaataggctttctggctttctatgttactgaaaggcccaatgcacgtaaacggagagcccacattacaaattaataatttttgttgggctagtgagaccataacgctatcatacgttgtaaatctgtacagcaagttaacaattacaataataatcagattttacactcttttatagataagtcatggtcaagactcaagagtcaagagtcaagaccaacaatcaatggcctagcttgtacaacaaaagacttaaggctatatagttttaatcaattagagtcacataattcacaaatatcaacgattatacaacggttgttattgagtagttaaaacatggttgatatagattagtgagaaaatattgattggttgacaatatatgaaagtgaaattatcaaaatgatattatacataagtttttaaaatatatccaaactcatttttattataattagaaactttttaaaaaatatagaccgtatgtgatctatttttatgaaacttaataacaaaatttatttgaaaatattagattgtaaaaaaataattattcattctgtagtttccggttaaaaaatgtgcagaaagatgagtttttagtttgtgggttcagtaacattataagctaatatttttttattagttgattacatattattcaaggattacatatgttgatgaatcctttaatttactcgtgttaacaataatccgtaattttttaagacgtgagggatacataggagagatttccatcgagatgcatggttgtttttgattccctcactcctgataagataaactagaatacgtttcgacgtcaaaatatttaaagatttgcttaactgaaaaataaagagaattttgtggaataggtcagaactatatttttaaattagctaaaggatatttttaatataattttgttaatggtcaaaaagacctaaaaaaaattcttaacaaaaaaaataaagagaatttggtaaaataggatagttttatgtttttcaataagtaaaatggactatttatgttttaaattatctaaacggtaatttatatagtttgaaagtagtataaaaaatattctgattcgttgctaatcgttctaaagtgctcaacaactacaacgaacgaccaagtccctttttccccgtttaggaaatgatgatgttaacttgtaaatatttttaaaatggttgaacaaatactgtataacctacttggattcaatgtgtcaattgttttactgcagaattcaaaaatgagtcaggattcgaacaaatgtaaatgataaaatatatggttgatattaaaatgttgcaatagcggcgaagccatgccacattgccacatatgctttgcttcaaagtcaagacacaagaaatgtgcatcgttgacccaccaaacaatattatgccggagagttgtagttcttttcaacattcaaagatcgaatagacaaattaaggcttccaatatatatatatatatatatatataaataaagacaaatatctcaaataaaggactcataattcttataaaaactatattataaacgtaagaaaaagaagaaggagaatgtgaaaagctctatttcgattagtattttgtaaactttataaacaaaatgatatgtttctctaacaaatactttaagaatgaactttgatagtttggctatgactttaagatatatatacctttcacatgactgaacgtatatagtagctttgaaaacaactaagaacaacttttttgcacatgttaatgttatcggtttctattaaattccataataaataaaaattgttttcttcatgcctgcatttacggctacatctttgccacacctgttaaatattcttggtcgataatatttgattcattttttgatccctttcatattttgtttccatgacgtctaaatacatatgtaatcgaacataagaaaattccatttcttaactataaaatcctttacatattttgtgtagctaatttagtaggtaaattaaaagttaatgtaggcatgtttaatatgttttcgattaaaaaataaacgtaagaaaattctattttatatgtttgacggtggaaaataaattgcgaaaaggcgaattaatttaatttattccgtcggcaaagttgaaattatgaataacatttaatatttacagattagagaaacgcgtcaacacaaaagattatattcggacgaaataatttaatttatttgacctttattgggcctaaaccgaagcccattatccaaacatataagtgtagagggaaacatgaagcatccgttgtatttttgatagggaagaaaaaaaaacacaaaagcggcgttgatttttttagattttccgacaagatttctcgtgagaagatttgtctgaatctttctttcgaagaggttttgagttaatttcaaaatg

SEQ ID NO: 33220 - DNA, 3000 bp, Unknown; identical to SEQ ID NO: 2298
  misc_feature (1)..( 3000): 2750-1469P.txt file - cDNA_ID_3066963; gDNA_ID_1620516; Annot_ID_159273

SEQ ID NO: 33221 - DNA, 3000 bp, Unknown; identical to SEQ ID NO: 2304
  misc_feature (1)..( 3000): 2750-1469P.txt file - cDNA_ID_3066988; gDNA_ID_1620517; Annot_ID_159327

SEQ ID NO: 33222 - DNA, 3003 bp, Unknown
  misc_feature (1)..( 3003): 2750-1469P.txt file - cDNA_ID_3066992; gDNA_ID_1620517; Annot_ID_159325
cggttggggtctagaactcacacaatctgatggcggagttgagactaaagctgccgtcagcggcggcggtatgccgggattctgcccaagcccggacgttgatacgaaagccgacaatttcattgccaggcttagagatgagtggaggctcgataagatcaattccgtgaatagaaagaggtaactgggctttttaaggcctattattaggcccattacgaaaacggcgtaggtttcaacctcttatgccctgcaaggctgtgcaatgcacaaggatctcatacgagaaacatcttcaagggaagtcggtaaaaattgttggagatattttatatttgattggcgaaattcgttgtgattttaagcaatgtgcagcaaggactcgagttcaaaagttacgggtaatattggcattattggtatagttattagtggtaaatggtttcaaactggctggttagttttttgggtttaaccggttgagggattttgctttggtgtgttttgattattcggtttgaactttggagtgtcagatgaaaactcaataacttcggtgttgaatgttttatattttggttggtacgcattgatgtatgtacaatgtatggcccattgatatgaaaatatagttgtgggctctgagttttgttgggcctacctcttgtgacctttccctctcccttacaagcaattcttcttcaagttggttgatgattgtcataatgactggttgtcgtatgtatctctaagaataaattcatttgtgtgttgagtgagattcttatagcttactagtaatatgtatatgatatgtcaactgaattcatgttttgcaaggatatcattaccagtaccgaatgatgtgacatatctgatgaggtttgaggtattgaactctcatgattgtcaagtgatggtcttgaagcttataaacgatcctcaaaaaagtgttttgatatttccataattctttagagtagcttgaccttattatataattcaaaactttggccttagataatgagattcaggcagggaggtgacgtgttactcacgcgcgagagctgcgcgttcaaatcataaaaagccgacttgctataaaagcaaacttgttgatgatggttcaaaatttcgaaaagcttttcaaatttctcttcatatcgcgcgctcagtcaaaaagcagagccaaagatgaagaaaccgtataaaggaaagttgccgacgggaactccgtctctggcaatgtcaacactcgtcgtcgttgcttcccttctcgccggagcctccgttgtccacaacatctacaaaccagatctcgtaagcttcaccttctctttctgtacatatgttagggttctcaaatgtattaggtttgctcactttcttcgttcttgataatgcccataagcgtgatcggtttaaaaccattcatttcgttctctggctctgtgatctctcttttattgtaatgcacataaggtgttcgatgaattgcccatgagagatttgtaatctgattgctttttacttttgtgcagagtttaccaccgttggaaagtagtgaagtggccaagaaggatgattctgtaaacaaagtttgaatctttcaatagtttcatcctgttttatcaggctacattcactttggttgttctctttcaattcatgagttaacaaaaaaacatggataaagtttaaaactgagatcacttattaaaggcttttattcttcttcctcttgtgaagatgtaaagaagaacaaactctttttaggtttcttgttggtcaattcaccgttttttttaaagagatataagaaatcgcgatgatcgtgtagatgacatagagaccaacgaattgatggagtctttgctacggattgtggaaaaccatgtcttcgatacatattggaacttcaaaagagattttagtgataatctagttagtatctccatcgttagatccataggtccattaggcccaaacgcccaatcacgtggcgtgataaatacgttaacaattgcaatatgaagaaaacacgacaattaaatatggaagagaggctaattattcatcggtccaattgccaatgtctttgactgtagttaataataaatcattaagagattttcgtttaaaaacaaaaatacaccgtttcaagattaaaagataagttaattacaattgtatttttcctgattaaaaatcagatgtttacagggaaccgcagatcgctcagaaagtgtagtaagatgctcgcaaaaaccatgtgcatgtccatcaaccttcgccgtctcaatagcttacacaaaaatcgtttttgttttcttattaatataaaacctaatctaaatttacaaatttgttttcttattaatataaaatctaatctaaatttacaaatttgtattacacgtacaagtggatccaagtatctgactctacagatattttgaatctaacatttgtgtaattataatttataatctctgaagcatttaattttacttacaaataatgttagaccacgagacagaaggtaaaccaatcttccttatcccaagataagattcttcaaattaaatataacggctttttgcagaagtaataaagatagaaggaatatctagtatcaacggaaaaaaagaaaaaatctagagcacttcgaaaaattatggaccaaagaagattcagactgaaattattactgtattagtatttgtccattcacaaaatgccgaggaagaaaaaaggcattttggtttatattttgtttatttgatattcaaatgtccaacgatcctctctagctaagcttagctataattcaatgtttgaacacgaatcccattattttaacacaaacaacattaattaaatatcgtctcaaggaacttcacttccttgtccataaatacgttatttcacaccacatatactcatctatatctctatttttcttcttcttctctctctcgccggaaaaagtaaatcaaaatg

SEQ ID NO: 33223 - DNA, 2271 bp, Unknown; identical to SEQ ID NO: 2299
  misc_feature (1)..( 2271): 2750-1469P.txt file - cDNA_ID_3066997; gDNA_ID_1620517; Annot_ID_159322

SEQ ID NO: 33224 - DNA, 3000 bp, Unknown
  misc_feature (1)..( 3000): 2750-1469P.txt file - cDNA_ID_3067002; gDNA_ID_1620518; Annot_ID_159355
tacttttcaagcactatgcacaaagtaaaaagtagaagcattataagaaaagagatacaacaatcgaaatcttaggcaacacaaataaataaaataaacttacgaattcaatggcgtctctttctttctccacttcctcaaacagcatctaagggcatgatacgagccagtaaagccaccaaaaagtagaccaatacgacatgcttcctccctaactatcaaatctttctctgaaacaagttgctgcaaccattgttcacgtgtgagtgaatcgcatatacaatgataagtcaataacacattggccatagtttcaaaacaaccgtatcaaatggaacactaaagcagagactcgtaagactctaaatctccagaaattgccacaaaaacaaattccaattcatcaattcctcaccttaagatcgagaagagacgaataagactgtcccctagcgagcttaaaagcgcgaagaagaatcccgatcccaactctaacaccataagagagaagaaagctctgacataaattcccaatggcattggcgacgcaagaaacgtcagcgtgatcacacaattccgcgtgagatccacgcgccgcagagcgttgtctacgctgaagctccgccatggcatcgcgtagcctctcctccgcttctcgaagccggcgctcagcctccgagctgtcttgagataaaggagaaatcggtggaggcgaagaagaaggatctaaatccggcttggagaacgaagaaggcatcgtcaattaaaaggaattgaaatcggaaagcttctcaagctcgtttgcttaaaggaaatgaaatgatgcaatcagagaaaaatgttgggagcagtgaggaagaagccgatggggatatgctatgacacgtcatttctttatgatttttgatttgtttcttattttcttttttggaaaataatccaaaagatttattttttaccataaagcagaaagtgtgcgggtgcggttgcggttgcgggagtttgcggaaacaggcggttgcggtttcaagcgttatcaagcgttttgaacgactggttgagcgtttgataataggtgcgtttacgggagttttatgactggtaaaccagcgggtgcgatagtaattaaataaaaaataaccaaaataaatataatatattaattttaaaagaaaaaaaatacaatatattattatgataaattgataatattagaaaattaaacatgcttaataattaaaaccataaacaaaacattaaattcaaaaataaataaattttgtaagaaaaagcttagtactttatgcatttggtacatcaccaaaaattgcatcaagtagtgtaataaactgtaaataatgttgaactcgtgggttttccggattgcctctatacatatgataaagttttaacaagaaacgggtcatctcgtctgaccaaataattttctaatcgagaaaacaaatcaaaacatgtattcaataaaaaaactcaaaaaaatataaaataaaaaaaatgacgatgccatgaaatactctgagaattacactagctaatgaatggatgaaaggatagatcatacttacgtttgattcttgattttgattttgattttcgttagtttgggtagatgccataattgagaaaatagggtttcaatatattgattagggttttctgataagaataagatatatacggtttgggtggaagacataattattttaattaattaaaaaaaaaaattaacctaactgctaccgcccgcaaccgcaaacgcttgcgggaaggagcttttgaaatctggcgatttcaagcggtatctagcggtttctatgattggtgtcaaacgctaacaaccgctaccatccgcaaacgcagcgtttgcgggtggcagagggagaaccaatcaaaacaaaatgcgactggtttcgtcgaaacccaaattgttggctatgtgtgaaattctgggacgcacatttgtgatattgttgtggcttgtgatagtagctaatcggatacgtagataacatttggtcagggcatttggtactagtcgttcgaaacgataacatacttggtatgcactatttggctttcaaggatccaacgcaaaaatggttgacatgaagtcgacccatgcatttgtaaaaagaagcatcgagcacgtttgcttcaacaaatttgatgttctgactcagttgtcatattttaaaagctatatagttgcgacaagccgacaaggtacctcgcatcacagttcacaaccaatgtaaacacacactatacaaaactcggtttcgtgtcttcgtgacctaggagatggagttgtgtatacggtttcaaccaggtataaatttatataagtacattttcactccttcaatatctagtaaatggagatggttatacggtttcaccgtttcaaaaacaattttggtgaagaaaatgtaatcttctacggatatttaaatgttgataaattacttatgcaaattgtaactagtgtatgttatgcaaattatacacacatctccttttttttcgttcttcgtccgttagaatctagtttgctcaaccgcattgtcagactcttgccagtcacaattatctcattttgattaaagcatcagaaagttgtcatgagaacaatcaaaattactgaaattaattgaacaaactgaaaaaaaaaaaaccgagattattcaaaaaccaaacttaccaaaatcctaaaatccaaaacccaaaccaaaccaaactgtctactacccaaatcgaattgaaccaaatgtatttcgttttaaattctataacatttcctcgtgtaatcaataaaccaaataccaaatcaaccgatcaaaaccaaaccggattaccaaacgtattacattaattttccggtttggtgtagcttaaaacatggttaaacccaaaccaatacgaatttgtttgaagtttagattgacagcgaccaccggctaagattaatctaaaaacatg

SEQ ID NO: 33225 - DNA, 3003 bp, Unknown
  misc_feature (1)..( 3003): 2750-1469P.txt file - cDNA_ID_3067006; gDNA_ID_1620518; Annot_ID_159353
tgtatagaggagaatgattttttttaaatcaaattataggaaaaaactatgattgtgttgaatagatagacactatatagtatactgcatgaaatttataggataaaaatatgggctatataatttaatgttttaattttaaaagttaagtttttagtaatttgggaaatagtaaatttaaatttgattaaattaatttatttgataaataagaaatctttctataagctaaatatttagaaatccgaaaatattatttttggatggtgtatttaatattaaaatatgtttggtttaaaaaataataaggataaggataaggatagtggaattaatagtgtttgacaatgagtatattatattcaataaatgaaaaataaaaatgatgagaacaattatgggcttgccacatcttttactatatagaggattccaaaaagttggaagaaaaacaattcctaaattgaaaagatttttttctttttcttgctatgaatgtaaataaaatctcaaaaaaaaaattaggagatgatatatatcaagatgaataaagacgaaagagacttaaaatttgttactgcttcccttctgtcatctttgtattatttcctatcatattgttaggaaagatttatttctttacatatgagaaatatgacagcatcaaattcaatgtgcatcaaacgttttgactatttttgattttcttccaaaattaaaacgacaaatttgattttgaaagcaacttttaaaaatacgtttcgccaaactaattacagtataaattggatctcatagccaataactttatctcatcaaacaaaactcaagtcatctatttctcttgttgcatagtcccccaaatattcatcatgtcgatcaagagtgttgtttctctcctagtagttgtatgcatcgcagcctccgttaatgctcagctaccgcagtttcccccaatcatgttcccgtttccaaatccgttcaaaccaagtcccggtatggcaggaagtcccgacttgagcaaatgttggtcaacagtgatggatttgccgggatgctttgaagagattcaacaagccgtaatgtccggcaaatttgaaggcgttggtcctgcttgttgtaaagctttccttgacgctgaagctaactgcttaccaaatcttccatccaacccgtttttccctcctatgatgaaacaccaatgctccaaaatggctagtcctccaaccaccaccgcctattagaatgcaaaaatgtagttgtgttttttcgaattttttgttagtcccagaatgttctagaagaagaaatgataataataatgtcttaatctaataataatgtctcatttcttatattgtgctccatatgattgatgttctttcttcttttgattgatgaatgaatctcaaagacatgttgcgtgatatctcttatgcggttatgacaatgctttctatataactcgacatgtagaccgatcacacacaatttagaatacatcacatacattacatactatcaaacaaaaatgttccaaaataatgaaaagaagatcacgcccaagctcttttcctaggggaaagatcagaagtcttgatatcatctattttagccgccattatgaaatcattcatgctcaaccctcctgcattattcatccaacaaaccgtcttaagaaaccatatattaaaactcaaactcgaacatcaaatatttgacataccgatagaagaggtaaatagttcagctcgaacttgggtaggactttccaagtgaagagaagggtaatgaccagaagcttcagcaaccttatggatcctgtttatgagttcaacaccgcacccaaaatccctcactttccacatacaccttattttcagaccacccgcttcattatccactatactccatcccaaaacctaaaacgtttacataataatcattgagattgatgtaccacatcattagagtggtaaccgtgaaccaaaacaccaacatgagccttatcaacactaatcatttcatttttttttaatctcgtaaccattgttcctaatatgtccctcatgatactaaaattttcattggcttttctatatttttgggtcacaattctatctttatagattagaaatctgttaaacgcagaatcaataacattttcacaatattttgatcaaccaacaaacttgtaaaatcaaaactcgaacatttttatactaagagagaaatagtataagtaccttgtggaggagagttctggcatcatcgccggacaaaggaggctgtgaagacgaaacaggggaacactgaagctgggagagagacaaaacagatgcgtttggtatcaaaatcttgtgctcagtgctttggcatcccaacactttatctccgaattgactcgctatctcctccgggtaagggtcacgagctccgaagtcaccaagaaaatcctgcgccagattagaccgggtcaccgttaaccggccgagtttacggttattcctacttacaggtggtaataaaccgaacactttaaggattgagcgagaaggttgacggaggaggagggaggacgcggagatgttacacggcggtgatgatgacgtggcggccatcgggagctgtgatttgctctgtaccgaagataagagttttggtttttagagagcgaaacgattttcagaccactggactgagttaaatgggtgaggtgccacgtaatcactaatgactaatgggaaccacaataaactttcgtgggaccgactttacacgtcacgttttaatctgagaagcccattgggtttgattgtacttttgtgtccacttttggtgaatctacttaagatttcataattccgaaagtatcctttttgggtatctttaattacaaacaaaccttcccttctttcccgatttcaagccctaaaattccgagacttctgtttctcgctttaacgacagtcgccgagtgagagatatagagagagaaagatg

SEQ ID NO: 33226 - DNA, 3000 bp, Unknown; identical to SEQ ID NO: 2306
  misc_feature (1)..( 3000): 2750-1469P.txt file - cDNA_ID_3067014; gDNA_ID_1620518; Annot_ID_159350

SEQ ID NO: 33227 - DNA, 1122 bp, Unknown; identical to SEQ ID NO: 2310
  misc_feature (1)..( 1122): 2750-1469P.txt file - cDNA_ID_3067034; gDNA_ID_1620518; Annot_ID_159373

SEQ ID NO: 33228 - DNA, 3000 bp, Unknown; identical to SEQ ID NO: 2324
  misc_feature (1)..( 3000): 2750-1469P.txt file - cDNA_ID_3067068; gDNA_ID_1620519; Annot_ID_159402

SEQ ID NO: 33229 - DNA, 3000 bp, Unknown; identical to SEQ ID NO: 2321
  misc_feature (1)..( 3000): 2750-1469P.txt file - cDNA_ID_3067072; gDNA_ID_1620519; Annot_ID_159397

SEQ ID NO: 33230 - DNA, 3000 bp, Unknown; identical to SEQ ID NO: 2325
  misc_feature (1)..( 3000): 2750-1469P.txt file - cDNA_ID_3067076; gDNA_ID_1620519; Annot_ID_159396

SEQ ID NO: 33231 - DNA, 3000 bp, Unknown; identical to SEQ ID NO: 2320
  misc_feature (1)..( 3000): 2750-1469P.txt file - cDNA_ID_3067079; gDNA_ID_1620519; Annot_ID_159395

SEQ ID NO: 33232 - DNA, 3000 bp, Unknown; identical to SEQ ID NO: 2319
  misc_feature (1)..( 3000): 2750-1469P.txt file - cDNA_ID_3067083; gDNA_ID_1620519; Annot_ID_159394

SEQ ID NO: 33233 - DNA, 3000 bp, Unknown
  misc_feature (1)..( 3000): 2750-1469P.txt file - cDNA_ID_3067087; gDNA_ID_1620519; Annot_ID_159388
atgttatcttagattgaacattctttgaagtagttgcatagcatgttgaataatactaaccacaaagtctagatccacgtatacattgcagaaacggaagatgtcttccatgttgttagcgttaatctggttgacaatatcttctgcaatatctcgaagagggtcaggacttgcatttttgtaatctgatgacgccacccagattccgtcctgtaaaagtttttagacgccgttgttaaagtttgaattacaacaaagtttcttctacttaattattgagaggaaatcagctaacataagagagaattgattgtcacaagaaactaaaagagcttgcgttttctacctccatgaaatcttccatttggagaacacggtcaactgcaacaacatataaactgtcttccttaacttcttcgccaaacttttccctccatgtagcactaagacgctacataaaaaacatggagacttcgattcaattcaagtaaaagcacatgaaaagggcaagaaacctagcatcttaaaatcactattataagaaataaccaactgttttccacaggatatctcctagaggcaaggaaacgcaacaccactatcttcaactacacacacaaacagctcttataatggaaatagaaaaaacgcctaaagtctactcaacaatagatatcaactagcaaatactagcacaaacacacacacagagaaaatgaatataaatgcaagtcttctttaccctaagaacttggggttctagtccaacataatagtagcacggacaaaaacagtaacaggccaatcaagaaaccttatcgtccatacaaaggttcatcataaccaatgtatatgagagattcaggattgagttctttggagtgagagattcattaaaaaatgatacctttagaacagtatcgtctccaggtcgaccaatgctaccttgtatcgtacactgaggagtcctcaatccacattgttctaactgattccataaacaaacacaattcatgattgttccttcaaaaagaagtaaactttgccattttttcaaagaagaaacagagtggaattagcaaatgaggacctgaacatgaagagcagacctcttgtcaggagagacagagcgattgaggcaaagaacaggagtgccatctttgtcaacggcgaagcgaactcctacgccgagaggccaaccgtcgtgggtcaaagtggagagagttccaacagatgaaagctccatgatactccttgaaacctccgccggaaagggcttgtgggtcgaagcggtcgccggagtatccaaagtcgtggaaacggaacatcggagtgaaattggacgagatgggtctcgttttagagagatgaattcacgtctctcgatgggtttggcgaaatttggagatggcagaagattgagagcgaaggattgggtttggagttgcattttggttgctctgatagagaggatcgctgtgtttgacgaaaacaagataaaccttccgaaagaacaaaccggaggatcggtacggtatcgatgttaaccgaaacaaattcaaaatttccccggttattcaaaatttccccggtttaatgggtctccgagactattttagcttgaaaataggatttcgttcattatttatttgttgcttatatgtgtttccaaaatcatatacaacgatagtatatgattgcgtagatagatatattgacgcctgcattgggtaaaaaaagaagaagaagagatttacatcaaaaagttatgaagtggtgtagtaattgcacacagcgttacgctaccattcaacaatcaatcaagtgctcattgtgatcccctcacaaacttagaagacacgaaaaaaaaaaaaaaacaggtcgactcatgcatggattataatcattgatcagcatgtgtgtttttcctcatgttccaccaattttctgggatatgactaatgtactactaatgattcggtacattgataattaaatgattagtaaacaatgtgtgattagcaaaaagttgaactcgtacgtgggctctctaacaaaaactatatgcaattatgcatcattacaattgcttttggggtagtataattactaaattagtctcatgtctaacattatgatatgtttaaaatgtgtttcaaaacctatctgtaatccagtgctttatcatttgcttataatttgtttgttaaataactatttttattatatataaaggggattttagtttatgtattgtgtcattaccaactcctctttttgatacggttagtgatgagtccgtgatttaaagttctttttcttttttcatcaaccacattttgaagtttaaaataatatttttatagttgctaatgtaacactaacaaatgtaaaaaccaattgaacgagctcaacaatttgtgagttcgaagttatataaattatttaacagcttaatttattgaattttacaattagtctagtttaaaacaaaaattttgactctcatgaattcttagtttggaactatagttcatttggttggagtgtaaggtctaataattctttacatagtataaagaactaaagtataaactgttaaactctaaaatgtaatgtaactgtaaagattaccaaaaataatttagaatgttgtattagtttgaccggtttagtgaaaccagccaccggttagtgtttataccaaaatccatgacagaagtgtcggtggctgttttgtgtgtaagatagcgtaagacttcaacttcaacaatcaacacactgacaataacactcccttaaaacaaaaaaaaaaagagcttttttgacaaaacattaattgaaagagaactgagatttcgtatttgaggaagatagcttgtctctatctgccccacaaacacctctctttgttggactctctttttctttcttcttcccttagtctattttaactcagaaacctctgtttttttttgttagagagaaaggtaagaaatg

SEQ ID NO: 33234 - DNA, 3003 bp, Unknown
  misc_feature (1)..( 3003): 2750-1469P.txt file - cDNA_ID_3067091; gDNA_ID_1620519; Annot_ID_159387
cagtcttaattaatgttatcttcctttggatgtaattggtaacaaattgcagaaaaaagaccatggatgatcttcatggaagaaatggtcgaatgcacattggtgtagcgcaaaatccaatgcatgtgcagtatgaagatcacggtttgcaccatatcgacaatgaaaacagtatgatggatgaccatgctgatggtgggatggatgaaggagtggagacagacattccttctcaccctggaaactcagctgataatcgtggtgaagttgtagaccgtggaattgaaaatggagatcaattgacattgtccttccagggacaagtttatgtttttgaccgtgtctcgcctgagaaggtaactttaagttaattttggttctttgatgttttagttttggatacatatggtcaacgtatccacctggttggttttgtttttcgcttattgaagtgctgctcaatattatgcaggttcaagctgtgcttttgttacttggtggaagggaagtaccacatacactcccaacaaccctaggatcacctcatcagaacaatagggtactggtaataaaagatttaataccatatgggaaatcagtttattccccagtttgttgctgactaataaatgaaccagggtctatctggtactcctcaacggcttagcgttccgcagcggttagcttctttgctcaggtttagggagaaacgaaaagggaggaactttgataagactattcgctatacagtcaggaaagaagtagccttgaggtacgtttatgtcaagtactagcttttgtgtatgtcgagcttttgagatacgtctgttttgcaattaaggttttgtttgttcatgcagaatgcagcgtaagaaaggtcagttcacgtcggctaaatcaagcaatgatgattctggatccactggatcggattgggggtcaaaccagagctgggccgtagaagggactgagactcagaagccagaggttttgtaagttgaaaatgctttaaatttcttacaacagttatattaactttagtgaactcgttataaaacctcaattaagtctaatacatggaaacaatttatttggtaaccatttaatgacgctcttttcacttccataaactttgtctatatacgtcaactctgaaatttatagttatacttatcatgatggcatcactcattcgatacctgcaactgataacttatacttgtgagaggataaaaataactgaaccgactatgttgttgcatgttaagtcattgtagttgatatgaacttatttatagcttggtatacttggaaagcttgtctctgttcttattcttcgtcaaatggttgtgaacatgttaagatgtcgacactgtggaacaagtgagaagtcaactccaatgatgcgacgtggacctgatgggccaagaacactttgtaatgcgtgtggactgatgtgggcaaacaaggtaagctaagagtttcttagttcacattgatcacctcgtctcgtatcacttttttgactcattgatcaggcctatatatccgagtatgaacctaacaataacattccctttgactttataatatcaggggactcttagagacctatccaaagtccctcctccgcaaacacctcagcatctatctctgaataagaatgaggtgagccgtgagcgcagtatttcatagagctggagttttgatttgcttattaagagaacatacattcattttttttttctcaatcacttttgttgcaggacgcaaatcttgaggctgatcaaatgatggaagtaactggtgacattagcaacacacagtgagaactgagaaaccattggaagcaagaaaggatctcaaacaaaaacagttgttatcatttcatttgatgatggaatcgaatctgagttgtgtttagggtttctctgggttaatctcagtctatgtgggcacattttagtcttctacaaattataagacactcttcacttatttagaagctcactcatcagaaaagaaaaaaaaaactttgctcagtctctcatctgtgtgtttgattatattttcaggcagaaaacttttttttgttcttgtatttgattacaattagttaaatatttaagacttagtagagataatgcaatctatgtataaaaatagaaacaatgattggttatgtcgtgcaacccaagtgaccttaatgtcgtacacacgttcatcaggttaaaacgaaatttctcagcaacttcactattctctctgtcacattgttttattcttttccattatctttattggaaacttgattagaaagaactgattaaggtatgaagataattagtgtaccattcttcacatgatacgaggtgaacaatagtatatcagaatactagaataattttataagttataaagatgaatggtataccacttattacaaaacgaaaacatagttagatctgagaagaaggaaagatttttgttttaaaaaatgagatggttagatatatgccatgttaagagatgccaccatgttcttcttcttcttcttacccggaaaaaactctttcttcttctctttcccataaaaagaaacaaaaaaaaactaacttcccacaaattttgccaaaccaaaccaaaaatagtaatgatctcattcaatttgaaccctctctccattttctttcatagtttttttttagggtaaatcaaaatattaatgttggttagaaactcaaaaattagtttctcttttttttctctgtgattgacagagaggtaagagaaaaaaaagagagaaagtgtttcggtttttgttgccttctctcgagttaggccttctctcttccgtcacaccatcattttttttctccataacgaccaaatcataaaaccggtcgttcctattttttctttctctgcgttttttgtttcgaattcttcaatagaattttaaaagaaagaagaaagctgggtgagacgaaggaaggaagaatg

SEQ ID NO: 33235 - DNA, 3003 bp, Unknown
  misc_feature (1)..( 3003): 2750-1469P.txt file - cDNA_ID_3067095; gDNA_ID_1620519; Annot_ID_159386
ctccttcctatatatataaatgatcttcccatatttatagagtaaatcaaagaaaaaaaaagaagaagattaaaaatcttgattctatcgtctctccatcttgattctttgaaaattggtttaatcacagtcgtgtgagagatgatgacgttcaacgaccttccggaggatttggtagtggagatactctctagagttccggctgtatttctagcacgattacgatcaacatccaaacgatggaacactttgatcaaagatgggaaactttctaagaagcactcttctaatgctccaaggcactctatggctctcgtgttgattgatcataaggtttattcagtgagatccaatctccgtggaattcacaatagcgttgctccatatgttaacataacatgtcattttagcctaaaagaacatctttctaataattattcaacagaagtcgatataggccacgtctttcactgcgatggcttattgctatgcaccaccaaggactatagactggtggtttggaatccgctttcaggtgaaacaaggtggattcaaccaagattttgctacaagaaagatgactgctatgctctcggtagatcctcttgcaacaagtacaaaatcttgaggcagggtcgtcttatcaatcctagcgaagaacgttacgtgtacaacatcgtgggggaggatcttgttatcaacaatagccaagaacgttacgagtacgaaatctatgactttaactctaattcgtggaggagtattggtgtgatcaccggcttgttcaatccaaatatcaccagtggcgtgtctgtaaatggaatcacttactggtttgatattagtgaacaattcttactaagttttgatttctcaacagagagatttggaagtgagtctctcccagagggtgatagtcatttggctttatcagtgactagacaagggaaacgactttgtatgttatctactaattacacatacgtaaccggaacaaacgttaacttatggatagcaacgaagactagtgagaacaccagagcaatgtcatggagcaagttcccaatactgcggggcggagttggtctacgctatcgttgtcattttagggaaggggtgagtttcttcgcataccaagttaaggagaagattgttgtagtttcttgtcatagacccaaccggcactccaaggacatcatacacattgtggaaaatgataaattcatagaattggatcatcatggtgcaaaacctacacatgaattatctcctaccccacgtctcctcatatatgttccaagtttggttcaaattcaacatggtatttagttctttggaggaggcaccaagtcagccagtgcatggccttgtaattgtcacactagtctatgcattatctaatctaactcttgatattttataagtaagatatatgtacgcatttctaagttataacttgttgctacccttttgctagtggataattcgaggcacatggcattttcataattggtcaattagttattaagtaccaaaattttgaaaaggaaaaaaattagaaatgcttagaacatattagagcaaaacatatgtaaattttgtgcaagaataagggaaaagcaaataaaatcaaaataaaattgtatattgtggaattaagaaatgaaagaggaacgcaatttagttttaaaatctgacatattagatatagttgagtcaattgttttccaccgaagaattggttgtggttccatctaacttaagatattttgtgttaagatggtttatttgtagagatatattataattatatatgatttctaaccaaaacaacaagaagtttttaaagatgggtacaaattgaattaactaatgtaattccacattgtcatttggtaaaagaaagatatcttgacaaaagagattaaaagaattatgtgaaaaaccttggcgaccttaaaccatctccaatgtctttatatctttggcatcattaagagtaaatgtgtatcttgatcaaacctgaaaccactaaagaaaaacatatgaactcaaatagaggccaattaaagatgaggtccaaagaatagggagtgtcaagcctttcacaaagacgacgccgtttggctaaaaaaggcccaagatcacaacgacgacgtttgctgaagaaaaatgaaaaatctttcactacaatcattagaccaaaaaagaaaaaaaaaatcaaaggagcttccttttttcgctctcgtctccgtttacccttttgggatttttccctaaacctttttctctctttgtataatcaaatcctctttatctttcattgtttcgcgtgaattagctctgcaaaggctcttcattcttctcgcttggattcctctgcacaaaaggtacccatttgatgtcaattttggtttattgttttgattgccctgtccaagtgacaagtctttgtatgtatgatataggtagtgggttctagtttgtagatgaacttgtcgaatttggagggtttttagttggaagcatttatatgtgggatttggaattgttctgtctatttgttcttagcttaaaggttgggacttagcttaggacttatgagcatgagagaaggagactttttttccaattcgaatctgattgatgaaactttttttactggatttgggtagatattgttacgttttaaggtagttgactgttgttagttgttgtttactcgagattagattattgtcatctactcttgttataaaagaagctcctttgtactatatcagtgctgataactattaatgaagttcctttcccttaggtggagatagtttctttgtatttgcaaactcaatttatgtgagaatatatccaccattattgagtttcttcaacctataccgtctctgacaatctcgctttttcgttattaagaacgttccagtcttaattaatgttatcttcctttggatgtaattggtaacaaattgcagaaaaaagaccatg

SEQ ID NO: 33236 - DNA, 3003 bp, Unknown
  misc_feature (1)..( 3003): 2750-1469P.txt file - cDNA_ID_3067119; gDNA_ID_1620520; Annot_ID_159428
aggcggttccaacccacagcgttgcggctggactaggatcgatagaaggagtagtgatggagatcatcatcaccttcgctttggtctacactgtctacgccaccgccgctgatcccaagaagggttctctcggaaccatcgctcctctcgccattggtcttatcgttggtgccaacatcctcgccgccggtccattctccggtggatccatgaacccagcacgttcctttggaccagctgttgctgccggagacttctctggtcactgggtctactgggttggaccactcatcggtggtggacttgccggacttatctacggaaatgtcttcatgggttcttccgaacatgttcctcttgcttctgctgatttctaaggaaacaagtgatgattcttgattcatgtttctgtgtttggttactttgcctcgatctttcttgttttgtttggagtttggtccggtttcgttgtaatttttatccaatttgtatgaatattatttaatggatggctgttttggttataaattaactaatggatgtatgaatatatagtttcacctaaataggtagttgtaatgttgtatagctaattatcgatccatatatataaaaaatagatcgttacaattttatgatatagtaacaactaacaacaatgacaaattaatggatggtttcaagtagaagtttcgagatcatcgtcattaggtatattcttagggatgttccactcatgagctttccactctggcaattgttgtatgacaacctatgcaataatttattaatatcaataaatcacatgcatgtatagaaaaaaatgaagattatatattatagacagagaaaaagagaggttatatattattaccaatccggtagaatctggatttcccacgttggtttgacaagctagtctccaattttttggtttctgtgaaaacattattcgattttactcccataaccaagatgatacaagattactaaatactataggataatttcttaaataaaactatacccttttgagtttctccttctcaatatcagttcgcggatttagaagctcctttccatttacaatctgaaaagaaatatccatcaatatctcataaaccatcatttgactgtttaatttagcttattgactatatataagagagagatatgtatacctcgaccatgcaagtagcgcaagttcctactcctgcgcagtttgacaaaggcttactctgcgaattaatgagacgttgacatatactccaaagtccaaactaactagattagattaagagaaaaaatcaaaccgagggagagaaaatatcatacataaggaccatagagttcgatgttagaatccaacattatgtctcttagtttctgtccaccgttcgctcttctccaatgtacgtccggtgtcccgtccggcaacaacaccgactaataatcaacattattaccaattaataaaatttattattaatccatccaaaattcacctcaacatttttaaacagcacaacgacttatttgattaaaaaccattattaatcaatatacaattttatctaatcactctagattacctacttttccacgattattattcatccttgttaccaatgtagctaatgataagagtgtagataatctgtcaagagtaaagatcccttacatggacgaacgcaaaatcgacagcaggaggttcgtcgggctcatcagcggctggaggctggctcgctggtgcggtgcttatggctcggacggttttggttcttgcggcattgtgttttgagcgaaagaagtacgaatttggcttattaagtttggtcttgtggctaaagctatgatttggaggtagagaagctactaggccggaaccactcaactgtacacttcccatagtcttgttcttcttttttaaacaataagatattaaacagaaccaaaaaaaaaggttgggtccttaattgggataatgttttatatgccatgaggtttctgtggaggcgagtggtgcctctttttatctcttatccaatgtgtgtatgcgccggtttagtctattgactaaccaaattaaattagttaatagaaacgttgaaacgttttcccccgtatataggaaaaatattggggttgaaccttcgtattcactcctttaatttaaatcaataattttgagaaaacaaaatttgtagatttttaattaaataaagttaattatctgtagaatttgaactttataatcaaacgaaattatatatcggttttgagtttatatatatgaattaggttttagattttacaattaaataaaattttatattggtttgggattacaaatgtggattagggttttgattttacaattaaataaaacttatgtcggtttaataagtgttatggcattagttacttggtctatgaccagaccaccctaatgttgtgtcctggcgacgatgaaactggaccggcttgcatctatattgtcacgggagattttttcaagaagattcaaattggttttggtttctggtgttttcattgtgtttattctcccagttttgtcctagttcctttaggttaagattgcaagtctaataattttatcacattttcttgaactttgttcatgtctctgttttcttagtcttaagtcagtttgtctaaaattttcttgatgataaaaatatagacttacgatctccaacattgttgatcaacacactttcactttgaacttaaccaaaaaggtttgtcaccattgagtaaaaatgttacaaaatatatacgtaagtaatgtaagagttgtgaataataaggtgtagttgacatttgatgggccggaaatgtaatacaaaggcccatgggctaaattgacaatttcattaaaaaaatcgatcctcgaaggagaagactctgagaaaaaaaaaacgggaagaagcttgagcttgtcactcactagcttgaggaaaaatgttaacttcatcaatg

SEQ ID NO: 33237 - DNA, 3003 bp, Unknown
  misc_feature (1)..( 3003): 2750-1469P.txt file - cDNA_ID_3067145; gDNA_ID_1620521; Annot_ID_159476
tatattcgtttacaacctaaaataaatttaactgtaagtaactaagtataataatattatagatgaaattaaatttatttaaatcatatcaaacaaaatatggatgtttgtaatcatgtatatgaaattaatatttataaataaatttatgtgatgtagttataaattggatgttaattttaatttataagttctatttgtattgtagttcaaggttggaaaacaaaatgtctatttgaatgattaatatatactgtatgttccgtggccattcagttgcttacgtgtagccttagagaccaacacaaatatctcttattggagagaacaaatcgtgtcgtttctaagcactcgttaaatctattaaaaacacacacaaagtccacaagtcaattagtcaaattcaatccacgtgtggtttgaacactgatattttatttaccaaatttggcttatagtttcaggttatgttatatgccgtttcaggataagttttggaccggtccgtttgtcagagacttgaacacaaaatttgacattccagaatcaaaaacagtgccgtttgtacgatcaataaacggcaagacacttaccgttgcaaatagtcaatcttgctttttgagctaaagactgtaatctgaagaaaggataagactttggacacagagaacacaaagagatcactgaaaagaagaaaaaaaaaatggcagctttgagttcttccatgaccatctcatatctacattcactttcttgcaacaaaagttgcttgcttacatctcaattttcaaaacccttgtttataaaccaaactcagaagaaactcagattctcgatttccttttgcctcaagcaaaacgaatctggtattgaacaagtcgaagaagaagaagaagaagaatttaccgttgtgacggccgtaaaaagcagatacaatgagattgttatagtggatacttttgcttctagatatcttcttcttgattccactagtgagaatttttaaaaccctaattcctctgtttttgatattagatcctctgtttataacctaagtttctcattatgtagggaatgtgcatagtgttatcaataaaggaggccagaattggactggagcttattgggtatgttacatttttacatcatcataaagttgcaaaaatcatagcttgagttgtttctctgttgataggtaaatgttgttattgtgtttaattttgaatcctatcaacatttttgtttgaaggacgagtctgcgtgtttgccgcctattatccctaatggtcccattgcaatctacggcttggtgagaaactacgtggtgaatcttataccgattgtctgagaagtacatgaacataggcatgcaatgagtcaatgatgtgtttaaatttttgttcatgtgtttgttagggtggtggaacagctgcaagattgattcttgagttgtggccttcaacggagcttgaaggttgggaaatcgatgaaattgtaagtaaactatcggattttcttgcggcattacgtttgcatattggaaaatcttgagttcacttgtgattttcttttatgaacagtagttgattgagaaagcaagagactatctcgggctgtctgagctagagataccgacatcaaaaggcggtagactttgtattcatgtagatgatgctctctctccttgtcaagatgattcaaaaagatatgctggtgagatttacaggttaatgtatgttgcttattcctttgttcttttatgaattcttgaattcttatgtcgatattttagggatcatcgttgatttgttcgcggatggaaaagtgcttgatcagctgcaagaggtactttaatttgttatggtgttagtattatatagtcaactttgtgacaccgagtattttgaattcgagtatgtacagattccaatgtggctagaactggctagtaggttaatgcctaacggtcgccttatggtgaattgtgcgggaatcgaaacagaagtaaagaatggaaaaccagagttggtgttagatgatttggcttggatgttgaattctactgtcaagatcttatcagaagcatttcctggacaagtaagtaacacatttcatcttcatatccttttgttaactacgcgtttaagataaaaagaaaaacatcgcgattatttattgttgcaggttagttggaagagaacaccagattcagaaggtctcaactttgtggcattaacaggaggcttacctgatcttagtgactggtctagtaaggttccagtccgtttaagcgaatcagtgaagctatggaagctttgcgagacggtccctttgcaactcggtgctttgaatgcatcttaacatcaagagttttgccaaaagatttgatcagaaactcacatgtggatagtgaaagttgtgtatgatttgttttgccaattgagtacagagatacacaaaaggacaaaaagaaggtacatatgaatttcacatttgaacttaagaatttttaaatccaaaattcgattatcataaaattttgaatttatacaagaaaccttttatgatactatgttatatatatgttactattagtcagacaaatgttttgaacaatttcttggttcagaccgatattagacaattgtttgacaatttaaccacttgacgaaacttgatatgttgctcgaactctaatacattgtccgcaggttaaaatctagtttcttactaaaaagcattttgatcgatattgttggcaacaaaggatcttattcaagagaacaaatcacgtcgtttcttctaaactcgtttgagctgttaaaacgtcaccaaagttttgactttctatatacacaaatcgtgccgttttcacagtcaataaacggcattacacttaccgttgcaagaagtcaattttgctgatgagactgtaaaactgaaggaagaagaaaggataagacattaaacgcaaagagatcactgaaacaaaccaaaaaaatg

SEQ ID NO: 33238 - DNA, 3000 bp, Unknown
  misc_feature (1)..( 3000): 2750-1469P.txt file - cDNA_ID_3067223; gDNA_ID_1620524; Annot_ID_159544
ttagcgtaccaccttcagggaaaattcatagattgttaagtaaatctgtcatgacaaagaaactcctactaggaagaagattggcgttcctgcttagtaaagaggccactaaccattttgtttgtttccgaatgctcacatgaatggctcgcttggaccattcaaactcttcccattcgcttgcccggccatcgtagtgaaacagcattatagagaagttatctgagaactgagaaatgtaaagtcaaggaatgagaaaaggaaggaaagaagaagaatatgtatgggaggcaaggcaggataccttcttcaacacagtgtctatatttttcctctgatcatagccaaccgtaaatgttactagataccgctgcttgactgttaaatcctgcatgccataccaacaaaatgtgccatgatcttgaagccattctcaaataaaagcaagtagattcaaatttatgaacctcattagggtcgccccacagtcgacggaggtaaaaatctgattcaggcgtgactatatctggtggtagcctctcagcaccacgggggttagtcgaaacccatatctgcaatagctcgaacgttctatcatcaacctttttatattaaaacattgaaaggtaaataagaagagaacaagagaatcacaaccttagtgtcattatagttatatggagggtcagggatgtcattcttgagtttgaggccttttgtcgaagaccaagaaccaaatagtctttgtcttgatatgtcagagtatttatcctcaatgtatgcaagatcaatcgagggaaacaatgtggatggaagattcatctaaccatttcaaaacaaaaaagatagaaaccatcaccgtgtaagcaatgacataatcaagtttgaaaatgaacgaaaaggtatagacatgttgcacgaagcaaagatttaaccttaccttagttaaagtcaaggttggaaaagtaatacccataaggaaaccaacaataacaccgaaaaaggatgttaatagaagcctcatcatttgactaggtcttctcatatttccactgtatatcataaagataaatgtacacaattccaaaagttaacacagataatgattcaaataaaaatggtatacaaatcacatagatatttgatataatcaatgtactgcctatattagagtatatacctacaggttgttatctgatatctatctacagtctatgcacgccaaagtcgtgatacgaagaactacaacgcactttcattccttcacttgcatcacattttcattcttcgatgcttctaactacaaaacacacacaaacatataaacagtaatagtaagaaatgagctttgttaaaagcctatactcaatacttaagcaatcacaaagtggaaaattcaatatccacaatagaatcacaaaattcaactgtacaattccaaatggattaacaattgttccttgtttcttgacaacaataaccaaatatcatgtgttccaaattaatcaaaaattacaccaaatcacttcaatcatatcaaaaaacaacaaatccattctaaattacacacctaaacctaaacgtaattagattttgctaactcctttccattactcaaaagtcagaatttcaattatgcattcaaaattctatatacggtaaaaacaataaacacgacaacataatcatgtacgacaatggaagaacatgcgatcatataccaaaatagaaagaaaaccagtttctgtcctgtctgactaattggcgacaacaccaaattcagaattcgataaacacaaaactcagaaagcgatcgatcaccattagtaaacggattctatcttcacaatgtttggatcttcttcagctttggaatccagaaatggtccacgctttctcgaaattactgcacgaaaacggcaaaatcggtagctcaaaagaataaagctcaaaaattttgtaactctctctgttgacgaaaattgtcattactacgttatcaaccaaggcccattacaggcctactttatctaaattgggcctttcattcagatacacatatcaggcaaggagttaggagtttattattaaacagcaaaaaagaaagaaaaaaaaactattaagctaaccacgtggcagcttaatagataatattatgataattactgatttttttgtctatgattatgaatatattatacctagattaaaaattaaccacacatcaacaagtgttcagtgcaatatatgttttttcttatcctatagtgttcttaaaaaaggaaacaaaaatgtaagttacaaaatagtattataaagtaaatttaaaaaaattagtataggttgtttcttattctataagtgttgccttataaataaaaaatttaagttttccaaaaatagtataaattaatcttataaggttttaattgtttgactcaagtgatgataaaatttatttttatttctcttaaagaattttgtcccaaaagaataaagctttgattaagtaaatatggttcatacaaactacaaagttacttaatttccataaccaagttttttaaatctgattttagtattttacagtaaaatttttacttatatctgtctaatctacatttaaattacacactcctaaagctcattaactacaaatatatctatttagaactatagaatatgctttggaaaactgtccctatatataaaacgaagtcgtactcatacttgatctgccaatcacaaattaacagaaaacacaactaaattgcgatttgaatttattaaatcgtaaaactgagatcttctctgagatttttctcctcctaaagtttgaaactttgaacataaaaattgtatttttttttttgaagtttccagcaaaaaaaaaattgaaactttcagtgattggaattttaatttgtgttttagtttggtgggtttctttatcgggatcgttgtcgtggatttttgtttgtagcagcttgaaagacgatg

SEQ ID NO: 33239 - DNA, 3003 bp, Unknown
  misc_feature (1)..( 3003): 2750-1469P.txt file - cDNA_ID_3067227; gDNA_ID_1620524; Annot_ID_159542
aatcattgcatagcatctggcagagatttcaacgataaggttatcgtcaaccttgatcaggcggtaagacacaatccgtagttaattgattctctggttccgatgagtattaatggaaaactaacagcatttcaaccaaactgtgttttcttcaggacaaggtcatgttatggagattgcatttctatgtaggagcagtcaagaggcccagaagctcgctccctagctaactttggctgtatatatatggactgggatgttgagatggtgtgatgggctaaaccggtttaatatatttcctactttttttgttttcctgattagtccggttaagccgtgtagtagttggtcttacatggacggttaacaaatgaaaatcggttctgatttggtaagactttgtccttcgtcccatgaagatttctctaacaaaaaatcattgaccacatcatgacatgaatccaaagaaaacacatagtttgctaatgtgtctgttagacgattaatctctttagatagtgtgtatcaatttcattatttttgttttaatcgtctgtcattgtatcagtttcggttagaaactaagatagggaaaatatttctcgtcctataagatgttttacctaagcacaaaaaatcattaaaacggtattcaagacttttaaataaatcaaacaaaaacaaattttgatttcaaagtaaaacgaaaaaaaaaatcgtaacatgaaaaaaaaagatatttttattttattttatttggaaataaaatctgaataattattttatgacagtcaataaaaagctatgaaatatttctagagctttactaatgggggaagtttgaactagctgcttgatattaatataataatttgattatcaacaaaaaagttatatttaagaattaagattgatatatgttaaacttttggtaattttgttctaaaaccaatattctttggttgacttgactattttattaatatattagtataaattgagaatgtgaatctcctttccaaactattcttataggttttctatatatataatttcctacatagcatctaacagatccccgaaaaaagatctcaactacatacaataccaacccacaacaaaaatttgctttttcgatcttctcaaaaatgaaactaaaacaaaccaaagtgatgtttttcttgttagtcctaatctctgcattaatattgcaacaatcgaaagctcagaaaaattattgttcgagaaccaacatagactatataccgggatgtttccatgcgttgcaattagcgtataacaaagattatagtctcctaacaagaaattgttgcagagcagtgttttcacttcctactacttgtgccttgcttgtctatcctggcaaaacttaccctattactacctttagattaatttgtatttatagcgatcctcttccagcaatgtctccattaagtctataagttttgtttatctcttaataataatataataataaaaatcatatttacattataattttttaactttgttcaagttacacataaaatccctaactctctatacgtgttgaatgtttgaggtctcatatttatcttactctttcggttttcaaaaggatatcaacataaatgtaaatatgtaatcattcctcatttgttggaaattaatttataaattttgatttcaaaaatcaactaatccatttgtaaactatgtaaaatatttatcaattatattattatttttgccaccttagaaatatatgttaacatttgtgtagttaaaagaaatccccaaattaaatcatgttttgactcacacttataatattatcggatttcataaataaatggataaaccatgtaaaagatgaaataacatacgataaaaaatgatcttagtcaaaacatatgaaagccgataataataatgacatttattggaaattcaagtctaaaaataaataataataataataacaacatacgagatgagatcgagataatatagtatataataaattaaatataaattactaataataatgacatttcttacaaattcaataagtgtttgtttttactcatgagtgtttttaacccatttatactcttatattttcataaataacctacttgttatcaccatattacaccagttaatatatttgtaaaattttgaaaaagattgtatatatcaatctctatacatgactcataaggttaacatttaacatcgtttaattgttttggaaggtagatttaaatccaccaacaattcaaggatgtgaagaatttttagatcaaatatatatttaaatgtacaagtgtttttttctaacaaaaaaaatttgaggtattgaacggatgggtaattttcgggtgtttttgccgtgttattgtagccgtcgattagttgggatgtatacttattgggcctaagaagcttaataccttaattgtacaatcggatggatatataaatgggctcaacaacaaggaaaaaggcccatttaaacctaagagttcaagctctatttgtagaaagaccaaagtatccctagatgtttaagtatgtcctctgtgtctctaaaggttaattggggaagaagaaaactctccttctttttgtaacttttgcttcacctctctcttcttctcttgttctattttttttcccgattcaagcaaaattcatcaaggtaaatttactcttcttctcaagctgagtttttttgaattgttggtatcttccttcatcactctcgcacttctcttcttgaagtctctcttgctcgattcgattctacggtttctctcgatccgagggtttttgattgaacttttattggtctctttgatattgaagaaattattcaaccctaatctcaaattgcttcagaagatttcgggaaactagtttattcttatgggtaatcgttttgatgctaaagtacttaactttttgtgattgtagacttgtcaatttgaaaaaatg

SEQ ID NO: 33240 - DNA, 3003 bp, Unknown
  misc_feature (1)..( 3003): 2750-1469P.txt file - cDNA_ID_3067231; gDNA_ID_1620524; Annot_ID_159535
ttaaaataattatagtcaaatttgttatcaaatttttaaaaaacaaaatattcaaaaatatttcgtataaaaattccgaataaatattaatatcttcgtttgcaatatccaaaaaaatatgttcctttgtaatttagtgtagagagatcatttgagtatatttgaagcaaaaagagctgttatgttttaatacaactggcactttattattaaaataaaatggagtttaatgattgcacacttgttgattctgtttgtgacaaaagaaaattgattcattatcaaatgattcttctttttgtcattttataatgttttgagacgagggaatgaatggttgttttataatgcttaaaatccatacggcagattaattcgttttatatacacaaatggcagaaattattacaactagctgtgtctcgtgttgtctagcaataatccgctgtgatattcgtctttttctatccaccatgcacggttgttattacttttaaattaatgataaaaaaaggagaagataaaataagattgttacgttcgcaataaaatgattgaaatttgtaaacctgtttattaatccgatatacataaaatctcaagctaatcatatttgaatactaagtgtcgcagtagtatttgatcacatatagtctgcagtgcgcaaggatgaaatatatggttaaaaccaagtattcatggtgtttaacttttatttcccaaaattaaattcaaaaaagtgtagtataatactatcgatgatcgtgtgaaatgttttcccataactgctggaggcccggttcatattttattttagctctatgctaaaattaaaacttaagcccatatatacttgatagattatctttaacaaatcacgtgatatcctgacatggcaaatggcactataaaccactattaattgcttccaataaataatagaaaaaaaatctagggttttcgcttagattcgcaatcgcatttgtatttgatttgcttcaatagtgcgacacaaataataacgtttgtgatctatgttttaaaacgaatagaaagaatattgcattttgtgtgtgtgtgtgtgtatgtgtgtctactgtgtcatatgtaacgaatagaaggaaatttgcatgtctagttcttatatctagtcatatgtaaggaatcatgttaattttgatcacaaaaacgccgatttattactttgacaacacgattgtggtgtggaaaaaaaagaaaagaaaaaccgtttgtgggtgggggcaaattttgggagaaaattttgtgaagtgttttctgaactttttatacccacccgactttagattttcggaatatttcggggagggtttcatctttcagttgtcatattatggggtcttattttcgatatccatcttcactattgagaaaacattgtggctcatcgaaaactcttcggggcagtagaaatacgtacataaaatttatgttaaagtaagagtagcaagccaatctagttcaaaagaatgatctaatttgaaaatggggatgtgattatatattaccaatcattgttttacttgtataatatgatttatgatcatttgagagacatgggagctacgccgcataagattgtgttgaatatctattcaggatatatgaagttgtcgtggaggtgatacggaatataaatatgattctagcttagtgtaccaaagtttttaaaactccaaatcacgaaccatataatctagaatatagacgtttggataatcatttcttgtcatgtggtttggcagagatttctcttttccgaaggcaaataggggtcataaatcaaatcattcatttggttgagatgaaaaatgaagaagagcatgtagtttttgtgaatggtcaaactattagtatcgaaaaaggaaacggttgaggaaaaagaatggcttcacgagatggacaaggtagaatctttataggctattagtgtggttccccaataatcaaagacgattcagaagtggtcacaaaggattgctaaaatagaaaagaaaagaaaaaatgcttttatgttttttcattgttggaaggtagatagaagaacaataacttggaatgtggagaaagcgtatcgaacggaacagatcaagcatatcaggcggatcaaacgtatcaggcggatcaagcagctttttagaaaagacgttaaatgatggaaaaaataaccaaaaaagattgtgaggaagctaatgaagaagtttattggagacataaagtatgacaaatggaaaaagactccaatttttttcattcagcttctaaaagacgtgaacaaaaaatcgaatatttggtttaacagaatcatggtaaaaatagagatgaatataatattatggtgttacaatatgtttaggatcatttcacaagcaaaacatatgatgtaatcataaaacatatgatgtcacaaacaaatagttccttggatctgaaaatgcaagaaaaacacaacagcaagaaacgacatcgttctcaatgtcaaaaaggttgacattaggcagtcacttttgactaccatgctcaatcaacggttagtaggtttaacttttacatagacattcatcatttcgtttaaacacacaaaaatggttatgtgattttgtatctttgaatgcacgtgaggaagaaaactgaaaaaactacgaaaacggcatcgttcgaggtcaataaggttgactttaagcaaatacttttgacaactaaacccaattaacggtttcacaacattaaccgtatgttaatcacctgaaattacgataatgtaggtcccatagtaaatttaataaaaactatataatatctcacaatactaatttaaaataaatcacgccttcactcccggaactctcctcttcctctttaaatactttccgacaatagcaagcttcaacaaaaaaaaaaacgaaccaaaaacttcctctctcttttataatatctttctctcaatctatgtttagaagaatg

SEQ ID NO: 33241 - DNA, 3003 bp, Unknown
  misc_feature (1)..( 3003): 2750-1469P.txt file - cDNA_ID_3067259; gDNA_ID_1620525; Annot_ID_159564
ttatgtaatttatgtttgagaatgaaataacattgctaccaatcagttttacttcatcctaccaataacattgcctacagtttttcaatctagtttctatatagatgctgaaaggaagtcgtcactctgtaattttattgatgtagaaagttcgacaaatcaaacagctaccggtggatctcaaggccctcatggatgggctttcttcgctgttgttaccttctcagaagcctttgttcagccagcatatgtatgcactgaaaggcttgatctttctaaccctctttgataaactgtatctcaaactatggttaaagcttgaaattagtagcttttcctggccccaaaaaagatagaaacgtatttattattcttaggtgatatttccccctctgattcttgtatgcaactccttgctatattgacgtgtcaataacaattgtgataggttaacactctctgaggatcctgcattggctatggctttttcagtggcacgaagggcagcagctgtccctctattacttgtcaatggaacttaccggaagactgttcgttcatatcttgattcatcaatcctccagtaccaattacagagggtgaacgatcacacttcccttaaaggttagctaacaacagtaaatctcgctctgttaagtagtttttaaaaaaaaactgtcaccattcatctcttttgttgtagcaccgttgtagtcatgaaagaagcctttccttgatgctaaactagaaagtagaaactatcttctaccagttttaagtgattttgtgttccttttgtctgctaaatttgtatattaatgtagagactatggctcacacatctatatagatgaataatgttgagaacttttctccgttttacatgtctttcaagttttcgtcctaaggtagtatgccgtggtaagaaaactgcataagttctgaactaccgtattatttactgtcctaaagtttgtgatatctttatactgttttcttcgtgtagacttgatccgtttgagcgattgcttttatcctactgctcagcatttcacttcagatgtctttattcacgtcctattcaaattttgtcaagttatttgctacttgatgtcatgcattggtgatgttgatataatatcatgattggcattaacgctgtaagtatccttgtatataactcaggaggtcatgcccacagcaggtccactcttgaaattcctatcttttggctcatcagtggtgatccgctactgattgacaagcattatcaagcaaaggcgctttcgaacatggttgttgttgttcagtcggaggcctcttcatgggagagccatttgcaatgcaacgggcgatcactattatgggatctgaggtaataacacgtatatgttagcagcttgttatgagcagaaattttatgatactttcctagttaaattttgctcgtcatgagggaattagagtagatgagtttttccttactccttcatttttataacataggagccccgtgaaagcagccatggcttctgttgctgaacatctagctggattgcttcctcttcatcttgtctacagtgtagctcatgaaagtgcaattgaggtatagaattatgcttagatgattctaaatagcactgctttgtagttccatgaatattatcctgttcctggtaactactgcaatcttgtgaatccagcacaaactctgattaaaactctccagataaagaagctgataatctgtcttaccatctcttaaaaattgtgtttcacaggactggacatggtcagtaggttgcaatcccttttccgtcacttctcaaggttggctcctttcacagtttcaatctgacacaattgcccggagctatatgattacagcgcttgaagaatcaatacaagctgtcaattctgggattcatcttttgcggctggagagaacgagtatccttgggagattttttatctctgttttatgcctacagaacagtagaggttttgaaatatgaagaaaatttattacctgctcatctttatttgctagtgttaatatccttgattcagaaacaagataaaaagacgtttaagctcttccaatcaagggaacgtgagctgatgaacaagtacaagtacgtggttagcctgtggagacgagtgagtacacacctctgttcctatagtttgatttatacggttatgaagcctatatgttactggaaggcttcaaatgatgtgtatactaaatgtttaacagctttcgaatgttgctggagaaacacgctatggggatgccatgagatttctgcataccttagaggaagctactagctcgtaagtacacacattttactcttgctacagtttttttaaaagaatgatttgctaatcaatcaggctttccattttatcagatttgtaagagaagtgaatgcaacagtgggtgttttgcacccaattcactgcacaaaagagaggaaggtgaaagtggaagtggacatgacaacaatacctgcctttatcatagtactgattttactttacgctgtcttaaggccaagagctcctaagccaaagatcaactgatgtcaaaagactcccccatacaaatttttttgtcactttctgagacagtaaagttcatcactcttctgtatctttacttgaacaagaattgttgtaatctaaacctgattcgttactgcaaattgcaactgtagaatttagcaaaagttagtacagtacttgaagagattaaaataagacaagaatgaaagaagctgtgtttgggtcaacagtgaacctgtgtttgggtcaacagtgggccctttaaagacaacaacatctttaagccacaaacaaagactcgaaagaaaataataaaataatttggatctgaggcaggaaacttccggagacatcggaggaaccctaaattgaatgagaagaggagagtgagacgggagagaaagccagagcgagcgatagagcaaagacatg

SEQ ID NO: 33242 - DNA, 3003 bp, Unknown
  misc_feature (1)..( 3003): 2750-1469P.txt file - cDNA_ID_3067263; gDNA_ID_1620525; Annot_ID_159558
ttgcttgtcgagtgtggaatttgtaagagcagacttgactacgtctacgactcctaagcctttcttcgaggctaaataagcagcattctgtcaacaaaaacagtgttagtggagcttccttgtgttagtcaaggagcatttggaagttaaatggcttgcctgaatgttgattaaaactccggtgactgcctttgctttgccgagctcaaggaagtccgcaagagtcgtgaacttcccggcgttcttgtttgcggggtttctctggaagcccgtggcagtgaaggggttttctatttgtgctgaagacaaagatatcccaatgctcagtgacttagttgagaataagattagtttaagaaatctatagaaaagaaatcagtttcttacgcttcacagactggatctcggcccatgtaagatcaaaagagaagattccgttggtaggctggatctcaggaacgctggtggctcgggacatgaaagtagtcctggcggtggtacttgctgagaggtctgcagcatcatggcagaaagcgattccgtctttggacatctgaacagagcagtcaattatgtctgctccatcgtcgattgctttctggtaagccagatcagtgcagcctggatagtctccgcttgctccattgtgagttataaccaatgcatgccctgctttggggagattgccgttttggtgagaaaagcaagctgcaagaaaacagacgctttagcttcttcttaataatcagctatctgaggaaacatatatagcaagtcatctcactgattgattgtgatgctgttggcgggaaatcggtgatgacaccatcaacagagaactggccattgtccacaaactggagatactcagcagagggatcatagctgtagttaaagctggtgcgcaagtcgttggcaaaccctgaagcatagacctctagaccggctttgtgagcatcagccacaaaagtggtggcgggcttaaggtacttagctgagtcaatgggccaaatgtagtctttgggcacaagaacgcctgaagcaaaggccttgatggctgcgaggttctgctgaatctcgctgtacttcttgttggtggtgggctcaactgcctcggggtctttgaactcaaatatgagctttgtcttggccctgcccgcgtccatcccgatgctcttcaagaaaccaatctctggagatgagatgacattaatgccgcggaatcgcaagcttctcaggtactcggctgggctcagcttgtgttccatgtagaaggcatcgtactgcacatttgcattgtttgttgttttgatgaatcaacaaaaaagctccatatgttggttaatcatgttctcaaagagaagaaaacatacctgaacgctcaaccagaacttgggaggcttggttccaaggacatcctccactgcagaaaccgacatttggccgtcgaagatgctaggccgagagaagatgttctggaccactgctcaataatacaaaacatgaaaatgtgtggtggtggtggtgagcattgaagggaggaaatgaaagagaagaagacatacgagtgactttgttgaatatggtgtcggcatcgtaatcaatgacaaaccagcccttgaggtcctgaccgttgaccttgtaggtcttctgggctttggggaagaccgaggagatggtggttgcattgtcaagtctgatatctgacaagcaaaggcccacaccgtccttagtcatctgaaggttgcacaacattgtgaagccaggcgagctggtgccaatagccaagtcgtttgcagagatgcttgactcagggaaaagacccgagaagccccctctggccacaacggcaggctcttgtcctggaagacaaaagacaggtacggattcttagaaacaaacaaacaacatggtatcttaagtcttaacattaaacaacaacaaaaaaaaaaacatggtagtatgcaatatgggcatactctgtaaaaggatgcttaccgttaagggtaagccatttcttggcaggaacagctgcggcagcagcaggagtcttgggtgccgcaacagaagagtgtaagaaaagggagaaaagaatgaaaaacctcagcatctctatctgattgatcctgcatttgtgtgtaacgtacgtaccccaatggaaaagcaaagtcaggatacatgtaacaaaaacagaattgtcacatttaagaaaattgtgaaagagagatcttacagcgagaaaagaacatgaatcccctctcctgcttgttttcctcgtttagttagaggaaaggaaaaagaagagaaagaggagatgggtcaaacaaggttaattaatggtaaaaaaaagtaacttgctctcatatcctccatttatggccatttactcctttctatttttatctcttcttctccaccattcccttcttaaccgctttttctttttttgatgctttcttacatcttctttgcacaaatgggtgtaacacccctcagttttggactttgtactatattcatttgtcatacatgtatgtagttaaaatgacaatattagagtttggcattcggaccaaaccaagttgtccgatctaaaccaaaccaatattccgttaataagaaaactcgattggcaaaaattaaaatattctttggtttcagtttttgcctagacttaaaattcttaaaaatccaattctatgtgatggaaaaatctttgattccggtccaattctgcatcaatatatgctaaaccgaaccgagactgcccacataaaattgaattgaaccaaaggtttttaatttttacttcaacatagcgaataagaaaaagagggtatatattcattattcaatgttaatgagaaggcgtctgcgtttggttcgacacctcaaaacttgttttgcctttagcatctccgagtaaggaatccaggtccaaagcctcttctcttcctcctcctcgcttccttctcacgcaaccttggatccaccgcagctatg

SEQ ID NO: 33243 - DNA, 3000 bp, Unknown
  misc_feature (1)..( 3000): 2750-1469P.txt file - cDNA_ID_3067266; gDNA_ID_1620525; Annot_ID_159557
ttatgcaaagtcgtctcttttaccataaggaagcgcacacaaattcaatcagatcaaatctgggaaagacaattcaaatcttgcagaagttgacattatgtatttggataaacacaccacacgactcgagacttatggaatcaaaataatgcatgcaaactacagacggaattatatgtatagataagacgatagaaaaaacagtctccccccagcaaaagtttggttgactatatacccagcaggacttccagctcacagaatagtacagcatgaatttgttttcttcgcttgcttgtaaaacatctgttccaaccaatacaaccaaatcagattttcatgttggaagtaaacatggtttacctaatctaaataacgaagaatatcttgagattccagaggatatgactaatacatatgttcctccccatggtcagatgatatagcaaaaaacactatgattcttcgtagcaaacctaataattccaaaatccaactgtatagttcaaactgcactcaaatgtctgcaggctgaagcagaaagctttttcaaagaaggtattctaaatccacattcttcctctatttatctaccccaacaataacatgcaatagttcctctatcaatcaacaacacttataagcctgctaaatcaacaaccctttctaacgtgttcaccaactatgctcagagatcgagacagggaaaaaaggaaactaaatctataagaatttctagaatgtgactttagaatgttacctgtgatgccatgctcaaatctgagctcttctccactaggctgtccagcttctcaccacgggctagaacactatcaatggttttatgctacaatacagaacaaaaaatcagtcttacggagacagggacatccatcataactaccaagactttcttcttgttttggtgtttttcagaagaaagtaaactcaccgacagaacagcatttatgtataattggcaagtatactgaaacttagaaaaggaagtaccgcttatgtataagggtctacaagaaaggaccggagacagcacttacaaggataatctttgtctcatccaactccctctggattttcaacagcttatcagcctctgctgggtcctgaagattacaaatacgggacaatcccaaaatcaatttaagatcaaatcactcaaaatccaacatggtcataaaacaatgggggctactaaaattaattcatgaagaatgaatcattcgattggattctaatgtccacctaactgagcttaatataactacagttttaacaaaattcacagtaaaagagcgaatacagttgcacaagtgaagaacctgaaatttgtttaaagcttcggttaagtatggccaaggctgattggagtcttcttttgcagacctccatgactcaccaaaactcttctggtactcatctaggacctgagacaaaattaaatgtcaagcaacccaaattacaggaaaacttacgaatgatgcattgagaaccactttcaacataatgatattacctgattgagaagagagaaagcacttcgaacagggtaatgatcgtccatgaaacccaccgcgcaaaggccatttctattgtaagcgtgaaccttgtactctaaaccaaaaacaaaataaaaacacgaaccctaattatcccaaattcgaggactagaacaataagatagaatcgcaagaaattaaagccggggcatagtccaggaagatctagaatcagaaacggtgcacatcctaaatcataaaagtttcaaaatcgaaaagccgatccgaatttagaaatcgaataaaaatcaaagaggaaaggagattgcattagatccgggagaaagaagatttgaaaacaatcgatctagagaggtagaagaagaaggagaagaaccttcgtgttgaacagactggcgttgggaaggaggggttcggctagcgacagtgcgaccgacaaagacgacgaactccttgacgctagatcgctggaaataaccgaagtgagagacgtccgaagcgttggagaggatgacgggatcagaagcttcgggagcgcacttgagaacgagcaaggcggtgatcttcatagctgcggtggatccaaggttgcgtgagaaggaagcgaggaggaggaagagaagaggctttggacctggattccttactcggagatgctaaaggcaaaacaagttttgaggtgtcgaaccaaacgcagacgccttctcattaacattgaataatgaatatataccctctttttcttattcgctatgttgaagtaaaaattaaaaacctttggttcaattcaattttatgtgggcagtctcggttcggtttagcatatattgatgcagaattggaccggaatcaaagatttttccatcacatagaattggatttttaagaattttaagtctaggcaaaaactgaaaccaaagaatattttaatttttgccaatcgagttttcttattaacggaatattggtttggtttagatcggacaacttggtttggtccgaatgccaaactctaatattgtcattttaactacatacatgtatgacaaatgaatatagtacaaagtccaaaactgaggggtgttacacccatttgtgcaaagaagatgtaagaaagcatcaaaaaaagaaaaagcggttaagaagggaatggtggagaagaagagataaaaatagaaaggagtaaatggccataaatggaggatatgagagcaagttacttttttttaccattaattaaccttgtttgacccatctcctctttctcttctttttcctttcctctaactaaacgaggaaaacaagcaggagaggggattcatgttcttttctcgctgtaagatctctctttcacaattttcttaaatgtgacaattctgtttttgttacatgtatcctgactttgcttttccattggggtacgtacgttacacacaaatgcaggatcaatcagatagagatg

SEQ ID NO: 33244 - DNA, 3000 bp, Unknown
  misc_feature (1)..( 3000): 2750-1469P.txt file - cDNA_ID_3067270; gDNA_ID_1620525; Annot_ID_159555
ctactatcagcttgatctgtgccattttcacccgagggttcatcctcatgtgaatcctgacatacaatctagcaaaaaaatcaatatcagttagtagcagtcagtatacagtatgcaaagatgcctcaccagtaaaccaaaatcaagagaaatttgaaacatgttcaacctcaatgatagcatctagatcacgcatccgaggagcacgtgtatcaatggacggaagacgttcaccagaaccagtctccacaggtattggtcttccagggggctgagagaaaacaaattcaagaaatactcttaagctttgaaaactaacaagataatgtctagcgacaatgttaccattgtgatatacaatataataaaccacatattgacaatgctactttaaaatgaaagcaaaggaaggagaaatcatactagtgtcggtctaacattggctggcactttcgctgaatcaccttgaacagagtctggcttcactaaatttgaagaatcaacgggaacaccctgtgcccctgttgctgcagctaactctgggggtagatctggatcataaccctatcatttgtacaagagaatgattaggaatacattgtcaccctttggtatctgatgtagacaaatattgtccagctgcaaagaataatcagctcgtaaacaccacaatatgtgccaaaatccactttacctgatccgttctaccgctttcataaacacgtattctgctttgcatcgtagtctgtatacggtgttggtcctgtacgaaattaaaagatactcctcttagtactcttcatccgctaaaataaggatatgaaacacagttattaattaccagctgtttgcaatagtctttccagctctcctcatttagtccaaagttgaagtagtctgtcatctcaactcctggatatctccagggcttttcttcaaaactatctatgtcgacctcaaatatagtcctaaaaagcacagagtagacagcaaataaaagaaacaaagaacaaatcagtcaaaaagattgatatgcagacatgagcctaagctactagaacctctagttcctgaacagatgaaaaattacttgtgagagggaagagtgaagtccagtccacgccctgctgtattactaccccaaggctggtggaaccctttctgtgcagcagaagcattcctcattcccagtggacgccaatctcctctgccacgaccagccataggaccaaggttggcgggtggacgaacttgacctgaggagggtccaccaacagatgcagcacctccaggaatgggagctgcccccggtcttacatactgcaagaaaaatatatgtaaatgtcaagtagaacaataccacccttattttgtttcggcataacgttggtatgataactccaaataacataaataaaatctttgaaggggtgttggctttataaagttagttagtgtctcaagaaactggttattgttcttcttacagtcttcttcttcaatagccaaggaattacgaaaaaaaactgttgaacatcgtaattgatggtggtgtaggattgcgatatacaagagagaaagtgaataggttattatctccctttcacattcttcattttatgaccaaacacccggtctttgggtaagcaagtaaagagatggtttgtcaaaatctagaagcagactccaatttctttgattaacacactctgcatttgcattcaggtttagatacaagtacaaagtatatatgcactcagaatttaagaaaactaaaacagggtaacgacaagaaacccaggtactaagtaatctgaccagtgacaacagtgttgcatcgacactgaccttaaactgagaatgaaacggatgatacccatgactgctataccctgctttgggcggtccagtagcacctcctggtccacttcccttgccagcttctcctccgtctttgccatctccttcaatcccttgaagaccatcttctccccacatctgctcctccataggttgatttggatccgtgtcggccactataacaagtgggtcttcatcatcttcatcatcgtcatcttcattatctcccatccttgatcttctatcagctcctccgatcatgacgttacggctactatcattcaacactatctgcaaatcatcttcactgtcgctatcccaatcatctccttctccttgtcctccatagcctccatcgccaccaccaccaacctgctgctcaattcttgtcgtaacttgcgaaacgcctcgatctgtagccaaaccaggtaacgctccagtaacgaaaagaccaggaatcgtaggtgtagaatcggcatcgggttcttcgatatcaaagctcatatccttatcgtcgccgccaccatcgacaattgcttgacgagtcgcgtcctgagtagataattttacggcatcgttgtccgaaaccctagagattggagctgaattaggttctgagacatcttgatcttgggatcggaggttgaggtcgattgaacggtgaggaagaggaggcggaggagggagaacaacgggaggttgaaacggctggagaacgtcggaatatagatctccgaactcatcgtcctcttccattggagtaaagagattggaggaagaagaagaagaacggccgattcgaattgaagctcacgagaaagagagagagagagacggtgaagctttaagggcttcttctcaacaagtctcggcttctttttatcatcgctagggtcttatttatacacttatttacccctttttttttctaccccaattaggattagtgaaaaagtaaaaattaatattaacaaaaatgtaaataaactctttttttgtactttcatcgaaccaaaagacaaaccaggttgcaataaacaaaagcatcttcagattctttcaccggaaaactaagaaaggttctgtgtttagggttctggttctgggaagctcgttctcaccggaaaaccgaagaatatg

SEQ ID NO: 33245 - DNA, 3003 bp, Unknown
  misc_feature (1)..( 3003): 2750-1469P.txt file - cDNA_ID_3067273; gDNA_ID_1620526; Annot_ID_159581
tctggtaacaccatcaccatccaaaataagaaaaaaaaaatacgaaaaatgattaaagagagcgtctcccatcccaattactaaaaaaaaatgggaaagaaaccacccggcaattgctggtagccgtaaaaaccaaacaagaaaatagatattacttttgtcctcccaaagattttgtccagttaaccaacttttcgaagccatgtcttacgttttcagtatatgcctctaaggcaacttgtattttctcaaagtgtggtttccatattgtcataactcggcttacctagaaaaacaagtaacaatggtcacaatgtatagtgcaatgtcaaaagagaatcagacataatgaataaagatggaaacatattaacctcaagatagtcgtaggaaacgtcgaatggttgggtgaaatgtggggtcaaaagcctgcttacatgtatgtaacacctcgatggacttatcggttaagtattgaatttttggttggagataaatggttaatgtcacatacacatctttgatgcttggaatccatttctgtgatatctaagagaagaattcaaaggttaataagaataaagcaataatgacttgtcttataacgaaaaccaaaaactttcagaataaaaccttttgaagagtttggctaagatcttgttgccgcagagtcactatatatgcttgcaaccataataaaaaaaaagaggatcatttaagattgatcactatgacaattttatcgatgttaattatgaaccttcttatagagttacctgagttttatttaggtttagaccaagcaacttcccatcgatctgaacacaagtaaaaaaaaagtaaagaaagcttttgaatatgtacatacatcagatccaagggacaccatgtttcttacattttcaagctttgagccaagttccgcgactttcttttctgcgatttcagctcgagtttccacttccagacttctcttgcgttgcatttccacttcttctcgtagttcaagtatctgccaatgcagaactaaattgaggtaacaaaacaagaaggaaatacacacctcaaactacaaaacaccaacctgtttctgaagttcataagccgttccttctgcttcactggattctcagtctaaataaaaaagcatcaacagcaacaaaagtgtaaataagtttcttctatacataacaattttgaatacatgaaccaaagattaattaaaaatatcacttgaagagatccaaccacatcaaagatgatgcagcttgagtaattgttaactctttccaactttggaaagagacaaaacgtcaaagtgatttccagaaacagagaacggaagctcaaaagtctctcttgtgccaaatatattaaaccctaaaaaattcaacttctatccgaatttctcagaaacaaaacaaagacacataacttcatatgaaattccagtgaacggttacctgaggaagaaccttatttgttatcagtgtaaaataacagagaagaggtacgagtaaaagaaacaaaagtgacttaggaaacgccattgttggagactgctcactggaagatagagagtcgtgagagacagtgataaagcgtatcaagtcatatagagggtcttcttatctttttctttaacatgtgagggttgagttaattatgcgggctgattatagagtttttaaattgaatttacgattgtttttttcttacatataaatgcaatctatatttgtgttcggaataacccatctaatattactccatgtattaaactaaaatattttgcatgttttggtagatcaactttttgaatgatcacagacctacaaacatcaaccctctaattatccaattttaccataatccacgagctcttaaaattcatttttaatatatataattaaaatagttcaaacagtttaaactttgtgaccaagttaaaatatttaaaatagtttgactttgtgatcaacatatttaaatataatcaatattttcatttttaagccggaaaatcacgtcttacaaatatatttctgatagacacacctataattccaaaattttgacttttaaaacaaacaaaaaaaaatctcattaataccactacatacgtttttacaaaaataccattaaaagatattttttcaaatactaaaaaaaactaaaactaaactttaaacctataaaacactaaatcctataaagtttatattcgagtataaaccttaaaagttcaaccctaaatcctgaaagcaagaccctaaacccaaactcaaacttttaaattataaatccttaaacaaaatcatttttagtctttatggtatttttagagttaacagtttgtagttgtatttttgaaaaaaaaacactagtgataggtttttagaataaaaacttaatttagtggtattgaggatatttctctaataaaaattattcacaaaaaatatgtattaaagcaaagtgctatgcttattccatgcaatcttttttgaaaaaaaaaatattttctaaccgattagtatatcttctagaggattcatagaaaaagaggatacaattacaatatgtagagtatcttataggtgacgtaaccatgaaatatagaattctttggaatctgaaactgaattattcagttgataaatgataaaacaaatactcatatctcatcctttggcatgtttaggagccatctctcagctggacggagacaacacagacacttgtgccagagagggaacacaatcttcccaagtcttcgaaagggtaatctcagaccaaaccgttgactttgttctcattaattgtttatgctaaaccacaagatatttggatcaaaagtattaccataaatcactatataaagacataaatgtgcaccccacttttcttatcaatcataaaagtcagcaaaacacaaggcatattcctcttctcttcctcagccttatttttctgatattcagtttcaaggatatatccatg

SEQ ID NO: 33246 - DNA, 3003 bp, Unknown
  misc_feature (1)..( 3003): 2750-1469P.txt file - cDNA_ID_3067287; gDNA_ID_1620526; Annot_ID_159584
cagaatgttgtagtgattagaagacattaagcatgtgatcgtttcctattatccgcttgatgcatgtattatgtaataattaaatcatacgtgataggtgatttcactgaagaaataatcaaaattgtattttatgtataatactatttcaccaatgtagtaagtggaaataacttcaaacatatttcaagagtttttttgaaatagtaatattccaaatgaatagctagataatttattgatagaacatttgcaatagattatacgagaacatataaataaaatagttttatgagggcgttatcttataaccaactatgccaaaagcattagggtataactaaaaattatcatcttgcattgagactctaaacaaaatttctttaaaattggcctttaaatgagtaccatcaatagaaatgcagttccagttcctcatgaacttataactgatgcaccaaaaaccaaaactacatcatttgacttttttcgacatatcttttcaataaaagagacatacatatttatgattttttttaatataccatattaaaacacttcaataaaacttcataactaataacaagtgtacatgaagaaatttatatttgtaaatatgaggatattgaggatgacggtaatgatgatcaatttgataaaataattaagaaaaatatcaaaaattaaccaacaactgcacgccttattattgttacaaaagattataacaaccttaaaagaaagttagtgtatcttccaccttaatcaacacctgaggattatggacatatattgttgcttaccgggtatgcagttgacgcaaatggcataaaagtttgagaagctcaagattcttatgtattaagcaaaaaaatagtcggatttataagaatagctagaggaaaaaacttaatctccgatttctttgagatgaaaattcgactttgagataaatatttattaaccatattattgataagtcttttatatagcaggtaactttctcatcgtaaatcatggattcagatctttcttgaagttttaaaactctatgtaatcggtggtaaatctattaggagatcagtagtaagtctattaggagatcgataaggctctgatatttattaagttttagattagtttggaatcaacggacctgccttaacgacaccagaatttcacccagcacaaaactcgttcagtaataacgaaggtaagtgacaaaacttatgtattcatacctatttaatcccatagattatgaaccactaaaaaaaaaaaaatcttagaagtattttctaccaagaactcgaatatcccaatatagtacaccacaatcaaattaaatactatattaacgtcattcattaaaccatcatatgaaaatatatagacatgatcattttaaatagacaaacaattggatattaatgactacctcttaataaggagttcagatatccaaaattagattcgatgtcacaatattgtagcgattggaaagaaaataagcatgtaattgtgttctattatctgtttgccgcatatattctacaagaatttgatcatatgtggtgatttcatgagatattattctcataattaacaatgccaaaaacaataggatattaaaaattattaccttctattaagactctatacaaattctctttaaaatttgctttcaaatgagcaccattaatataaatgatgtttttcatgaacttataactgatgcaccaaaaaccaaaattatattagtgacatctgattctttctttaataaaagagatatatccatgatattttaatgtatcatgggaaaacaccttaataagacttcataactatcatcaagtgtacatgtagaaacctatgatgtatgttcgtgagctttccatatttatgtactctatctatccaatccgatagtttatatgaatcattgaaacaaaaatttaaaaaatctcgagattatttttcttccgtggacaaatatgtagaactatatattaaaacaaaaatttaatcttttaaccaaaagaaaagaaaaaaagaagaagcaacattggagaccaagttgtcgttaataatattggcccaagcccacaaaacgttatgactattgtctgactgtcattggaccgttccataaattcatatagaaacacaccaatcaattattagtatacacaagttgtgaggaccttacttttaaaagtctttctttaatagattaaccaagtggaacaagtcttcttgatattattacacatataaaaactccattaagaaactaatttggtttgtccaaaaaggtttagatttcgcagttatctagtgttccttgttaaaattttcttaattgttaaacatgcttaaacgagattatactacaacaaaaaatggattggatataaaagtttcaaacatgtcgttctttatttggtaacaagcaaactttcatacccatatattaacaacaaacaaaaacaacaatgtctttatataaccagaaaaacatgtaaaacagcttgatttaaagaaaaacaatgaaaacataaaaaatagtaaagatagttctgtgccactgtcaacgatgctttcccgatcaggcaaatatatttttttctaaaaacactcaaaagaattagaaaatattctttttttgggggtcaaatgtaaaactttctaatattctgtaggaccaatagaaaaagtagaaaatagaatatatgacttttttttttttgagtctaaaatagaatataggactttgaaaatcccaatagccataaaacattatataaaaaaaagactgttggaaatgatattttcttgtttaaaataaaatgatattcattggcataaaagctattttcaaagcaaagtggaacacttgcattttgcattgagcatcaaattcctccaccatctcctctcctacttctcatcttcatcaccaccgtctaaagattcaaccttttgtaactgcttccaatg

SEQ ID NO: 33247 - DNA, 3000 bp, Unknown; identical to SEQ ID NO: 2374
  misc_feature (1)..( 3000): 2750-1469P.txt file - cDNA_ID_3067325; gDNA_ID_1620527; Annot_ID_159606

SEQ ID NO: 33248 - DNA, 3000 bp, Unknown; identical to SEQ ID NO: 2377
  misc_feature (1)..( 3000): 2750-1469P.txt file - cDNA_ID_3067329; gDNA_ID_1620527; Annot_ID_159605

SEQ ID NO: 33249 - DNA, 3003 bp, Unknown
  misc_feature (1)..( 3003): 2750-1469P.txt file - cDNA_ID_3067333; gDNA_ID_1620527; Annot_ID_159604
tataaagggtgaaacttgacgacaaacaatcctaagctctggatcaggttcacctatagaccatcaaatattaaagtttcaggctcctaccatagacacatcaatacttacaagtgtgaagctgtattcaaaagcatatatattaccctcatacattgtccaagacctcggatataaagcatggtatgtagacttgtctcctttcagattccagtcccaagaaccaatacctgattccgaatcttgtctgttcgaatatataaacttcaatcatctcaaaaaagaatattcactgcaagctaacaaacaagagagagtactgcagtggcttacttgtcaagctttgggttcctaggacataacacactcgagtactttttaccattagcacgtgaaacaaatgcctgcatcaaacaaatccaccaacttagtagagaccatggagagaaatttcaaacagagcataaccatcctgaaactctcttctatcatcttcctcctgcaaagtctatatttgtaacttactgagaattgatttgctaacactggttcatcttcacattttggagggaatagctgccatctctggaattcacctttaaaactccttcctatgcttccagctctgcatgtaaccatagctaaataagtattaagagaacttaccaatatctttacagtaagttctgtatgacaggttacaaatatgatcagagagatggatttctccgaacggttgtttcaatgaaacagttattacataccaatgtggtaaagttgattggatataaaggaaacatacccaatacctccaagtggaacaccatgggaagacgttacagagtgcttggagaatggatctatgaaggccaactgtaatcaatagattattacaatataactgtgtaccaaaaagaaaaagcatatttcaaagactctttggtaaaactgaactaggaaaatgtgtttacccttcctttagcagcttcttctctgcaaagaaaccataaccgaatgccaacaggagcctaccggaacaaaagcaagtctcaaaaacatagttttgacaatcctatcaaacatcctacagaattttaataacagttatatcaaaaacgttttgttttccataggtgtaccagctggaaaatctctttaacactcagattgaattcccgtggagcttttacgtcactatctatctttctttgccatgtcaaagatgcaggtactgccggatcaacctgatttgataagtgggaacaatataagacatcaagccacctttacttgaagattcaggtatcaagttgacataaaataagttacaagtattgtttgatgcagatttaaggactcgaaagatgatggatacgagactaaaacagaacccagaagtttaagctatccaaattagtctaatatatctcaatgaagtccctcaaaacatgaaccacatataagaaatatggaaaaaagcttactttagtatcagaagagtttaaaggttttacatcttcaccaatatccatgatcttttcctcaaacattggtcctaaaaaaaacacagaaacaattcagtgtacaagtcaacaatttcaagtacttatccatctccagttgtcagccatgaagaggttaatttaaggaatacaaaaactggtaatgagaaagtaaacatagttaatggcaaagtagagaataagttaatcacactaacaattaccgtacacaataattcagcattgcgatcattcatgaagacgaaagaaattaacaaatatagaaaacatgagactctcatgatgagagtacctgaaagcaattgctctgaatcgtgattggttattggttggattggatcagaaaaatatggtaaacaagaataaaaccgtgagaattgttgtggcagagaagaacgatcaagccgaagaagatagatatataaactttcgtaaagtgaatttgaaaagtcgtgactttttcaacaaagcttttttttttgtgtgtgtgtatttgtgacttatgaattttttgtgtttgagattagaatttaataaaatatctcctgaattatttgtactaaccagatatggtcgccagtcgccaccacaaaggcacaaacaactatttaaagatcaaaatcgtcttattaatttgggtcaaaacgtgtttttctgattttaaaactttactttaaagcaattttaatatttaatgtaacacactatttgtaactaccaaaaatctttttattaaagagattccctgaccaaaaatctttttattaatacagtatggccaaaacatcttaactacctttttgatctcaaaactttactttcaagcaatgtaaaactaagatttactgacaaaaataaagaagtaattattaatactaatgaaaactgagagtaatcattaaactcatgacgcaattacacaatggtgttatttaggacaacaagtaacaaagtagtgaaacaatgtctgacacgttacttgtgtttgcaactttgcatcatcatgcttgatatgtggacctattagaagaacttgggccttgcacgattgcatctttgtttttaattagtaaagtgattaaataagacgcaaatcaattaatgtccttaacaaaacataccgacatgactttgaatagagcaagcatcacgaaacgaactctattccaaacgtgtgtttgacagtttcttgcttttgaatctccggttcgaattaatttgtgtttgaaccgtgttccgaatggtttatgatgggccaagttattttatatgagaatgttgggctcaattatacgaagcccaaataattataaataaatgcaaatcgaaaggtatatgttaccaccaccaaccattttctagaaccttccacttcttcttacttagcttcccacatagttttcttctccttccttcttcttatcttcttcttcttcatctacctaacttaggttttatcaatctctcatttccaaccatg

SEQ ID NO: 33250 - DNA, 3003 bp, Unknown
  misc_feature (1)..( 3003): 2750-1469P.txt file - cDNA_ID_3067337; gDNA_ID_1620527; Annot_ID_159601
gctaattttaagggattgacttaaagtttgtttggattaaatttgattgataatgtggttgacaatttcaatcaagaatttaaaataaaattaattattttggaaaaaagatttaatgctaatggcattgagttgtaaataagtccaaatccaggatttatttattaaaatggctgaaaaaaatgtatatatagataatagaggtttccacttttgctatgaagaggactagaagaaatgctcatcgataccagaaaattgagaaattggccaagaaaatcacaaacttttaaaattagccaaaaaaatgttcaaacttttccattagaattttaaaaataccaaaaaatttaagaagcagccaaataatgcttacgattttatgacattaacaatgtttaaataaaaaagagttttagttctatgaatatgatacaatggttcttacaaattgattacaagagcttacatattataacataataatttaaattattaacaattaaagattttttattttaattgaataacactacacttttaatgactttataagagtactagattttaatataccgcgagatgatttattttttaaaagtaatatatattaaaacttgcaaattttatttttataaaatatttatatttttacagtttataattattattaagtatttatatatattatttttttattaaaaataataaatcaaagatttaacctgtattgaaacggtggattaattatattttactttttattaatgttgattcaaaaacccgttcctccaaatccgtcttgccaaaaagccatttattttattaatattgattttatttatgatataagtctgaattataatctaaacattttagctaataacataggagtgcaccatatttatttaataggggaatgtaccatatgacccgaatgcacttttacccaaatccaccaaaaaagtcttgcaaaactactatagacccgaatgtaccatatttttttgtgctaatttttatgtgattaagatttaattgatttcgtatataaaatattaaattgttttacgaacttatttgtttataatttggtaacagatagataattgaatattcagtatattttgcttcagtttaggaaatctttaatgacccgtctttaaatccaataagccctataattaagagatgaatattgtcgttaaatgattttggtaatcttaatgatgtcattaaaagattttgtttttgattaaatttttctaatggcattgtcatgtaattaattacaaaaattaaggttacatttaaaatgtacttcccaaataatatagtaggacgatatgcacttttatccaaatccaccaaaaaagtcttgcaaatatactatagagataagaaacgatagtcggttttgataggtatatgattagcaaatatattagttcgcttaaattagttaaagaatacaaattgaaaaggtatattacactttattcgaatatagtatcaaaacttatatagagatttgataaatttttaattgttgaatactttttttttgtgctaattttatgtgattaagatttagttgatttcgtatataaaatattaaattgttttacgaacttatttgtttataatttggtaacagatagatatttgaatattcagtatattttgcttcagtttaggaaatctttgatgagttgtctttagatccaataagccctgtaatctagatattaacttgcagtataccgcaggtaggcttatattttagttcaactaaaaacttttattgtaaagatgatttaaaaatatatgatattattttatttgattttaaatgtatagtaaactgtgagttgtatatattttttgatattatctatattgtttagtgtttaagattatacacttgtagtttgattgttaatttaagagtttcacctgtagtataccatcttgtattaatatcgatctaatcccgtcaattctaggattttccagcttgtattaaaaattgaatcacatctaatatgttattaattattgtagtatataagattataaattttcaatataatatgtatgaaattgaatataaatatttcaaattatgacatgttactcagtagaaagttttcttaaatctatttttcacccgttataatattttttcatgtattgaacagtttatattcgtttttaaaaattcaaattatggcatatgcgaaaaaactctaattatttttctataatgatgatattatttttcggcaaaaatagaatcatataaagatgagaagtaaactataataattaataaaaaattaatatgataatttagatatcaaatctaatttgttgattttaattggttacttttttgggaattaataatgtattttgtttttctaattaaattaaattaattaaaatttagatatcaaatcttatatgttgattttgattggttattatttttggaaattaataatgtatttcgtttttaattaaatttaattaattaaattagtatttgactttttaatcctcaaagagataaattaatttactctttaaaattttatttctaatgacatacctatgtaattacttacaaaaattaaagttatatttaaaatgtacttcccaaataatatagtaggatgaatctaataacccaaaatttataaagatttaaattataatcaacagtttgatcatcttgttcatacaaaatttcgtataagacattaattaacaaagcaaaaaatcatatatcaaaatagacacatattaacaaaggattaataatttaatagttgtgaaaagcctttccagtttcttccacggcctagctcctccgtctttacgctctctcatcaaactcgagaaaaaaaagtggcgcctctgcaatttcaattttcaaatcctaataatttttctctcgcttcccggagaacggaaccctaatttctcgacgcagacatg

SEQ ID NO: 33251 - DNA, 3000 bp, Unknown; identical to SEQ ID NO: 2381
  misc_feature (1)..( 3000): 2750-1469P.txt file - cDNA_ID_3067364; gDNA_ID_1620528; Annot_ID_159637

SEQ ID NO: 33252 - DNA, 3003 bp, Unknown
  misc_feature (1)..( 3003): 2750-1469P.txt file - cDNA_ID_3067368; gDNA_ID_1620528; Annot_ID_159633
tgctcattaccttttctctttttctcccaaaaagcagtccctcgaatcaatgaatgcggattattagctggcctctctgcctttaactattgtttgtatctatcaaaggcagtcattgtgttcaagatagaatagtattgattctgagattagaaacaccattacagattcgagaaaaagagcggcatttggtttgtttgtttgttagtttcagatcaagaatcaggcccagatggcgaggagagacatggaacctgcgcctaggacgagagagagataagcagccaagtgaagccagagattggattgcaatcttggattcataaaatcagtagcaagaagatcaacaagtgacatgtatatgagtatcccagcagatgcagcattcaacattccttccaccattattgcctctttgctctctttcctgtagcctaaaccacttgacatccccaaccctattcctatcccaagtggcgccgtcaccgagaaaaatgtcgccattagcactgtcgatttcgacttcatatccgcctattcatatacacacaacatgatcatcatgctatcatcaatcaattgaattttgaacaatgaagaaaaaatgattgttgtgacacgattcgtctaagctaagctacctatgaccataaacgatttggaagagactaaccagggagatgcatccaccgaggccaagaccttcaaagaactgatggaaagatagtgcagccatgagtggctttatggtgtctatgctctgtgaagctccaagtgatatccctataataaccgaatgcacaactatcccaatctcaagcacctgcgacactatacgtcttctgatcaactcggtcgaaccatgtgtgtgtccgtgactagcgtgcgtgtgaatgtgaacatgacccgcatgctcttcttcatctactactacgttcacttgcttgctcccatggttattgctaaaatgttgcctcttgtaataccctgtcgcgaatgtgtcgatcataagagtccccatcgccgacagcatcgctacaaaaccagcaaacgggaacttcccagctgtagtgtcctcaagacatggagagctcaatctctcgaacgcgtctggtaagatatgaacgaaacctgtgcagaggatcactcctgcagcaaaagctttcaccatgaagaagatatcattttccggttgtaacgccggaatccttttcccgatcaacggtagactcacgccgactcctccggctacaagaagtaaagctatcgaaccaagctttagcttcgtcgctttctctgcttcgtcttgagacacaggatcatcgtgacttgtacaatcactcgaggcacaacacatatgcaaacatattatcaatactacacaaattctcaacatagttgttgccgaaaaacatccacattcagacatgagtttaagatatttatgttcttgttctgtaagaaagtaaagtttgaagagttatggtgaagaaagaggagctttttatagagagaaagcgagagagaacctcacttttgaagcgagtggtccataaatgttagtagcagaatctctagttacgtagagttgaccactatacacatttctttgtttgtcgcacacaaaaaaataattaaattctgttattactcttattgtataccattaagtctttaacaatgactagataaaataggatggaacatttacggaaaaaggctgcgaaagaattcattggttagtataagaaattctgcaagcatcttagattgtagtctatggatggttcaagtaagacgccctttcgatctcttctaatcattacttatctatttatacatttttgagatatacaaacaataataaaacaaagacgacaattcaaagatagatgattagggaaagatcatagagactaaaagtgagtttggaacattattggtcttaaactttaggggcgtagaatagggtggaaaagagattagctgtgaatgctaatccttgtaattattaggttagtacatatcttttcactttaccaaaagcaaaatatatgtgtattatgaattgaaaatttgaagacttttttactagaaagtaaaatgtgaagacagaatgtcgtcatgttactatgtgagccgtgaggagagtggttttggtttgatttgttaaatctacttttggattcaagaaacgtaagatggtctcatcgtcctctcaaggtgggatgggtgggtaatgctggcccaatcaaaccacgtgtttcaaattcagatttcaccatcgccacttgagtgtgatggttacctgaacctaatgattttggccttttatatcttgttttcgaaaactctgaactataaataagatatagaggtttgagaaaacaatggttgaattttcataagcaaagaaattggaaagaatccaagtttgatcacacttgactatcatttcactttttttttgtttttaattcctaaaattgatctaatagattatatataaacatatatgtacctaattaatctctggtatatgtaagacattcactttttatttttggttggtaattttatatcgctgcagtatatgatttaacgatttaataattacgaatcataataactatatcaaagcgataccaaaaacgatatagttaaattttataccattattgtctactattttttttaccatttcaagataattttatatcgtttaccgttttttcttcccgcgaaaaaattcataccacattctagctccaattgaattaaaatgtatcaaattctctatcaaatcaggattttataaactataaggtacaatttatatcccagctgattaactctagtccaaagcttaaagacagaacagtataccggactaaatttccggtccattttgtatagggagacattttactaaacaaaccggtttggcgaaccggagtatttgcataactgaaacaacatttataagaaagaaaagtagaaatg

SEQ ID NO: 33253 - DNA, 3003 bp, Unknown
  misc_feature (1)..( 3003): 2750-1469P.txt file - cDNA_ID_3067371; gDNA_ID_1620528; Annot_ID_159631
gtggtgatgatggctagaaaagtgactagatagaaagacgcaagattgatcggttataattgtgcatataaacttttataaacaaaaattgaccggagagattttgcatgtaaatggatgtgactttaaaatatataaattcatatatcatgggcttctagaaaaaacaaaaccatccgaagaacaaaaaacaagaaatcaggttgtgagaactaggatcgaatttagaactatagaattgtccaaattgagtaaaatatatgtatcattgtgcaagtgaacacatatataacaaaacacaagagttgtgataatcatgaggcagcatacgttccacatcatcgcatatatagatcaagggaataacgaagacttcatatgtttggcataagttattacaagtaattttgtgcataattttatacaccaagtgcgcattagaaactagagaagaaagagtcaagtagctagatctatatttgatatatctcttctctaaccgagacaaaccgtacggcccttagtgatggaactcctagaatcttgtagggagaagttggaattgatgtcggggagaatcaacgtagagtccatggaggaagaggaaggaaaatgatcctcgaaccatgggattgggatggacgatgtgttgttacaaatattggtgcggtcgaaaaatagagtagagtagtctttagtgaggcttgcttcttgggtttcacatgctttctctaacatgctctccatgtatttcccttgtgccgctatcctttgattcacctgtctttctattactacctcttcctctatccttctttgcacctccatttgcatccttcattaccatccataattaccatttttatattataaaattttgagtaatatatctatttatatatgaatcaatatatagttaggatttggaattgaaggcacatactcgttcatattgcgaccaatgatgagcggactagtcgtgaaaacagcattccttcgaagatccaacatggaagctgcatgcatgatgtttattaattaacatatattcatggcatagtcacagatgaattaattaaccaatgtatatatgaattaataattaagtttatgacagacctctatttgtatctctaatacaaatggagtgattttgactatgctccttgtgaggctgcttcccaagtctgaacttctgtagttgaaacacacatacagtatatgttttaaatcctaattactacggcaagattataaaagaagctaataacaaaaaaattaaagaagaggaaactgaggaagaaggtatatacacctggagatggctcttgagatgataaagagtgagacccttcacacccataactctcattattgtctttggtgtagcctctgctcatatatagcgcaattaatatagctttaaaggtttatctatatagggagatgtatatgatgatgatgatgaaaacgtactttcagggcctccaaggtgagtgacggcgtcaacgaagcgttcgtgaagctctgtggtccagcgaaggcgaggcttagggtcagtggtgaggacgagacctgatgatgaatcatctctgatctcctctctcgactgcatcatttaactaacaaagtactaaatgccgattgatgatgctctaatcaacaagagaatattagtatttatgaaagatggaaaaaggaacacacgacgtcttgcaaattacaagtataaattattaagagacattgacataaataatttttaatatatggaaaataatgggagacatatctatatatgcagtagggtttaggctttgaagttgtaaaccatgcaagcttttttgcatccacacatgtctaaataccaaaaaattcaaatttacatgtctaactccttctatttccaatgtattgacgcatgtggccttgcaaatatcatcatccataactcataagatatgaaaattacttttttttttttttttcatttagtgatttagtatgcacatgcatgggattaaggaacaaaattaaagcatctaatctgttgtaaaatttgtttaatctcgatgaaaagattcgtgtgctttgtacctttcaataaagatgacaagtggagcaaagctgatgtttaacttttagctcatcaattgagtacatatgtatgcaaataggaatcagaagttggaaaaaaatgaaaaaaggaagaaagtattttgttttggttgcttagattttaagcagtctcctttattttatgggttcttcttatattactttacagatgaatctattccctttcatctcactctaatatgaagaagacttgtcttgatccagcttgagaaaaaaagaagaagaagacttgtcttgatccagcttgagaaaaaaagcaatacaaatattggaccgaataaaaaaaaagcggaggcctttttaaaaatagtttaagcccaatttatgtattaaaggcccaatgaattggtcgctatctacgcgtcctaacgtgacgtttgccatgcatagatttttcaatttttttgaccactctagtctatagtgctctatttgttttttgttcttgtttctttttgtctccctaattcaatattcatgctgtgatcataagtccataacaaaataaaatacttggtcatgcattaatctcgtaatatttagttgtatttttcagcttacaacaaaaaacaaaaaaacaaaaacagagcagtagtagcaaaaagaaaaaagggacagtctttaccaataggaaactgacacgatccatcctaagaaacttcaattttggggtttctcttcgtcttcttcttcttcttcttctagatcgagagggacatgggtcttaccagccgccgttgacgactacgacgaccattctcttcctcttcatcttctctccttctgcttttctctatttcctattctctccaaattcaccatttccttccaccactcagagatctccctttcttattagctatg

SEQ ID NO: 33254 - DNA, 3000 bp, Unknown; identical to SEQ ID NO: 2382
  misc_feature (1)..( 3000): 2750-1469P.txt file - cDNA_ID_3067377; gDNA_ID_1620528; Annot_ID_159624

SEQ ID NO: 33255 - DNA, 3000 bp, Unknown; identical to SEQ ID NO: 2379
  misc_feature (1)..( 3000): 2750-1469P.txt file - cDNA_ID_3067385; gDNA_ID_1620528; Annot_ID_159621

SEQ ID NO: 33256 - DNA, 3003 bp, Unknown
  misc_feature (1)..( 3003): 2750-1469P.txt file - cDNA_ID_3067413; gDNA_ID_1620529; Annot_ID_159674
gaatgaaaaatttgtaagccaatttccacgagttcactaacatcttccacggacaattcacttttcgctctaacaaagctgcaaaaagaaaaacaaaggtcatcagacacggaatagccaaatgcagcataataagaatcatgtatgcccaacttacataagtgagaaaactacaagacggaaattactacacaatcaatcacaggtacatagtggctactggataaccagtggaaccagtctgtaaaatgatttcagactactagactgcatggtttaagtataaaatctgaacctaactacaattttcacgcaaattccaactgtttattgaactctatcctagtcatgtatcgcgaacacccaaaacccccagcagtttatttcgatatactgactcgattgtaaactgagctaatcgtctctcaaattcatcatcctcgtctacaaatcccaataagaagcagccaattcgaacgagaaaaaataaaaaaatcaacgaggtttatgcaatcaaaatcgaggactcacagttcgataacggagatccatttaagagtggcgtaaacagactctggatcatcgggtcggtgcaactctttgacgcatctcacgacacgcgcgaaggactctttctccttcttcgtctcctccgctacaggcggcggtaaccattcattgtacagatgcatcgcttcttctcagtctccgtctttcgtcgtcttcaattttatgcagattgatgtagtctctcctctctcagacgctgaatttataagctgcgtttgctttttcagtttattttctcttgttttctttccaagcaagaaaaatcatatccgaggaaaaggacaatgaacataccatagaaatgaaaacaacttgaggaaaaaaaaattattgtattgactttaccgttgactggctaccggcaacgggagcggcaggtacaccacttaccgaaaccgactaaataggatttcaaattagccccttaagttttacttataatacaatttacccttaaacatttgacttgtgctatattgtttagatggaacgcatactgtccacaagtaattccggccaataaattgtgaatttaagtctgaccgtacggtggagacacatacgcatagatggatatttttgttgtcaacaggtggaaatttaagcagctattatttgttcatcgaattaacttacgtacgtatatgatgacgacattaacattgcagtttattctgtgttaggtcggggtttgtgataggaccaacgttctaaatgagtgattaaaaattactaaatcatagataaactatcactaaactaattgctaactgaggtttagcagaaattcaatgaattaataataattattttggttttaacaatcaacaaagtcgttgtagtatagtggtaagtattcccgcctgtcacgcgggtgacccgggttcgatccccggcaacggcgtttatttttatttcccttttttgtaatgggccgtttctgtacctgaaaagaagtctttataagcccataaagacgaactaataggcccaaatttgtgatcttaatatattatggactctgttttctttttcgtaagctcttcaattcttaactgtttacacgcaaaagtgccatagtggttaacacttaaaccaaataaagacacctgaaatgttggaaaatatatgactctcagcagtcagcatcacgtaatcgtcgttgagccgcgctatctattttgtgcatttttctttaatatgtactcataagggttttttttttgcatgagcataagcagcgataagttgatacatgagaatgtttacgtgtggacggaagtaaattgttttgcacttgaaaagataaattttatgagtcaatgccattaaacattcttattacaagtttattttctcgaagttgcatctgaataacattgtagtattgattacgagattgaatttatctcgaatagtgagtctaatgagtgtacacatatcggattttggatgggaccataaaacacgacgtggtatttgataattataatttattaagtactgtactgtctgtctgtgttccgaagataatgttaaacaaataacaccacaatctcctatagaaagacaaacctgtcctcataacctaaaccaaaattttcattcaccttagggtgaatatgtcatataaggtaataaagccaatcttgtaataacatatagaattatagatatgattctataattaattaacccaaacaataagtagatatctatattaaaaatcaaatcaaatctagtaatcggaaaaaaaacgaaccgtccctttctccactcaagtagttaaattggttctgtgaaggaagataaatccgctgttcctctcctctctctctctcttcccgttttcacttttgttcgttctctggcggccgatcccgtcgctcgctaccttttaagatattttttttatctaatgaacctgaaattgtaattaggcatataattggggattatttgctgaaattctcatttctagatcgaaaaaagcgaataattcgttttcatttgattcttgcctaatcttagggtatgtcctcccccttgatctgtatagtttttttgatgttgtgatttgttagggtttgtgaattaattgtttcagattgggttttgctcctttttccatttttgtctgctttagtttataggttaggtttccggattttgtgttggagtttctaattttgctttgaattggattattagcccattacgtttcctaggcatagacattgatcaattgcacggtgaatgttttaactttttaagctgttttgatttccttaaactgttcactgattactatttatgtgcagtttatgcccccatttttgagtagggatgtagaatttcttgatttaaaagctttaataatatggtttgtgtgtttgtatatgcaggtgtctttatttatctaccaaaagaatg

SEQ ID NO: 33257 - DNA, 3003 bp, Unknown
  misc_feature (1)..( 3003): 2750-1469P.txt file - cDNA_ID_3067417; gDNA_ID_1620529; Annot_ID_159672
cagaaaaaaaaaacgattttgtgcgtaacacactccattttttagtgtttaacaaacggtggtagtccattgttttcatcatttacaatatcaacgcaaaagagattgtattttgacagtaaacattggaagaaaaatatatggcttgtaaattgtggcttatagtagtaagcacatattaatatttgattggtaactggatggatgaaaactaactttgttaattatcgctcgcaataagcttctagacttgtcgtttcatattaacaatcggccggtaagcttgggtcatatgttttattactaatgtatcggatgaatgaaattgaactttgttaggtacttactttaaaatgagtgtctcgcaataagcttctagactgtggttgatactagtagtaataactgataactatataagcatgtaatcaatattttattaggatgaatgagatttacctttgttggttattttataatgagtgtgtctagcaataattaaagtttattatactgtgatttaatgaattgtgtagttaaaggtggggactactactttggttgagggaacttggtgggggagtcatgtttttgtgtgtactccaagttccacaaatactaactcttctttgcttccctttttaatatgcaaatcaaccaattatatttctgttattacgaccatctactaatatttaagtctttcttgctatctattttctaaagcatccacttagtaattaaaaaaggagacacttgtaaacttcattatcatcataaaaagcaccaccacaaaaaaaaaattataaccacagcccacaggtccacaagtaaccagcgtcaaacaaaaatcttggttgtttttttttgttgtctaattgaaatagttacttgtcttttgttcatatatgtggatattttgtttggctctatagcaactctcattatttcgcaacctaatcattatggtctcgcgaagtcactcgatctgagccaaaatcagatacttagtggtttgcttgttacatcttatatcatttcgatatttgtcaagaaagaaagaaagaaaaactaatatcatttcgataaaaagaattaaacaacaaggtagtagatgaacaaactaatgacagacaatacacgtatataatagaagcgacaagtcggtggtatgaagatacctggccatgtgcttaactgcaaagaaaagtacttctcaacttcttcttatcaaaattattttttaatgatcgaattatacgaatctgtatagatttataattagaggggtattgggctaattgctagtgagtctagttatactgggtccatactttgagaacatgaaccttacggcccattaaactactcataggcctagatcgctctctactctttttataaaatttcaaacgaatagtataagactataagttttgtgataattgcaaaaatatactcaatctacaattaatttttaaaaaaattttaggggtaaaattattaaaaaatgagtaaacaagttcaacactgaataagtgttaaaaacattatttgcttcgataccataaagtttaaacccaaattcagaatataatcctaataaataaggtgtatgcataaaaagctagtggtggaaactcgagcaccagtctcgattgaaagttgagaagaattatcaactcatggagcatcacaaatagccaattggtcgtaacatagatagtggctacaagtaatatttaactactgaatcgaatttgtagtgatttgttcaaataattcgaaacctattgtaccatttttatacttttttgtaacatcagctaaagtaccaaattaaatgataaaaatgttgttggttaaataatttattgcaatatatactgaaattaggacaaagaggctagatttcttgagggaaataaatgcgggaactgtcgtaaatggggtgtgaaacggcgccgttatttgggtgtctccatgtcttcttccacattctaagaaagaaagaaagaaaattaaataatttattttcatcaactgatgaaacatcaattcaaccaagaacgaaacttcctctcgctcgcgctctactgacaatctgagatccagggattctattccagatcactctcaattctctcctccatatactatcgagcaaacggattcatcatcatactctgcgttgtctccagcagatcagaagaagaataagtagagaagaaacctcaatcaaagtcgttgttctttcttatttcggttatgcttgatttggtttctcctacttgttcaccaattcttcttctctgacccttcgttgactgcaaggtaaagttgccttctttcttttgcccttttgttcttaacctcaaagtctcgattttgttgtgaaatcattccatctctttccgattcatggctcttctgcgttaagttctctggattaggtttagcaattttatacgaatgagtaaagtttgactcaacaaattcttaatttggcgttattcagatacttttgattttgattcgcgactcttttctccttttccctaaggaatgaggtttataactctgtgcagtgctacttgtagttgttgctcctgtaatatgaagctgttcaattaatataaaagtgtctgtttccctataatgttaagcgttttagattaatttgtggtgtaaaaatcatccatacgactcctcaaagtgttttcatctagtgtcactgtggttataacttggatctcatacaagaagctttcctctgtatccaggttgctgcagaagcggacgctgtagttttatccttggtccatgtgttggtagcacaagggtatgagttgttgtaaagtgccagttcttattgaagcacaagttgaagtaagttagttcacggcatactctttggtttctggatagccagagattttgtacgtatctgagttcatcggcttgttgtgggattaatgaaaaagatgtttgctgtaacagatg

SEQ ID NO: 33258 - DNA, 3003 bp, Unknown
  misc_feature (1)..( 3003): 2750-1469P.txt file - cDNA_ID_3067426; gDNA_ID_1620529; Annot_ID_159669
ttctcttaacaatatttgtttttatactcttgcatcgttcactgagatacactattaagcttggtgttaccttgatttggcacatgagatcctttgttacattcgttttgaaacgaaaatcagatttggtatataactggcatttatcgatgatcagtttttgcttttcataccttggtaattttgtttgatttttatttgttgacctgaaacgttattacccttccaggtaatggcttcgcagaaggagatgcagagacaactatcaaatgctgtcactggccctatcgtaaaagaaggtaaaaaactagaagttgccttagggagaatgattgagaaatccagcaagtcaaatgctgatgctctatgggcccacttccaagaggaggctgttaagaatgaaaaggcattacgtgaccatggccagcaaattatgaatgaaacgacaaacttcacgagtaaagagttaaatgccatgtttgagaaaacgatgaagaaggaatttgcttcagttggtccaaccctagcacgtgtagtaactccagttattgaaaaaactgtatcttctgcaatcacagagtccttccaggttagtaatttaagagaaatttagagctgatttatgagaaggtccattgatgaaaaagaaaactgatttctctttatacagagaggaattggtgacaaagcagtcaatcagcttgaaaaatctgttaattcaaagcttgaaacaaccgtagccaggcagattcaagcccaatttcagacatctggcagacaagtcctgcaggtaaaaattcgagtttaaactagtttttttatgccttactgtctcttgtatatatattttttatgcttttcagacagttatgactgattgactggttatatatacaagtcttgtgcatacattctcaactgcatcgttgtttatcgtaaaagcagttgtctcttatatatatttgctgccatttgtcaacttcaggaaggtcttaggtcaagtatggagtcctcagtcataccttcctttgagaggtcatgcaaaaccatgtttgagcaagtagactcaaccttacagaaaggaattggtaagcacacgagcgcaacacagcaacggattgactctggacaatctcagcttgctcatactctgagggtatgatagaaaatcgtccttcttccagattttttggctctttcttctagttatggtagcaaaatccttttttaatcctcatgttaaacatgcttttatacaggaaaccattagttctgcatcatcagttactcaagccctaaatcgtgaattagccgagagtcaaaggaatcgcttagctctcacagctgctggatcaaatcccttggttactcaactaagtaacgggcctttaggtgctcttcttgaaaaggtttgcacatctctggatcaaatttcttaccatgaatattttgtcattttctgcgtgtttgacatgtatatacgttaactgcaatgcatcattgttgtttcaggttgaagcacctatggacccaacaacagagctatcaaggttgatatctgaacgcaagtacgaagaatctttcacatcagctctacaaagaagcgatgtctctatagtatcatggctttgctcacaggtgaattcttttttggatttcctgcatcataagatctcataaccatcagttttgcgtaacatcccatgacactggtgttgtgccaattcaggtggatcttcgtggactactggcgatgaatccgcttccgctgagccaaggtgtgcttctttcactgctgcagcagttagcttgtgacataagcacggacacatcccgtaagctaggttggatgactgatgtggttacagccataaacccatcagatcagatgatagcggtccatgctcgcccaatctttgaacaagtttatcagattttgcaccatcaccgtaacgcaccaggcagcgacgtctctgccgtcagactaataatgcacgtcatcaactctttacttatgagctgcaaatgacatctcgctctctctgtttcttcttgttagttacatgcataaaacataggaaacctctcttctctgtatttctctctctactctagttagattttttttggttacccattagttcaatttcctttaactgtaaacatctggttggttctacgtctataatgttccctttttcttctccgagagaatgagtttgctaggatctggaaaaccctgagaaaacatgaagatcatgtatgggcagggtatactgattttctaatgaaattggttttgaagtaactacaagttacctgcagaatagacagatgagtttgaagacattatgggaatctggtgtggcagtaagcagagaatttgtcaaaattgagcaattgcaataaaaaatctttttctttacttttgagttcagttgatcagtttttggattgaagggtatttgctgttgggttcggttgcctttacttgcatgtgagctcagctgaccatgaattcagaatccttgtcatcttcttctcttttgttggaggttccgatgaagagcaagaagttggaaacaaatgatgggtgaatctctggaaatgtaaatagggcccaataattgaaattaaaggcccaaacgagtaaaatctgaaaattgttttacagaagcggtctcatattttagatataaacacgatcatcaccccaaaacttttcgtgatctgggacatgcccaatttaatattttcattaaagaagaagaaaaaatagctaagtctccaaaagttctctacctgttctcactttcaagtcatcatcgtctctctctctctattgttgctctctctctcgctttttatgtgactttcagatccgccgagtcttctttttgtggaatcttttcaaggagctcagtattctatatacacctctctttgtttgatcgatttcacaaaccctagcttcggcgatcttaaatctgcaaaaaatctatg

SEQ ID NO: 33259 - DNA, 3003 bp, Unknown
  misc_feature (1)..( 3003): 2750-1469P.txt file - cDNA_ID_3067430; gDNA_ID_1620529; Annot_ID_159667
ctcgacactaaaacagagatagtgaacaattacagagcaaaatcttgatatttattgtttggttaagttcctcaagaacctagtgtggttcttatttgctttttcaggtttccaaaagaggccatttccatctttgcgataaccagagataccattttcttcagattatctctgcattgatggtgatcactagatataattcaagatatccatgctgcattctctcttcgatggtgaatgtaaagaaataagtcagatgtagaacaagtaaatatgcaccaatcatatttaaagcagaaagaattattcgtgcttccgtggactgtttattaagttatagggcttaaaaagaccattaaggcccaaactaatgttttcgtgtctgaatttgtgcggaagcgtcctcacattttattgcgattatcaccccataacttttttagtcatagaatttacgcccgcactatcaaaaaagcaagtctactacaaaacttctatagctgttctcactttcaaggcatcatcgtctctctattcttgcttttcgcgcttctctctctacgtgactttcgatttcttcttacttttttctgaaatctattcaagaacctccacattcaattacacttgtctattgatcgatatcgcaaaacctaaatttggcgatcctgaatgcgtctttgaaagtagagagatttaaagatagtgtataaaggagactgaaatgttttccatcttatttctctctttaattaatcctattacattgagttcttatatatagtgtgaggattaggtttacattttatcctcatcctctaaacatttgagcctattagttaagatcgtatcttgacttgaacagctggagatgcttttccttgacgctctcttagccacagaactaactggtttgtcttcttgttctgttgcagatgaccgttgcacttggatggactgaatgggcttctcggggttctcctcttctacagcagcttcctcagtctttaactttctcatcatcatcatgcattcttcctagaatgttttaggattacccaaagtcagtaaatccaaattcaattgttattatatatatatatatatatatatatatatatatatttagaaatgagagatgttaaggttgactattcaccatggtaacagacgtaaaacaggggtttccctcctctggtcgaatcttcaccatggtagaaccgtttcccttgttgcatgttttaccatcaaattccaacatcttgcagagttccttgaatgttttagcatcaaccaaagtcagtaaatccaaagtcaatgctatatatgtacttcacacaatagcacgtaaatacacaaatattagaaatgagagatgttaaaacttgcctttagtgttagaggagaagaagtatgatacgctatatcttgagtaaccagcaagtcccactcctgcttcatgagaatggcaaattaggtaaagtcgtgaaagggtaactgtaagtcccagaaatcagaaatctctcaacttgagatgagatattaaaacttgcctttgatcgacccagcaccatgttagcagggtctagtcgatccacattgttatgactagcctccctgtcccattcctgcgtggagatgagaggcattatgtacttttgaaagggaaacttgtggtaagagaatgatggtttagaatcagagagctagtgagctgcttacagaatacgcatgtttttcactcttgagatgcgtggtgaaatcttcaaagctttgggcaccaaaatcgcattctgagcaaaacaagggagtttcaccggtttcactgcgcttgtagtcctgaagaacaagtcttgttgctcctgtttgttatcctccatagcagcatctgtggattcaaaacagcttaatttgcttgttatcagatgcatgttatgagagagaggccataaaaaatacctgccattaagctatcccagaacaactcttcaggaacatctttaagaatgcttagccggagagctagagctcgtggaggatatgcgagaagaattctgtatcccttcttctctatgtcgtaaagtgtactagctaaagttttcaggtccttagaactggttatgagcattatagtagccggagcaagattctcatcagtccactcaaacaaatccctttgaatatctgtctcagtaagtaaaggaaactaacgtttaatctaaaccctaattaacaaaaaaagagatgaaagaagatttttaactaaccgtgggcatgtttaagagcgattccagtggaagaaagcgttcgcagggattcgtcaccaccagggatctgcgttaggttgccaacggcagtgataaagagaggaccccggcggcagcgccactggcctgacttttccaacgccgattctatcctcggacccaccagacgaggatcatgaccatcgggaagcggacaggtggtcatgttccacaacaccaacgttttctcgaaatgtttgttcattattcttcgacctaaaagacaccttgaatcctatacgcacagagaagaccaaaaggaaagaacgatggtaactttcgatcagtttttttagggttcatataaatgttgtggagggagagagatacttgcggttggtttctatgggccgatgcgcgtggcccatataataataattacttgtgaattcctttaaacccaagtttaatttgttgcgcgattatcaccccatcacttttagtcatcagatttacgccccactatcgaaaacgcaagtctacaaaacttctttagctgttctctcactcctttcaagtcatcatcgtctatctctactcgcttttcgcgcttcccctctctacgtgacttttgatttcttcttcagatccgccgagtcttctttttctgaaatatattcacgaaccttcacattcaaattacacttgtctattgatcgatatcgcaaaccctagattcggcgatcgtaaatcaatg

SEQ ID NO: 33260 - DNA, 3000 bp, Unknown
  misc_feature (1)..( 3000): 2750-1469P.txt file - cDNA_ID_3067437; gDNA_ID_1620529; Annot_ID_159661
ttaaatgttacttgatttggacaggtgaagaaagaatctatctatcagctgatagtatagatccttcggattcggactcactaaaaaatcctgttatcactccagatttcttaaacagtattaaggtatcaggtatgccacaccattctttgcgtttgaaggttggggctcctgttatgttacttagaaatttagatcctaaaggtggtctttgtaatggaacaaggctacagataactcagttgtgtagtcatattgtcgaagcaaaggttataacaggagataggattgggcagatcgtgtatattcctctaataaacatcacaccttcagatacaaaactaccattcaagatgcgtagaaggcagtttcctctctctgttgcatttgttatgaccataaacaagagtcagggacaatctcttgagcaagtaggattgtacttgcctaaacctgttttctctcatggtcaactatatgttgcgttgtctagggttacttctaagacagggttgaaaatactaattctcgacaaagagggaaagatacaaaagcaaactaccaatgtggttttcaaggaggtgtttcagaatatttagtgacaagagtcaactcacatattctgtaatctatatagttgagaaggtatatttactatacctttgtaatattgattcaattatggtttgaataacccgcaaacaaactgtctaatcaaaatctgaatcttctgttatgcaggaaactcagtatcattcaagctatttcattggtcactgaataacctaacaaagcagttctaaagggaatcgaatagactttggttttccagttttcatttacatttatctttacagttcaaacaagtacttattattcttacacattttcaatctgcagtttgccaagtgttttccattttaacaagttctacctatgcttcgaacacttgcttttaacaagttgcagcaaatttgtaaagacaaaaaacgaattcaatcagttatacaattaactcagatttatacttcctactcataacaaaatccacctaaatgatatgaacactttaactttaaacacaaaatactgcaactaaagaagattaagaaactgacctctgcaatagattgataacctcttgctcagttctttgttcagacattaaacctgtaaaacagaaagaacaaagtgttgctatataaatttggtagctattaattaaggaaaccgagtaattaaactgtattacaactcaaaaatattataatctaacctctgcaagatatggcgacatctaaatctagagattaaccaataccctttattttcaatcacgaaataacaaaatgtgccaaagtacagatttggtcattatttttcttagataccaatttgttagctgttctaaactgtataatgacagagacatataacccaggtattgttgtattggaaaagggggtttctgaatatgattaaaaccaaagactgccaattactaaccaaatctggaaaaaatacacacctttacaaactccattcgcctttacttctgttgagctgacttgattctctgccgccatagcttccttttggttcgtattcatccaatggtaggtgaaatcgtatgaattcggatcaaatgacgatttgataaccacttttcgttggaagaaattgtagattagttgtttctttgaggaacgatgaacaactattttgaaattgccgactctatattgactctgaagtcgaagttttgcaagagaataataacagcgattgccgagaaatctcaattacacatgaagaacaatcagttgttttaagaaagtcgattattgaagcagacactcacaaacgagtgtattaatttttcagatattttgtggttttcactattgattatcataaaaatttgtgtgggttatgtggatctgtgggcctaatgaattattaaagatgaagcccataatatgagttgtattttgaagcaacatttttacaatttggtactcactaaaaaatattgtttgctaaatcttgatatatagatttcaatattaaacctgaaaaacaaaaataaaaacaacatttacagtaactttaaattattgtttttgttaaattacaagactaatgaaaaaaggaagacaaaatctatatatagatatacaaagacataatttataaactgtatacttacttaatttctaaatttatatagatacaaaaaaataatcaaatttcctttgtataaacatactaaataatatacctaaatatacaaaatataaaaaatataaaaaataacaaataattataagactgtgaattatatattacgaaagtaattagtttcaacactaaaataaaaaatagatccgcggtataccgcgggttaaaatctagtaacaatagaaaaaaatgcctaattccattagaaaatttccataagcgatactaaaaagaaaataagctatattcttatctatctatatgaaaaaggtaatattctcgttcgttatgactttacctcttcctaatgacataagaattgatgttcaattgattcatgacacattgacctttttatactgatttgtttaaactaaagtataaagttaaatcttaagtctatatcctttaagaaccaacaaacaataaggttaattactgttcaaaagtcaaaacaaaggttgattagtaaagtacaattaacttatgaggaaacggtcgggatttaaaaagattcaggggtagtttcgggatttaaccaatacggggtagtttcgggatttgaagaccaatatcggtggaagcttctgggtcgaaaggcgggtttaaggtggtttggcttttcttataagccagagttaacataaaacctgaagtaaagccatctaaggaagtcacagagattctgatttataaaattgaccaaaacaagtcacagaggagaccccggaaaccaaacagtcgacgattacgaagatg

SEQ ID NO: 33261 - DNA, 3000 bp, Unknown; identical to SEQ ID NO: 2387
  misc_feature (1)..( 3000): 2750-1469P.txt file - cDNA_ID_3067445; gDNA_ID_1620529; Annot_ID_159657

SEQ ID NO: 33262 - DNA, 3003 bp, Unknown
  misc_feature (1)..( 3003): 2750-1469P.txt file - cDNA_ID_3067475; gDNA_ID_1620530; Annot_ID_159711
tgggtttttgttaaagttcaagaaagttcttttttctttttttttcctcctttaatggacgaagtttctcctgcagtcgctgttccattcagaccattcactgaccctcacgccggacttagaggctattgcaacggtgaatctagggttactttaccggaaagttcttgttctggcgacggagctatgaaagattcttcctttgagatcaatacaagacaagattcattgacatcatcatcatctgctatggcaggtgtggatatctccgccggagatgaaatcaacggttcagatgagtttgatccgagatcgatgaatcagagtgagaagaaagtacttagtagaacagagagtagaagtctgtttgagttcaagtgtgttcctttatatggagtgacttcgatttgtggtagacgaccagagatggaagattctgtctcaacgattcctagattccttcaagtttcttctagttcgttgcttgatggtcgagtcactaatggatttaatcctcacttgagtgctcatttctttggtgtttacgatggccatggcggttctcaggtaatgaatcgatttggtttcgatatgatatgatcggaaactgcaaaaacttggtttttgacatttgtttttgtgtgtttaggtagcgaattattgtcgtgagaggatgcatctggctttgacggaggagatagtgaaggagaaaccggagttttgtgacggtgacacgtggcaagagaagtggaagaaggctttgttcaactcttttatgagagttgactcggagattgaaactgtggctcatgctccggaaactgttgggtctacctcggtggttgcggttgtctttccgactcacatctttgtcgcgaattgcggcgactctagggcggttttgtgtcgcggcaaaacgccactcgcgttgtcggttgatcacaaagtaagtatagatgtttctatgaatgaattagtacaatcatatattcattaggacttgcggttttttgttatggtgttaccaatcatagcatgtttctatagattagttaatgtacttatagcgtttgggtctacatttatgtgtagccggatagggatgatgaagcggcgaggatagaagctgccggtgggaaagtaatccggtggaacggggctcgtgtatttggtgttctcgcaatgtcaagatccattggtaattatttaactttctcttgataatgatccatgaatttggttcttttagttgtttccttacattacaacccgtcgcgaacaggcgatagataccttaaaccgtcagtaattccggatccagaagtgacttcagtgcggcgagtaaaagaagatgattgtctcatcttagcaagtgatggtctttgggatgtaatgacaaacgaagaagtgtgcgatttggctcggaaacggattttactatggcataagaagaacgcgatggccggagaggctttgcttccggcggagaaaagaggagaaggaaaagatcctgcagcaatgtccgcggcagagtatttgtcgaagatggctttgcaaaaaggaagcaaagacaatataagtgtggtagtggttgatttgaagggaataaggaaattcaagagcaaatccttgaattgaaaaagaaggtttggaagaaaagtgaaaaaaaaagttttgatggtgggtaaaaattctctttagtgaaaaaagaaagataaaacaacaggtaataattacattgtaatattaatttcctgcttaaatttgttatttactttcttagtcttcccaccattatttaatctttttatatttattttactaacatgatatatataatgtacatgggaatagtgtaacttccaaacaaaaagcccccttgtatttttttttatcttggggttagttgtaataacactacattcgtctacgtaaatatttagtgttattatttgatgtttcataacttctctttgtgtgtgtgttttcgttagagtgatatagtttcaatagtattgacatcattttttcattaccaaaaattacattagtcttcatcaccataattttttcattttgtttaaatctactaaaccaaccagaatatgggatggttgaataaacgtcacaataatttgtaaatccatgtgaatgtttagattgtaggtgattgaagacaaaataatacatacttatatcacaagttaattgtaaagtggtgtgtaaggcagcttttatccccaagaaaaatcatctttttatcacatcaacattattcaacaattacacaaaaaggtaaatatcatatttaaatgtgaaagaatataaataaaattagtcttgtgaaaaatttaatctcttcgaataacattgttttattattcttatttcataaaaaaggaaagaagtaagcgttggttagtaaaagagtgttttttactttctcaagagtttcaatttcttcttcttcagctttatacgcatttaaagcgccgacgaagttgaacactgaagaagaaaaagaggagacgacacgatttttgtctgaattatcagattcagatttcgtttaatcgccagattcatttcgaaaaatcttgcactagattctcttatcttcggtgagctctctctgcgatctttgtttttttttccgagcaatttccggtatttaatgaaacgatggatcgacgaattgatttatttgtaaagctaatcctgtagacaactgagctcaaaacattcaatttttgttaaagagacgagtcgtatctcgagtttgaagttttcgcggttgctgattgatttgatggggatttgaaatttatagtgtgagttttggttagttgctgctagggttttcgaatcacactttgtattgttggtcttgtgttgattgaaatgtatctctagtctttgattactgcttgtgaaattctgatgtttttattatgattgcagggaaattgaagatctgggtcataagcaatagcttaaagcatg

SEQ ID NO: 33263 - DNA, 3000 bp, Unknown; identical to SEQ ID NO: 2403
  misc_feature (1)..( 3000): 2750-1469P.txt file - cDNA_ID_3067492; gDNA_ID_1620530; Annot_ID_159697

SEQ ID NO: 33264 - DNA, 3003 bp, Unknown
  misc_feature (1)..( 3003): 2750-1469P.txt file - cDNA_ID_3067502; gDNA_ID_1620530; Annot_ID_159692
tagctttaaatattgatgctctgtttcatctacatgaagtataacttttatctcaaaaaccaaattaagatcagtttttgccgtggctgaagctcgacaagaactcgagaatcttggaagatatgttccctgagtttctggttacagccgtgtcaacagtaacattgctcttatttacagcttctgttggatcattgttgcctcgttcaactttagcggattcgaattctgcagcgagtttcatggctgagagtagagaactttgaatgtgtgagctaggcgtagtcttgagatttttactacttgctggtttttgaggctctcgattcagagttttttgttcttctgatgcaaatgataagaaacttattccttttggaggccccagagggagaaagcttccctgttgtgactgcttcaatgtctgactatcagagttgtctgtgtttggcttggacgcagaagacgctttcaccgtatcctcttgtgaggttttgtctaaagagagaaaactcataccctttggagcaacggatggttttctcaaaggaggaacctgtggaggcgttacatgttcattgatctttgaagatgatgcatcagatgagtttcgttggttagaatgacttgagggcttcaaaaacgcaacagagcttgaaactcttgcttggatcgccggtaatttggctatggcatctctcacggattgtttttttgttttctgaggcgagaaagacgctgcagtgatcttagtagacgagactgttacatttgcactcggcgtgtctgaagcagattgtggagtaccctgttaagtgaagattagtatagtaggatcaaaagatcaataagttattagactctggaagaagaatcatgagaagatcgagagattggtttttaccttatgcgaaaacaaacaactatcacccctgtagcagaaacctttagtaatgaaattattgcaagggtatttggagagatcatggtcgaaaggacaatcatctcctttcatacatgactgggttgcaaagtagcagcaaggctgaaacaacaagaagacacgagtattagagaccaaggagatgacccagctatttaaacttgagaaaataagttatctcttgaaacagtaatcttaccgaacatttggtttccggtattgtatcatgtgaaaatttgcatttatctccctacaaaagaagaaaaacaagtgcatcagcaaacaaaacttttaaatccaaagaaatatttataatccaaagccgttgtgtagacctcatggcaccgccccttgagatagtgtcgacaatacttgataggctttggttttggagctactggtttcagtttcagctttttcacgccaagggctatacgctcttgagctctttttatcctagcttttgcctgcatgaaatagcttatcagtaagtaaacatcttactccacacacaaaatgattgtaagatatccccgtaatatgtcaaagaaatgcatacactacattaccctctttctggcttttgcatccttagaaggcgcagacctttttttgatggaggttccaggatccatctgcaagttaaaatacaagtcagattttattaacacctaagcaacataacataacaagattctttaatattggatacctttgcttcgttactgaaagtttgatcaatcttcttggcttgattatctacattcattacctcaacaccaaaactcttatgactagtgagatggctattaccagttccatcttgtgagacctgatactcctcatgtctttcgactgtttcatcatcttctacaagcatatcatcattatcatcccctgatatctctccttcttctacatcatcacctccaactatccgagacacagaatctaccaaaaccggactattatcaacaggtttctctaattccatctctctttgaactgttccattacaagcttccaaaactccagaacttataacctcattagattcaacagatttaggaacctcctctgcctttttctcactttcaactggatctacttgaacttgagttgcaatattaggcttctccaggacattttggacaatgtcatagtcattcacatccaatgcctcaaagagattcacacaactttctggaacagaatcttgagtttcattaatcataagctcaaagctatcgaaaaaatctgtgtgtctactaacaacagatgcatcttgcaagtcaattccatcacaaatatctccaagcatcaaactcttttcctgtgaaattgtttccaccttctcaccacttgaatcaccagacactccattgagttttgattccgtaattgataaattctccggcggttcgcaagtttctcccggagactcttgagcaatttctatgtaagaaaacacaaatagcatcagaaatagtttcaggcaatttcaagcaacagatgaactttgaattttgattactagaagatgaattaatcattcctaagaactttgacttcgaatcgaacactgacctgttcgtaagaccagctcctggagaactgccggtgtggcaagagaaatttgaggctcccgatcgaaactcgagcaaaagtgataaagcaaagagcgataatttcgattcggcagatgcgtgcgtcggtgaggaaacggagcgacggaagattccattgtctccgccggagaataatctcaaccagtaccgataggctcaacttcggcttgtctttcgccggagaaaggccgtcttgtggcggtggacgatttaaaaatctttattgggcttgtatcatctttgatgttaatgggcttcctgattttgtaggcccaatgaatccttcaacaaacggcgtcgtaataaggatccaaaccctaaaagatttatggattcagagttttcgaaattggaatttctcactctctctatctctcttagccagctctgatcatttcgatttttttccggtgaaaagggaggagaaacatg

SEQ ID NO: 33265 - DNA, 3000 bp, Unknown; identical to SEQ ID NO: 2395
  misc_feature (1)..( 3000): 2750-1469P.txt file - cDNA_ID_3067513; gDNA_ID_1620530; Annot_ID_159687

SEQ ID NO: 33266 - DNA, 3003 bp, Unknown
  misc_feature (1)..( 3003): 2750-1469P.txt file - cDNA_ID_3067544; gDNA_ID_1620531; Annot_ID_159736
atgaaactcagatgagtcaccaactaagttgagaacttgagatggattcaatagtcaatgatgctaggtgaaataacgtaatcaaccaaaaatattattcaatttttaattcgcattcgcaaacacgaggcacataaaataatattatcagtctcaataaaatcttgattcttgatcttgagcatcccaaagcattattaactaagcatgtatctcccactaaggcacaaattactaaccatataagtctcagtactctctgttctgcaaacttcatacacaaaaccaacattaagagatggcgagccactacagaaacacaagcgctattgcttatctattgctttgtctcttcattacatctgccactgcacattccttcatacgacaaatcactgatgacctcaaaacaaatctgcagcgtatgccaattttctatgttcttttagttgttataaatggaaaacagatcctttgtttttatttctcaaatgctctgtttttgtctggaaacagaggaggtaggagcagaaccaatccaaaacctggacgtaggacattacttacaagaaaataaggagatctcatcacgtgattataaagtatcagcttcaaacgcagtgaaaggtttgagagatcgtcctccatcgtcttactctctcaagatggagtctttcaacacgctccttaagtcaacttacacggagaaatatgtatctcgtcccttttcagttggtggatacaactggtatgttggtcatctgatctttatttgcttgaatctataatcttacataccaaatatattttgatgaatctcaatatatacaggacacttgttgtgttcccaaatggtaacaagaaggatagtggttcagggtacctttctctttacgtagccatagacaactcaactctcggacagcaagagatttacgcagatctaaggttttacatctttaacaagaatgagaggaagtacttcactatccaaggttcttataattttcaatcaagaaatgtagtgttttagcaagaaagatactttgtgcatgatagtaatatgtatctatatatcgactggtctttgttatataatctgtagataccgatgtgtggaagtttagtgtcttcaaaacgatgtggggattctctcaggtcctccccattgatacattcaaagatccgacaaaaggatatctctacgatggagatcactgcgagtttggtgttgatgtaaccatgccttctctctacgaaaaatcggaacttttctctgtcacagagaattttctaaatccgagattcacctggaccattcggggattctctacgctgctaaaaaacagttacctatcagaagtgttctccatcggaggaagaagttggtgagtcaacattatttcaaaataaaaactctggtggagtagtaaaatggtggtaagtagtaacaagtattttatatgttgattaggaatatacaaatcaatccaagtggtcttggtacgggagagggaaaagctttgtcgatgtatcttggccttaatgtgaatgagatattcagaccatatgagaagatttatgttcgagccaagcttcgagctcttaaccaactcaatctcagtaacatcgaaagggaacgtaagtaaatgatatgtgttcattgatgggtatacataacatctcatcgcaatgactaatgagatttacttcttttttttgggcagtcgatatttggtacaatggtccgggatatggagaatatagctggggtttccctgagtttatctatttcccttatctcacagattcatcaaagggtttcgttaagaacgatgtgttgatggttcaagttgaaatggaggccatttcttcaaccaagtacttcccgagttagattttctctaagcaaagaacttgtacctacctccatgtgtttgatttgttatcaaatactaataagaatttgattatgcatttcaaatacaattgtttctttttcttcagcatatcattatcaaattatcatatatcttcttgaaagatcaaatagtcttcacccaaaaaaaaatccgccaatccaacattcggctcagttttgtttgttttgatacctaagaattaaagaattaatggataatttatgatggaggttagagtctactgctaaattactatcactaatgtattgccataaacaataaaataatataattgctaatcttaaatctcaacttgactataaagataaagactaaatcgatcaaaaaccaatacactagatgaagcctggcttttggtgggggattttaatgaaattcaatgtgaaaatttaataagaacttttgtgaaaagaaaattggaaaatataagtaaaagaaaaaggttaaataaaactatctaacatcataaaaagttaaagaatagagcaattggatctagtgtattggtttttgatcgatttagtctttatctttataatcaagtggagatttaagattagcaattataatattgtttattgtttatggcaatacattaatgatagtactttagcagtagactccaacctccatagaaaaaaatccattgattcttttattcataggtatcaaaacttacaatgcatttgaacctattttataatttaattcaaactactgtattcagttccaatcatatgtttttgaatgtttttttaagaaaattgaagttcatataggatttataaaaatttattcatctgatgtagaattattttatggtcaagttaatgaaaacttcaagtgagggcactcccaaacttgagatggattcaaaagtcaacgatgctaaatgaaaccatcgaatcatgttttgtttttgaaacaacattattacgtaagaatctaactaatattcgaagactccatcctaaagcatttctctatctctttaatatataagttccactaacctctcttctcttcacttcattcacataagtcataaccttgaaagatg

SEQ ID NO: 33267 - DNA, 3000 bp, Unknown; identical to SEQ ID NO: 2417
  misc_feature (1)..( 3000): 2750-1469P.txt file - cDNA_ID_3067546; gDNA_ID_1620531; Annot_ID_159730

SEQ ID NO: 33268 - DNA, 3000 bp, Unknown; identical to SEQ ID NO: 2408
  misc_feature (1)..( 3000): 2750-1469P.txt file - cDNA_ID_3067553; gDNA_ID_1620531; Annot_ID_159727

SEQ ID NO: 33269 - DNA, 3003 bp, Unknown
  misc_feature (1)..( 3003): 2750-1469P.txt file - cDNA_ID_3067557; gDNA_ID_1620531; Annot_ID_159725
ggaacaacacacacaatttcttctttgatttgtctgcaaaagaaaaatccccaaaccggatcttaaagatcgtataaaaagggaacagttgatgctacagtatttgaaatcattgtgtgttcatcactttattatatcaacaagggaaaagaattggagatgggtgtctttgaagcttcccagctgaaaagttgagctttttcatcttttcttcacaccatagaagttgctctttactgattttcgacatcctcaaaacccgtgttgcgagtttgatgtcaatggctgcaaacaagagttgaacaccttcccatgtttgaggccatgatttctttctcagcccttttgtcttctttgaaagctcctttgctttcacccttttctgcaaaagttcctctcttatgagacaccaaagaagcatacgatagtaataacatttgagtacagagaaatcgtaccttatcaatggatgactgaaccagtagtaaaggagttgtagaattcacatggttgttgttgtggttcccaaacaagtgaatacccccatttggtttcttcttatccattttcaagaagacgttgaaagtaaggatcgagctctctatgactttgatgagatcatcagcgaggaccatgaagcctgtatctttctccatctcctttttatctgaccctgatatgttttgaacataaccaacttcaagtgttactactacacataaggttttaagtcgcgcaatgtatgagagctgagaaatcaccttgaatcttaggagcttgaagtagcttaggcattgcatttctagcacgagcataaagttccgatcttgagccttgctcaaacggttcattctctatatacctctgcaacaagactaggaattgctgaaacagttgggcagtatggttgtagcaagtcggggtttcgggttggcatgagattaagtggctcagctgcgtgtattgacagtgaagtgcctcccaagtgaggcagagttgagcaacataggccgtctctagatcttgataagggtcgtcaacttctgtcggctgcaaatgctcgatatcttcctccggaacatcaaactttttgagagaaagacatcggaaaggcgatgacagcttcttagatgcagatcttggcgatggagttgaaggacttggagcaattccaatgcctaagagattgaaaagtaaccaacaaatccatgatcagtccaatctatcacaatgaaaaacagttcaaagcaagaagcttttaccagtttccttgagctgctgagagcttaaacgatcaaagaagagcatacgctcgcaatacttttcatagacagcatcaaaacctccccaccattgaagtccttcagcaaccacatctctccactcacttgaacacttgtcttctccgtcatcatcatcttcatctagatacgattcctcttcttcttcttcttcttcctcaggtatcaacaccatgaaactgtttctcctcaactccttgagccttctcttaacctcattggtaatgaaatcatcatcgtcatcttcgatctcatctcctttccccgaatctatcacaccagcttcagtgttctcactccttgcctgttcttgctgagccaatatcttgtcttctttctccttttcaaggtttggcttccgagactttcgaaattttctaactttcaagaaatccattgcctcctcaaacacacttaggagagtgagtgttttttgttaaatcataagatctaaactgagactagtctctttgcatgagtaaaagcgtttctcttctgccacaacgaacttaatcaaagaatcaaccaaaccagagaatgaggaaaatgcatgaatctagtaagatctcagagaatcatgagcaaaccctagagaattaggaacaccgacagaagattaagaatgcataagtagatcagtagcaacaacagcatttgtctgaaactttagattcgattcactaatctctagctgataagaacactagcattccctgataaatcaacactccactgaaactactactacactgagcaaagagtgtgagaaaaaaaacaaaaagaaagaaaaagattcaaaatttaagaaagaaagagaaacccaaataaaagcaaaacaaaatcgaaagacaaagacaggaggaggaggagattaaagaaggagaaatgtttctaaccacttgcaagagagagagagagaaagcaaagtataataatgtctcaattcaagttttttcagtaaatggacagagagagcacaatataaatgtgagagaggaaaggagagcaagtattattgattcttaaacagatgtcattaaattcaataattaaactttgtgatttcaaattccaaaaaaaaactagaaattttcttcctttcttaaaaccctttcctcaaaaatttccatttgcagtcaaaaccctcacaaagaggtttctgagtcaatttgactttttgtttatttcctaatgggtcgaaattgtcttttactgtttggtttcttactttactttttctgatacttcattttctattggttaatttttggttttgttttggtgtttgattagagaaggagagagatgtatgaatgaatgaaaaggagaagaagcagtaacaagtaacaactggtaggtaggtcagtggggggagagatagaaagaaaagcatcgtacagagaatattgtcagaaaagccgcgctatctgttctccttccatttgctcacttctctcttttaaaattacatctttaccctcctccgtctcatacatctacgggtcttatctttgtttctgatgacaatttgggcttctcttaaaatgggctttttctttaccaaatttatgtatactgctatgaaacgacgtcgtcttttactttggttatattggtatggtttttgaatttactttggttacgattccggtctagtggattggatgaaaccgaattggagagcttgaggttatgatccatg

SEQ ID NO: 33270 - DNA, 3000 bp, Unknown
  misc_feature (1)..( 3000): 2750-1469P.txt file - cDNA_ID_3067612; gDNA_ID_1620532; Annot_ID_159777
tgaagcatgtacctgacatgcggaagaatctcatctctggaaagggttttgttaaaggtggactagtcaaaatgtctgtaatgacagtctttccaaaaaatgtagcttctgcttctgttgtggaaatgaatgaaaatcctattacttacttggttgaatcgtttactacttggcatgaacgtttaggacatgtgaattataaaataatgcgaaaaatgcaaaacatgaatttaattccgaaattcaaaactaaccaagaaaaatgtgaagtatgtgtacatgcaaaactcactaaaactccctcaccacgagttgaaagaacaactgaacctatgaatttaattccgaaattcaaaactaaccaagaaaaatgtgaactatgtgtacaggcaaaactcactaaaactccctcaccacgagttgaaagaacaactgaacctctaggtttaatttacacagacttatgtgatttgaaatatgtgcaaactagaggtggtaagaaattttttgttaccttcatagatgattgcacaagatattattatgtatatctattacatagcaaggatgaagctctggtaaaattcaaagaatttacactcgaagtagaaaatcaacttcagagaactataaaaatagttcgaagtgatagaggatgagaatataatgagccattcaatgcattttgcggaacgaaagaatcgaactctaaaagaaatgatgaatgcactgttgcaggaatctgggttagccaatgataactgtgtattttgcatattttgagcatccatttgtcatcactttagcaccatatcatcattgttttataccatttctcatcatttgtcatcactttgtatgtttaggatagttttgcatgcatgtggcatatttgtgttgttttcaagtgattcggagctgttgacgagctaattggaagaagcggacctgatcatgccaaaccactcgacctccaggtcgagtagacgcttcacgacctcaacacaccactcgaccacctggtcgagtataggacttcaccacttcacctcatcactcgaccccctggccgagtacccccacaagagtcactcgatcaattcactcgaccgccaggtcgactgtgttcacctccaccacctgaccatcacttgatcacaccactctacctggaagtcgagtatcaccatcaccaccactcaactacatactcgatgtcgagctttagagtcttctccattccgctctcaaccagacactcgagcacaaggaagaaaagaagattccagcttatcactcgacctctcactcgaccacctgggtcgagtacagtttttaatccgtcccaatactgcgtcattttgtgtattagggtttcagaatattttgctataagtagcatgtactttacattttcgagaacaagttttttctaagttttattccgtagacactgtgttcttgaccttttgtaatccgaatttctctttatctattcagtattcagtatttgttcttgattttgtttattgttgttcatcctgttttcaccttgctattacactgttgttatcatgttttcatttcattcaacgtttatgttttctacaatgatgtctgagtagtgaataggtttctgaggatgggttagagtagtttagaatctcagtatgctaggtggttgagtttgattgatagatctcttctgggttagttgttcttaatgcctatagatttctgatcaactggaatttgagcccagacatttccacgcccaaaaggtgttcgctgaaatgtctgaaccactaattccagagattcgtgaccctgtaccaaggtattggttgcagggagcgttttggctttaacttgttgattcgtaatgcctgttaggttagctctcgtcaatggtgattgagtctgagactaggttaacttgagggtctctattgcggtggcacttagatttggttaatgaacttgttgtgtagggatagtttattgagcatgtcaatcacctgtaaactgaggaaacgaaactactcaattactccatcctcggaaattctttatctgattgattttattatttactttaccgttgtttactgcatcttgtcatctgttgcttagtccctgcaattctttgctgttactcgacctgatactcgaccacccagttgtctggcaacagactctggagtcgagtatccctgttacattttatgtctgttactcgacctgtcactcgaccacaccctgtgttgagctgcatcgagctgtgttggtcgagtgttttcttgtttctacttgattttctgttttctgcatgctcacttaggactgctagaacacaccaaaatctgttattgcttggcttgatttagtgacttctgatcacaacttgattgttagcatcacacccatttggattgacacctaaaatactacaacgacatgattggtggtttaggataattgactaaaaacctattatcaatttggcgccgttgccaattgggtgtttgtgtgttacatttgagatttcaaacttgcttagatcaagttctttttcaattttcaaatcggttgctaactgtgtgtttttcttgttgtctttttgatctaggtacacctctgctgtatgcaaactcgatcaacaggcaatcagaacctccttttcaacgataacatcgaccgcatagctcgcgaactcagagaaaggagaaacatagtcaaccttttgccccaacaaccactcgatgactgacgaaaagaatcaacaaaatggccatgtcaacattggtgctggagatgcaccaagggaccatcgttagaagaaaggaattgcacctcctgctatccagaacaacaacttcaagattaagagtggtctcatctcgatgattcagggaaacaaattctctggtttgccaatggaggatccactcgaccaccttgatgaattcgataggctctacaacctaacaaaaatcaatg

SEQ ID NO: 33271 - DNA, 3000 bp, Unknown; identical to SEQ ID NO: 2420
  misc_feature (1)..( 3000): 2750-1469P.txt file - cDNA_ID_3067650; gDNA_ID_1620533; Annot_ID_159787

SEQ ID NO: 33272 - DNA, 3003 bp, Unknown
  misc_feature (1)..( 3003): 2750-1469P.txt file - cDNA_ID_3067684; gDNA_ID_1620535; Annot_ID_159851
gtttctccgtttacttcttctgacatcatctatcgttttctctttttccaatacatcatctgcagatctcttgtccacatactccagacgaagctaaaatcagacagagaaaagttaagagttaaaagattaacagaaaattcaatcattcagctatagtgctttccattaaactaactataacaaaaaaggagaaaggaactcacaacagtctttccatttccggaatcatcatcttcgatatcactttctttcaatttacgtgcataatgtccaatattgccagtctcaacataccgtgatgcgtctttgaaggattgaaagatatactcacttttagggtcaatgaagaactgcaaaatcaaaaacaagacatgtccaagaagaatcacataagagattttctaaagtgagcttatgtggaaaagacacaaaatgtacttttgatcaaagatgatgttatcacaaagagagtagagggtacaaactggatctcttctggttttacggcctgatctatttgttatttcaagtttcttgatccatccttcaggtaaaccttgagcagcagatttctcaactataacctgtatcacttaaacataaagagtttttcattttaagagacgtataaatgtcaaatctttttagggatcacaaagaacaaagtaacattgtcttcaaacatataaacaacacaaaactctcagatattctgtgcttatgaactttccatgaacaacctaataccagacccttgccaatataaatgtgattcatctcaaaactttccctttgcatacgcgagaggtacaaagttttagtgcttacgaatattacagtattctctcgaagatggttacttaacaatccaaattcattttcacaagatctattactcttaatgtctaaccatctcagtaaagtaaccatataattccttttcacacgaagtaaactaagagacaaacttttaaaaattcaagaaaaacttaaaaaaaataaacatctccaatcatgcacacaagtaataagagctttctaagccacagtggaaccaagtaaaatcaattgagttcaaaatgtagctacataacaaagctttgatcaaactacatcatctataacaaaacaaaaagtcaggtcaagaccattttcagacacttaatcaactagacctcttctcttttgatcacatgtcatctttccctaaaagctaagcattgcatgcaagagaaaatcactcaaacgtcacaaaagacttcacctttttccatcattacaaaatcatacaatcagaaactaagagtgaatcaaagtatttggcacttcaataaagataactacaatttccacaaaaggagctaacaagaaccaaacatgcaaaagacaatcaaaattaagaaaagggtttaaaactcataaatcaccttatcctttctcccattcttcctcactctaatttccactttcctctcagccgacaaaccatcagagatcccttctccgttcatctctccggtcaccgtaaaaccactttcctctctctcttgtatccctgattcacaactcagaatggtttatcaactcaaaacgccaaaacccatcaagaattgtcggattcagataatggacaccgtcggaagttataaagaaggaacctttttattttgtctgattgtgtgatttggttctgtctccactaaggtaaataagaaaaatagtaggatttaatggggaagaagaagaaagggtttacacgtgtagtgtggaggagtttcaatggagattccccgatttgagaggttcaagaaaactcagtccaccagcacgcgagtcttctggcccaacgcttctcttctctgattgcaatttagctcattttctccattttattctcttgtactgtttgttgtttacttccattgttattgtcccaattttaaaaaaacttacactgtatattaaaaaacatttgcttgatttggttataaaatctaattgcaaatctatttatgatgatattttttgggaaacatttaagactttgttatcattttttgacccaaaagaaaaaaaaaatgttattattgtaaatgttaggattggaagatttatcatgagaagaaaagtgaaaaatactaatatagtcaattatgaattttcataaatctgaattaaatataatttatttttacttaatatatagttttaattactttttgtttaaatttatgttattaaatttggtatttgtatatcatgtttaaaagatttagaagtatgattttattctatttctagtgatttaattattgaaactttgatttttaaaaaagtttatgtattaataaattatttggattgaaggttatatcaatgttataaaatgtgttttaaaatctgaaaagtggttgattttttctttttaaattctgcatccacgaaacttatttttcttaaaacttatttttcttttcgaggttatgattctttttagttttttttatcaaatttcatgatgaaaataactgaattgaacatcaaagattttcagaaaatactctactgcttttttcttaactatattctagccatttacatatctaagcttgatgtcttttctatttcgtcgaaaatctatctattttacggcagagacttgaaacccgaattttgacatatcaaaaacactaacacaatcccatgtactacattatcatttgtattttacttatagaagaaaataactttttatttaaaaattgtatggtaaaaataaagattagttccctaataactatataaaaaatcttattcggtcgttttagctgtatttaacttttaaacccaagaaagaaaaaaatcaatcaaccaaggaagtagtacaacaacaagagtcaaaacccaacaactctctatctagcacaaaagcctgacttttacaaagacaagccttttcaacacactactgatcttgagaatcctctcttcaaagccatg

SEQ ID NO: 33273 - DNA, 3000 bp, Unknown; identical to SEQ ID NO: 2433
  misc_feature (1)..( 3000): 2750-1469P.txt file - cDNA_ID_3067701; gDNA_ID_1620535; Annot_ID_159849

SEQ ID NO: 33274 - DNA, 3003 bp, Unknown
  misc_feature (1)..( 3003): 2750-1469P.txt file - cDNA_ID_3067703; gDNA_ID_1620535; Annot_ID_159848
atgtcatatcaaacaaaaatacaatgacaaatttggaatatgatgtaagaacatagaacatggaagaacagaggtgacagtaagaaattgcattcaaaatgctataaaagacaatcacataattgatgggagtttttgtttccttcttaaatttctggaagattcaaattgataaaaaccaagattagttgagattgagagctctctgtgaaacatggagcagagtacacatttgattgaacagaaaggttttatattaactcaggggatgaagatgacgacgtccctgataccgttttggttgcatctaactctttgtttccgcctttagtgtgtcgtgagtttgttgttgtctctgatttactaccttttgcaccatcatcctcttcctcttcttcttcatagaatgaccctgaggatctcagttccttcaccttccgaaactcgtcgtaatgtgcttttctgtgtgcgttgaaacgttcatttttaccacttccagaacctgtggttttgcacacaaaaaaaatagatatatcgggatgacctaacaaaagaacctatatatgacagtagatttgtttggttttagaggaggaccttcttcatcttgatccattggatctgcttcttcttcttcttcatcagacgagctccagccaccaccaccagaaccctggctactatttctactggaagaagctgctgcatcattcagaacattcctcagttcttcagctcgttgcatatcatcaacacattcatcaaacgctcttcctctaggagacaaagaacctggcacaatcaatcacggattagaacagatcagaactgattcaagttaaccttacatctagagtgacaaatttccaaatcaaccaaccaattgcaggtacaagatttcccccaaaaagataagtaatcgtccaactttgtagatgaattaaaaagcagataattttcacatacaatttgctcttgctttctgtctgacatacattccatttttacatatatgtttagatgatgacaagtatgtatcaacaataaaatgcaaaaacgtcataagcatataaacgtgtatcgaaagttctgtgcatatactaagagaaaccaaataaagaaaaatagacaaaccatcatcatccatcatcgggtggtatggtgtctttggttcagtaatcttctgcctaacaggtttgttcgattcaatctccactatattagcttcatcccattgaacacgccccctgccataataacaaacatacttagtgacaattccatgagaaactatactagattatacaaaagatcacctctctttacaaaagaatgacgatgtctaagccttaaactaaagacaataaagttcacagaatcttacagttaaacaattctgctggaatatgaaaatccatgaacattaacacaataagacctccctcttccatttcctttttcaatgggtgtagtagaaaatatatctgttttacgattccttcataaaaagaccgccatataaggcttagaacttcatatctatgaatatacatccctccacaaaaatgacataacacagcccattgacttcacaattgatcttatttgaacacattgaaaaggtaccgttctgatgcagcaagcattctcaaatctaatagaaactaaagacacaagcgaaagtaaaaatttgaaaaggagaaacatacttcaaagaaatccatcaaaatcaatccaatctgctaactttccaaacaaaagaacacaatggtataactgaccactcaaaatcacaaacctttaaatacgaagaagcaggaatcagtatctacctctctcatgatcattgagctaaagtatcctaaaatctataaagcaaaaacctcctaaatttctcaaatttgctgagtaatggtttcaatcagaaagggtttaacctaaataaccaattgatatcaaaagcttatcactttcctcaatcattcacccataacatatcccgaaagacactgtaagaaaccctagcctatgtttggttctacaaagaccaaaactaaaatcaaagatagatctttcgtgacaatcatcaaagattcaaactaagagaaaacaatcaaaacaataaaatttatttacctctttggttcggtcatcttcaaaatctccagcaacttttttctttgtctcgatcgcaagtttttaagacctgttgtgttcttgattaaagaagatacgagggtcaactaaagatgcaacagaaaccgtccgtttgtttgacttttatcactgttgcatccagattccgccacgtggattacttcaaacccgttcgattgatcaagcgcgtgaagacttgagtaagggtagtttcggaaatacactttagaagtttttttttttttcctttttcctgagaacgatcgaatcgaagacggagtgtgcaaaagccaaagctttgatctttcattaattcttctcaagatcttcagagtctgtaagtatttttggaatcttatttttcttgtttctcaatcgatgtaaaataaaattcagttgttgatgattttaccatgtttcgggagcttgtgttgatctagttcttcgctctcactaggctaattttgatcttcctgatgtgcacaatgtgaatgggtcttaggtattagtgatttatcggctttttatttgatccattatctatccaaagatctaattttttctgttttgctgaagttgtaaattggaacccttttgtgaattgtgtggtttttttagtttggtattgcatagtggtttctctgaaactgtgaattagatctgagaatggagtcttgtgatctccaattacttgtgtgatgcttttgttatgcttactcaaattatgataaggaagcaaagttatgttgatgctgatgataataagctcttctcttatttttggttcatgtgaaagacaagggaagatcaaagtaattaaataagctgaagtaagaggaagtgatg

SEQ ID NO: 33275 - DNA, 3003 bp, Unknown
  misc_feature (1)..( 3003): 2750-1469P.txt file - cDNA_ID_3067756; gDNA_ID_1620536; Annot_ID_159869
ttttgaaataattcaatttagacgcttgtttttttgtggatcaccaaattcaatttagactataacaacttttaagatactactaatcatttaaacttcatttttttgtttttaatatatattaccagtttgtttgttgcattttgagcctttgaggtggactaatcgacgcaaattatctgtttgaaaacatttgaattaaacaatatagtaaccgtgttaattaattaccgatatagaggtaatttgtcacatatcagtaaaactaatagtatttgaacagaatagcctagttatattttggtttagtttttcataataaagctcatgtgactcatatatactttactttagattcgtcgaaatcaagtcacgtgattaactaagatctagtgcttcttctatggtatctattaccttttaagctttgtatccgctttttccatctttgatcttatattcttattaattattttataagctttcatcagatcctgatgttactctttgtaaacttataaatttcagtaattaaccctttatcaaaaataataagggtcgattatatacatgggttttagttatggaacgtaatgtatatagactatatataagtacattttaaattgataactatagtagataaataagtgttacctaatatgttaaaacatacacaaatcgttgcatttggcgtaatcttaggcttcttgtcaaaagtcgtaagactgattcctaggattccttcattgacactgatgtggttttgaagaggttgtagatttggtactgtcgtttttctttctttgtttcttaatattgttgttttttaaccactccccatctacgtatactcggtccgagatttctgtagagatacatatataagaaattggtaatccaaatgcaattattttaactagataccaaaaaaagaagtgtcttgagttttataaaaattcattaatacccaacgaaattttgtaattaaatgtggacaacaaacttatttggaatttttgtttgtatcttagaatttatggaaatactgctgttgaaggaacaaattacaattttttttttctatggaaataataattcgaaagatgtcaagtatgtctccatgctggggtgtgcggggtccatttgagattgcttgggtttcaccgcatcctaagtttattatccttgagatttgttcccgaacccttattttcataaataaaatagaaaaatacatttaaagtagactagtagagtgataagttggggcacaaaaaaaaaaaaaaactagtaaacaattgctaataaaaaagggtaaaaactatgagtaaacaattgtgaaaatatatataacaagtttttaaaaatatatttatttgatgtaccacgtatatcaatatataatccgttaaataatgatataattacaaaaaaataactcacacacttatatttaataaattatataaaaataacatattaattatttctgtccgtgatcattaaattggaaaagtgaaaacgaccaaaatgatccaaattcatttttctttgctagacattaatattttttccactcaaatatcatttgtttcattgccaactaacacaaacactcattaaactatatataaaaactactcgaataacatttttttttgtttactgaaagtcaaatttctagcaaatgcatcatatcatttacatagatgcaaatatataactttgattggtatcttattcaaaggacggtaagagaaataaatatataatgctatttcataactaatcgtatattaatacgaataacagaagaaccacactgtctctcataccaaataattacatctcatgctcatgcttaattatgttgcttccccacatcctatcatcattacaccattttctcaatctccgcccaactttttcagcaaataccccatgtctccccttaaattattcctagttttattctgttatacattcttataatctcacttttttatctgtgttcaatttttaagtgtctatctttatgatcttcatcaggctttcattagtagacataacaatcgacatatttcttttggagtggggctaaagggttcagaggcactcgatcaagataaacatgaagaactacgaatggttgaaaattacatcaaaataagtaccgtatcctaatataaattgctagctaataaaaattgtaaagaggttaatatcgttgtctcaaaatcatatgtttcataaatataccacatatacaaatctacacatataaaaagggtcattttgatacatttatattccattatctgaagtccaattgcagtaacaaactacaacaaatcggattttaacatactaaggactcgacccatgaatgtggttgattattaaaatgtcacaattattaaatatatcatcttgatctttaatcaatctcaggactcaatgaccgatatttcaaaatcccaatattgaataacgattaattaacaaaataaaaaaatcaataacgcttcatccggagaaccatgacgaccaaaaccttaatttttgggcatgttgaactttcacgtatccaaaaataggtgaacacatgtcgtcaccctcttagatataggatttagcaaaaactaatggccacgatctgttaagagtcaagcgataaaaagcaaagctcctttcgttttttcagaaattttgaacccattcaagtcggggcgttgcaggatccgatttctcgttttgttcttcgttaaaattcaccaggtgataaccaaatacccttgtttcttggtaacaatttcgattttcttgcatggaaaaatgtcaagaaaaatagattttagataaatcaacttgaatatgtaaggccattttcatttaaaatggcttgttgaatgaaaatttcatgggaaccgttacattatttgcatattacaattgtttgttaccggtcttgattcatattcatatatagattgaagaatg

SEQ ID NO: 33276 - DNA, 3003 bp, Unknown
  misc_feature (1)..( 3003): 2750-1469P.txt file - cDNA_ID_3067760; gDNA_ID_1620536; Annot_ID_159890
aagagtaggctttaaagcttccctacgagcttgctcattcacagatagaacactgcatcccaaagattctaggtaactagattcagttgcagagagaactgggtcaaacacttcaatgttatcaccaacccaatcaaactctctcttcatcaagattgcaatgctcagctgaaacctcggagattcataagactcaatgctacctataccgtacatcaccatctgcaactgtgtttcagaccctaacacgaggcgaatctgattcgaaacctcaggagacttaagctgctccaagaatgctgtgtaaaaactcgagctttcgattttcttcagagagatttccatcttctgctttagtcttgcttgtctctgtggatcaatttcaagatcatctgatttccatggttgctcttcttcttctgcttgacctttaggtttcggttttcttcttcttccttgtcttcctttactaggtaagactactttccactcaccatcactgcttgagtttttaacagtcgtttccattgaagcttccacaagaaactggttttcctgatctacttactccacagtcccccaaaattagggtttctactcaatgcaatgattccattggttccgattacctaacatcacaataaatttcgattcctaaacctaattatcaatctctttgcttaactctgatctatctactttgagattgacaaaaatcttcgataccgagcaaaattaaacttacgattagagacgaaaacacaggaggaagatcgaagaagcttgcttgaaatacagaggaagcaaagaacgcttcgaatatgtggtgaccgagtggactcagtgagacatttgtgagtttggtgcgccgagtcgcgcggcgataaagtgaatcagatgatttgtacgcgaagatttggtaaacaggtattgggctagaggaaatggaatgggtctagatacggcccaataaaggcgcgagatagagacaactgaagtcttgtttcctgttatttcttttgattttgttttactaatctaaatatactaaatcagcagtcaattttccaataactgatgcattcagtgattgacacatcagcttagtactacttttttattttttcatttttacgcatagtatgtgtcgtttttatttaactttgtttcattctcaaacgattttctctttcatccccacgatctccacatctccactttctctcttccaaaaactccatgactactgtgtaaaatctcaaagatgggtttctcaacatcattaatcgattactcagaaatcaggtactttgttcatctcaatgaaccaatttaccatcttctatttttgtttgtaattttgttttatatatatagaattctccatagatccgaaaatcatatatccttcttctagatttctatggcttttttttttttttgctttgtttctgctttatttgactgaattcgatttctctcatacatctccatttttccataggattattctttaatacaatcaatgcctatgattctcccgtctcacaaacactcaaagaacaacgacaaattttggcttctcatctgaacagttgccttaaaacaagggtgagtttaatatcttaatcgaagctcaagtgtttttttaatggtaaattaattctcatactttttactattcttctttcatctcttattttacttctttatatttgcaatttcttttttgtattaaaccgcaattgtattttcacgcaagatttttgtattaatacaaatacttcaattttaaagtcatctcttattttacttctttatatctgcaatatctttgatattgtttcaaaggcagcgtctgcgttatgtagttacttacttgtgcacattttacatttttttttagacttccaagctttgggtgtcaacgaatgtttgtaaactgaattactgatgatgagaagaagaacacattacaattggttggagctaatgatgaaataagcggacatgtatatacccagcataattttcgtacttatactctcttatatttctaaactcttgatttgttagttactgtctatcgcaattgattcattgggtagaaaagttgtaccttctttatatctttttcttaatctttgtatattcttcagtcaatgataataaatttgttgtatatttatgctgtctgctttattttaaaaatcttagttaagagttgtagcagatataatttaaaacaatgttgtccctgcatagtaggggccaaatgctagtagtagtttaaaagtaaagtacgtaaaataaaataacgtgtatttttcattataggaaatgtagtttaggccgttattgttctttttcattataaaataacgtgtattttatgtgttgctgtttaaccctaaactcagacagcgaatgttgagttccgatgcagtggtgtatggtttgcggatacagtaaaacttttataaattaataatattagaattgcgaaattttgttaatttaaacaaatattaatttatagagaaattttttaaatttaataattgttttaaaaattgaactcttttcgtagcccaaacccaccggtattgaactctttttggcccacttagccacgttaaagggtcacttgttactagttgtaattgcaactatctgcctaaaccgtcgtgccttttgtctacattctagaaccatgcactaatgacgtggctggagataagttggttgattacacacgtgtcacttagacagagcgagtagactttgatgcgggtaaaagatattttagattatctagctcgctaggccacgttggcggatatttgcactttttctttttttaaaaagaaaaaaaactaggctctacgaattttccggtcaccttctccgatctctgatccgatatttttccacatgttgttgagctttaaaggatttgaaaccgttatgaaagttatgaaaacgaagagtgtgtgaaacatg

SEQ ID NO: 33277 - DNA, 3000 bp, Unknown
  misc_feature (1)..( 3000): 2750-1469P.txt file - cDNA_ID_3067765; gDNA_ID_1620536; Annot_ID_159887
actgttcagatgagaagccaaaatttgtcgttgttctttgagtgtttgtgagacgggagaatcataggcattgattgtattaaagaataatcctatggaaaaatggagatgtatgagagaaatcgaattcagtcaaataaagcagaaacaaagcaaaaaaaaaaaaaagccatagaaatctagaagaaggatatatgattttcggatctatggagaattctatatatataaaacaaaattacaaacaaaaatagaagatggtaaattggttcattgagatgaacaaagtacctgatttctgagtaatcgattaatgatgttgagaaacccatctttgagattttacacagtagtcatggagtttttggaagagagaaagtggagatgtggagatcgtggggatgaaagagaaaatcgtttgagaatgaaacaaagttaaataaaaacgacacatactatgcgtaaaaatgaaaaaataaaaaagtagtactaagctgatgtgtcaatcactgaatgcatcagttattggaaaattgactgctgatttagtatatttagattagtaaaacaaaatcaaaagaaataacaggaaacaagacttcagttgtctctatctcgcgcctttattgggccgtatctagacccattccatttcctctagcccaatacctgtttaccaaatcttcgcgtacaaatcatctgattcactttatcgccgcgcgactcggcgcaccaaactcacaaatgtctcactgagtccactcggtcaccacatattcgaagcgttctttgcttcctctgtatttcaagcaagcttcttcgatcttcctcctgtgttttcgtctctaatcgtaagtttaattttgctcggtatcgaagatttttgtcaatctcaaagtagatagatcagagttaagcaaagagattgataattaggtttaggaatcgaaatttattgtgatgttaggtaatcggaaccaatggaatcattgcattgagtagaaaccctaattttgggggactgtggagtaagtagatcaggaaaaccagtttcttgtggaagcttcaatggaaacgactgttaaaaactcaagcagtgatggtgagtggaaagtagtcttacctagtaaaggaagacaaggaagaagaagaaaaccgaaacctaaaggtcaagcagaagaagaagagcaaccatggaaatcagatgatcttgaaattgatccacagagacaagcaagactaaagcagaagatggaaatctctctgaagaaaatcgaaagctcgagtttttacacagcattcttggagcagcttaagtctcctgaggtttcgaatcagattcgcctcgtgttagggtctgaaacacagttgcagatggtgatgtacggtataggtagcattgagtcttatgaatctccgaggtttcagctgagcattgcaatcttgatgaagagagagtttgattgggttggtgataacattgaagtgtttgacccagttctctctgcaactgaatctagttacctagaatctttgggatgcagtgttctatctgtgaatgagcaagctcgtagggaagctttaaagcctactcttttcttcatgccacactgtgaggccaatctatacagcaacctattgcaagcaaattggagaatggatcgactgtcgaaaatcgcattgtttgggaacagctttcagatgtatgaggagcaagtttcatttgacgcagaagtcatctgtgctaccaaacgaatcatagctgcacaaagagtcacaagcgagtttgctattgagacggaatcagatgattattttgcagcattccatgattcaagctggcattttttcagttctggtatagattcggagctgccattgttcgtttcagactaattttagatcattgttttcaaaagctttttgattttcacttgtgcaacattttgtttatctgtctttttcctccttgcataatcttagccttcaaggcgggcaaaacaattgaagttattgacttatcaatgcagtcaataaaatttaatgcttgtctgatcataataaagatgcaaaccgtggtttatttctatgtcaatcaattgtatttgtgtttctagtctttaagatggtaatcagttgccatcattacgatttgtctatctattttcattggttgcaacttgcaaacaaaaagagaagaaaaatagttgaggaacttttcttttcgtttgtttttaacttttgataatatggtcaatttattaagaaagcattacatcccttatattgagttataaatttagttgttaatacacaaaggtactattcaccaaaaaaacaaatacacaaagatactagttggtttatgtaatgtatttttatcaaattcacctataatttatgtagccatcggttgacaaataaacatattgagccatcaacgtgtaacaattctaattttctaaatactccatcctccacctcattggtcgacattataaaatacagtagtatatcacaaattgtttaatgaaattcattttaaaaaaagaagaaaaaatagttaaaaagtgatataattattttgcagttagcacacttttgtttctggcatgattcacaggtcgaaacgatgtcgtttagtgtctttcccagaaaaaacggagatcaaataggtcccaaatggatcccacaaacagcagacacggcgcttcttttgaattttctactcggcgttttacactttccacgtttggtcaaaacgctccttctctatacgtaacgaccgtttataactccgctatcatctacccagtcaaacactcaccacgtgtctatttaccgtctaatccgacaccgttaattccgctcctaagaatcgccttaaaaaccacgttttcattttctcatcttcaaacctctctgtcattactctggtcagcgattcttctttcttcttcttctcagatcctttcaccgagtaagaagattttaaagatg

SEQ ID NO: 33278 - DNA, 3000 bp, Unknown; identical to SEQ ID NO: 2436
  misc_feature (1)..( 3000): 2750-1469P.txt file - cDNA_ID_3067768; gDNA_ID_1620536; Annot_ID_159885

SEQ ID NO: 33279 - DNA, 3003 bp, Unknown
  misc_feature (1)..( 3003): 2750-1469P.txt file - cDNA_ID_3067783; gDNA_ID_1620536; Annot_ID_159874
gagttctctcatgtctattgacaaactgattgaagatcatcgtgtaaaggaggaattcccggaggaagaaaaacctctaatgccagtagctttatccccttatcggggatctttgagtccctgcggattcagttctgtgataaatggcaaagtagagaatgaggtagatggttttagttactctggtggtagtgatgcttgtcaagtcgggaacttcagtcaagatgtaaaaccggatatcgatggtgatgcagtagttctggatgcgagacctaatgttgtagttagtttaggtagtagtagtagaaccgaagtgccatcaattgggaactgtgtttcccatggcgttcgggatgatgtaaatttgtttagtagagatgatgatgaaaacttttccaagtacattcacccgcgtgttacaaaacattcacctaggactgtacctcgtattggggacagaagaatcaggaagatattggcttctagacattggaaaggaggttcaaggcattcaggtagtagcctgcctaaggggttcttatctgtttcatatcttaaatacatttgatgggttttgttttaatgacatgtatttggtgttgcagatacgaaaccgtggagaaattattacttgcaccagcagaggagctatcctatcaagaaaaggaaaaactttgaccacatatctgattccgttactgatgattaccgtatgcgtactaagatgcatagaggtaaagagactttttacgcctaaacctctgttagatcttgtagctagctttctctttgttgttttaactagatcttgtaaatttaatttgcaggtagtagaaaaggtcaaggggcatcctttgtggcaagcgactcccatggtaacaatggagtctcatctgaattctttgtcggtgttatttacttacaaaagcggagaagctaacatgagaatgtttatttcagtgaaactacggatcaagtcgttcagggtgcctgagcttttcatagagattccagaaactgctactgttggctcattgaaggtaacattacacagctcttcctttcgcctcctattaagaaagtaagttcttatggtcctttggcttctgcagagaatggtgatggaagcagtgagcactttactgagtgatggacaccgagttggtctgatggttcaggggaagaaagtccgtgacgataacaaaacccttcatcagactggtatctctcaggataactcccacctggactctcttgattttagccttgaacccagctcagaaatgcctcaactgttaactaggttcagacttctattcaccacttaaaacccgccactgtgtttaattattcaaatcttttgtggcttaatttcttatttgttttccagtcacccgttgggacatgcttgtgaggagctgctacctgtgtgccaagctactaaaatagacaatgtgttggaatctgaccatcatgactcagcattattcccatctgactcattaggcaacaataatgtgacagaagattctaaagctatgatttctgtggcgctcaacgaattgtcttctcaatcacaaccaccttcccggaaatctagaagaagtgaacagcagcagcagcaggctgcacaacgcagaattcgtcgacctttctcagttgctgaagtagaagcacttgttcaagcagttgagaaactcggtactggaaggtaaaaaaacactaatacaagtcatatagtgttggcttatttgtgattgtgaatagaagaagatgatgattaaagtttggtgaaaactgtaggtggagagatgttaagctttgtgctttcgaggatgctgaccaccgcacttacgtagatctcaaggtttgcattttaatcagtagtttaaattctaaattcggtgaaaccaaatcgcatgattaggtctgagaaataactgtttggtatttgtgcaggataaatggaaaacgctggtccacacggctaagatatctccacaacagaggagaggagagccagtgccgcaggaacttctaaaccgagtcttgaacgcccatggctactggacgcagcaacagatgcagcagctgcagcagaatgtgaacaagctggagcaggagacacagtctcaaacgacagagggtctgttacttctctaaatgaatctgctgcagccttggaggtcgtctctcctttgtgtattactactactattgatgattatgtaagattctgacatagatgcaaagatttggtcttttactttggtttgatttttttaacttttctcaatgtaaagtttttaactggaataaggtttctctgaccagtttagggcttttagaggatctgttgtacatcttttgtgacattctcattctctttacatatttcttatctagactttttaaaaattcctcgtgtgtataattatttgatgtgctacttgtctgattccacgagttcgagttttgtcgtgtgattgaattcgaattgtcacttaccaacgtcgttaatacactaacactatgattggtctgatcgctggatcggtgaaccaattggaaaatccagttcaagttgttttagcaaaaaccaatctcttctctgaaccggaaaactgtaaaccggtcagtacttgatccataagaaaccctccgagtgatttgaagggtttgagctgtgttgaaaatggttcgtcggctctctctaaacccctctttttgtcgactgcttcttcacgccgtcgaggaattcttctccaccaacgaatccggcgacgtcttatcaccaccttgtcgaatctttagttgatgttgtttaaaggtgagtccaaattccacgcgccgccttgactttcatgaatgtgtgttttgatacatttcctacatattccgatgttttctagctagatctccaacgattttctgattgaatttagggttggttacatgatgatctttgactctaactcgcaggttttagctaataagggcatg

SEQ ID NO: 33280 - DNA, 3003 bp, Unknown
  misc_feature (1)..( 3003): 2750-1469P.txt file - cDNA_ID_3067787; gDNA_ID_1620536; Annot_ID_159872
ggtagttcggcatgtgttttacccacgatatatggcgtcggcctggtttatggaggagatccgtttgactcagggcttgtctatagcagtcagttgtcatcttctgtgcctattttgtcaaagtttaatggcatcctcctctccgtgctagggcctgcttttggatatccgattgcatcttctgcaggtaccttaatgcaaacacgattttacctataatctggtaatagctagcatttgcttctactgagataataatgctgtttgcagtaagagtacttaaagggttatggagaaatgacttaacggctctaaaaggagactgcccgaattgcggggaagaggtgatttctttacttgtagttcttttgcagcaacaaacaaaattgttgttgttttcagttctcgtcacatttgagtttgatgaacttgtgtaggttttcgcatttgtgagatccgatcaatcgaaccgatcagctcacaaagccgactgtcatgtctgtgagtgcaccttggagttccgtaccaaagtagaggtagatgttagtgtttttttcccgtgtgttgcttcatcgtgaccttgtttatttgaacaatctctgtggtttaaatgtgaaccagtcactgccttagattaatccttctgtagctttctaacaacaaagattatttgtttggttgtctatctgcttcagaaatctgcctcacgattggggagaaaatgggtttacggtaggatataccttgtttcacggccaaggagagatcggcgttcaaagtttacataattctaacaaaagaagaaagatttttttgggatggtttctactcaattgtgtattgtaaaaatgatactatagaaagcttttgtaacattcaaaagattcataaaaattgttactataacgttttgtctcttgtagccttatcttcagacagtttacaaaaacaaacaaaagaacaaaaagattcgttccaaagttccaatgcctttgctgctgagtgaaaagaatgttgctcagcttttttttcagaagtgtgccaagctatagacaagaatccatgcgagctgaagacagaacattaaacagattctgttagaccttataattactgttaaagaaagagtctgtactgttgagatgaaaacaaacttaccaaaaagagagtaagtgacgcaaagagaccctcttggagtaaagctgcgtggcctccgaaatcttcttcatcaaccttgagaatcattgcgtagtaaccataaactatcccagaggatatcgccaaaaacctgcaaaatcccatcattagttcattacatcacaaagttttgccaaacttaagaggtttcaaagaactgtgatccatgaatctacggctttgggtcgatgcaaaatgaaactaaaacacgaagaaactgatagaaacgaagctggaacatgatccaaaactaaagactgttcctttgcgttttcatcaaccattataacatgaaaacacaaatgtggaaagaaacattagtggccaaagttaatgaaaacttacagaatgatccaaatgcctccaacaagtggaatagagccccataacaatccagagatcaatcccaccacttgtcgaatccaatgtaacacatctcctaattgatcctgcatcatcattaacaaaacaaaatccaattcataccaataactcaaatttacttgagcttaaaattcacaaattgaacagtagagaacagcttgatcggatcaattattcatttccttactgattcagtaagatcgactacgacgattcattaatcaaatctccatgtaaaaaaagtcaaagactcaaagagattgccgaaaactagggaggaagaagagagtgttgagtaccttgtcccaagaagcatcgggatcgaacaatttcgctaatttcgatggagacaagtgagcattctggtgattctcttgttgttgtagctgattcagcttggctgatttcgattctttcatcctcgctttcaaacaaaaaacaaaacaaaactttggatacggagagaatctgaaaccttgggaagaagaaaccccctttgtggagtattgaattagggttcttagatttaaagcactgttaattggtgaactagtggctgagtcgtgagattattattaaactgtgagtgtagttcatgttctgtatcgaagtgattcggactgtgatcgagtttcttttttttcttcttggtaaattaaaagataaatccattagttctagtaattaattatcccttaattataatatattgggattagcttttggatattttggatctgatgcctcaaaatactgcaattatgtaccttgtttatatagtgaaacaaaattatctatactgatgttttgtttttgtctgcaatatattaaaaaaaaaaactattttcgagttctgactttggtcaaagtttgacttttatttgtaaagtactcttcctcaaattcggtcagtttaaaactttagttaatgttgctattaatattaattaatgtagtcatatagtttttaaactaacaatatgagtaatatttatatattattaaaaaaacaatattagtaatagcctaatatttgtcatactgtaatttaaaaaatttatatagttttgaattctcataaaaatttgtgcaaagatattataatttttttttgtgtaaaactgattttatcctttggtaagcttaacaaataaaataaagttatcgttgatggcaaaaaataaaaaaataataattatcctatgcaatttgcatctctagtcctcgttatttaaataaactacagatcgaacccatttctcgttccttttttttagtctccctccgcgtagaagcttctccgagacttgtctctgctttgattgaagaagacgcttgatcgaaaattcccttagatttcgtaaatagggttttacagaaggtgagattacacagagatcggatttgcgaaaaaaaaaaatg

SEQ ID NO: 33281 - DNA, 3003 bp, Unknown
  misc_feature (1)..( 3003): 2750-1469P.txt file - cDNA_ID_3067791; gDNA_ID_1620536; Annot_ID_159870
tccagtttctatatgttacataaatttgatttttaactctgaatcatatacattactcaaaaccttaaaaaggtttcttttttgtttgtctaggttgttcaaaacttgatctttcagtagctaaatatatggatcctctataatctcatttgtaaagctcttttattgcagctttaagatggagaaaaatcaacaaaagcaggaatttctagctgagacctcagagatgaagaacaccaaaaacaacgacgactgttctgtacaacaacaacaacgatttgtgtggccatgggttggtctagtagccaacataccaacggaggtggaaccatcgggtcggagagtaggcaaaagcggttcaacgttacgtgatgagttcactatgaaagggtttaatccaacaagagtccaacccatttgggatttcaagggtcattctggttttgctttggttgaattcgctaaagactttgaaggattcgaaagcgccatgaatttcgaaaggagttttaatttagaccgtcatgggaagagagattgggaaaaaggtaaaacattgtttcagagtttttaaagtcatttgctttcttgacattgatgagttcactttctttgtaaaaggtcatcgcttgagagacaataagctctatggatgggttgccagagaggatgattataatcgaagtgatactgttgggaagaacgtcaagaagaagagagatttgaaaagtatctctcagattgtggaggaagacgagaggaaaatggttcatcttgttgagaatatgtctcaaaccattgagaagaagaagcaaagtaaacaagagcttgaacagaaagttgatgagacttctcgtttcttggagagtttggaattgcataacgttctgttaaacaaaaactaccaagaaggtaaaatagaagcacttgaataagctttaaaaacataatctgttttgtgtttcatgctgacatgtatagtccttttggtttgtttgtgtgttattgtgatgagaagggtttcagaagatgcagatgaagatggaagagttgtatcaacaggttctggatggacatgaaaagtctttggcagaactggaggcaaagagggagaagcttgacgagcgtgcaagactgatcgagcaacgggctatcataaacgaagaagagatggaaaagtccagacttgaaagagaaatggtgattatgctttccttacaaagtaggagaaaaagatcacaaggcaataaaatctttgttgttgttgttgttgtagaatcaaaaggctatgtgtgagcagaatgaagcgaatgaggaagctatgaagcttgcagaaaagcaccaggcaagtagttcgttagtgtttctgtatatattcatgaacaagtaataactaagcttccatttccaacttttgagttcctgaactatgacaacttttgcagaaagagaaggagaagcttcataaaaggataatggaaatggaagctaagctaaatgaaacgcaagagctggagttggagatagagaagctgaaaggtactacaaatgtgatgaagcatatggtggggagtgatggagataaagatattgtggagaagatagccaaaactcagattcagcttgacgctcaagaaacggctctccatgaaaaaatgatgactctggcacgaaaagaacgtgcaaccaacgacgagtatcaagacgttcttaaagagatgattcaggttcgaaaacgttctaaatctatctgttccaaactctttggcttgtccttttaacttgtgtaattactttgatgaacaggtatggaacgccaatgaagagttgatgaagcaagagaagattagagtgaagagaatggggcaattaaaccctgcacccttcttgcctgcagtgatgaagaaacataaagttacacaatcaaaggcagagaataaggctatgaagctgtgttcagtgtgggaagcaaacataggagatgtgcaatggactccatttagagtcgatgagtctgatggaacaccaaaggttaggactttaatttaggagtctactttcaattctcaaaagatggggttttagcaaaaaaagacctctgcttttacatattatatcatccacattccaaatgtgaaatgcagagagttgtggatgaaaacgacgagaagcttcgtacgctgaagaaccagtacggtgaagaagtttataatgaagtggtaagaacaaaactagagattgaggaacataacgctagtggcagctatgtgattttagagctttggaactatgaggaaaaccgaaaggcgacgatggaggaagcaacagatgtgatgttgaagataaggtccaaacttgctgctatgaagaacaaacgaaagaggcttgaggtctaacttaaagaaagaagacaataattcaagtaacaataccggagacgagaaagtgttctgtttttcgttaatttaccagtttaaattagttttgctactacaactattgtaccgaattggattttgtttcttcaaaagtttttctccacaaatcttatgtgttgtttgattttttacgtggagtctggagctgaaaatctttttccggttacgtatgtttggtaaattgggttacgaagttcttacgaatatataattcaactgtcgaattttaacaaaaagcgtctgtagtccaacggttaggataattgccttccaagcaatagacccgggttcgactcccggcagacgcaatatttatttttatacatctattatcaaatttttaatacatttagcaacgacatcgttttattataacccgccaaaatcgtatcaccgattggaagggtattatcgtctaatcataaaacgtagtatgttgcgtgcacgcgccgaaccaaatcgtgtggccacaatttctcggaccaaccgtctccaccacacgctttgtcttctctttcaatttgtttccggcgagtgaagaagaagaagatatttgttgctgatg

SEQ ID NO: 33282 - DNA, 3003 bp, Unknown
  misc_feature (1)..( 3003): 2750-1469P.txt file - cDNA_ID_3067811; gDNA_ID_1620537; Annot_ID_159928
ggctgcagtatgggttttactcatgccattaacttacgcatacagccacacctctattttcattgtggctattcttatctacttatccccaaacatgctcccggaaatgttgctcttgattcctagcatccgacgtacacttgaaaagtctgactttaggccagtgaaattgataatgtggtggtctcaggtatattattaatatatcctatgttgatacactgtcaattcatacatgttgataaacaaggtgattgatcatgattcttggtgacgcagcctgaactgtatataggaagaggtatgcatgaaagtgcatggtcaatctacaagtaagaacatgcatatgcttgttgaaatgttggttggtcttcctaaatttcctaatgaggtttctatgaatgattttaggtacatgatgttctggattgtcttgttaacctcaaagcttgcattcagttattatgtggaggtatcacaatttcacttatcttcaactttttgttttgctgtatgtaaggaaacattaacattaaaacttagagacatgcgtttctctaataacgtcacggctgaattttagtgacattttcgtcagtccatatatatgttctcatacttccatcttcaaagcagattaagcctcttatgggtccaaccaaagaaattatgagtgttcctatgccaggctactggttgcccgagtttttccctcatggtaatggttaatagcatgtggatattttcttattacatagtgaagcctttattcaataatctggtttttccttttgttttgttttttcagttaagaacaatagaggtgttgtgatcacactctggtcacctgttatccttgtgagttagaatagattcttcatttccatatggtcatttctcacactctccccaatctacgctaactttcatatgcaggtttatttcatggacactcaaatatggtatgctatagtatcaactctggttggaggtttatatggagcttttcgacacatcggagaggttcatactttctttaccataaattttaaaagaatttaggaacagcttatttcatgaggaaatgacatgctaataaatctttttaagggttatggaagaataaaatagttcaaacattggcataatgtcacaaaagcctaactaagcaccatatgtttttttttttttttttggtgtggtatcaactaaccatatatattttaacaagttagttggtctttgttgagtatatataagtatagatttcaatggatttatacggaacttttggtatagaactgtttgggaggcttagcattgagaaataattgatgctctagaatttatcctttaggttctggcttgcgtttcctagctatattgtttcttgaaagaagtttatttcattttctcagatccaaacacttggaatgttgaggtctagatttcagtccttaccaggagcctttaatgcttgtttgattccaaatgagaatacgaaagaaaaaggaattaaattggctttctctcgcaagtgccacaaggtctgcttcctactattattatacggctatatgtatatatgaaatatcaagatatatgaggcaaacctatatttattaaaattaaaatgtgagttctcagtatcattgcttttgaatagaactcactttgagttgttgtttttttttctttttcagatcccaaatactaatggcaaggaagcaaaacaattttctcagatgtggaacaccataattaatagttttcgagaagaggatctgattagcaataggttgagtctgccatcgaattttcgtccgtttgacaactaaaagttattgctaaatccttctagctggagaagagtttactgattaattaatgttgataagtatgtagggaactggaactcctgctgatgtcatgttgggcttaccctgatctggattttatccgctggccaatttttctgttggccagtaaggtaaatattatccttgtcttaaatctgatcttacgttccgatttcggttcttatttgcatatgtacttgtgtttatacatggtagatcccaatagccgtggatattgcaaaaaaaaggaatggaaaacaccgtgaactgaaaaatatactggctgaggacaattgcatgagttgtgctgttagagagtgttatgcttctattaagaaactcttgaatactctggtcaccggaaatagtgatttaatgtaagtatcacaaaacttatcttatataaacttttcctataattagcttatcctatatagttgtcctttcctaatttatttgtctttgtacaggctcataaccacagttttcaccattattgacacacatatagagaaagatacactcttgacagagttgaatttgagtgttcttcctgatctgcatggccactttgttaagctaactgaatatgtggtaagccttgtagccataccatgttcaacatctcatcacccttggcgcgaattcaggagaataactgaaattagccttcttgcaacagctgcaaaacaaagacaaggacaagattcagattgttaatgtcttgctgaaaatattagaaatggtgacaaaagacatactaaaggaagaggtttcaagtaagatcacctgactttaaggtttttttgttgaatggttgatcaatgttttttttttttttttttttgaagcatgctcatttataatttcctttatatagcttgctagagttatgccactctggatcatacaaggttcatcaccaacataaatatttcagcaaactccagttcccagcgttctctcaaacagaagccgagaaagagagagcaagtctcctctttaaaatttcatccttgcaccattcttgtttccatgaaaaggggtgcatttgactctaagctgtgtgtgattctctattttttttttctcccggcagatcaagaggcttcatcttttgcttactgtcaaagagtcggctatg

SEQ ID NO: 33283 - DNA, 3000 bp, Unknown; identical to SEQ ID NO: 2447
  misc_feature (1)..( 3000): 2750-1469P.txt file - cDNA_ID_3067823; gDNA_ID_1620537; Annot_ID_159925

SEQ ID NO: 33284 - DNA, 3003 bp, Unknown
  misc_feature (1)..( 3003): 2750-1469P.txt file - cDNA_ID_3067827; gDNA_ID_1620537; Annot_ID_159923
atcctagatgtaaaatcaatatacaattatgaagtttggattgatactaaaacttttttgaagttttcaatattataaatattcgaacttcataagaaaatgacaaaatgatgtttaatttcacgggacgaggttatatggtgggatgggtttggattgatattaatacgggatggtatattatgaatgtatctatagatcatcttaaaaacaaaaatttaattttttatttaataaaagtataggcctattatatacctcttgaatatgttatttgtatataaataatattaatttaaataaaaatctttaattttttaacaaaaatatcaacctgcgagcagcggtgtaccgcaggtcaatctctagataatacaagttttaaatcgttattacccctaaccacaaaagcaaaataatgaattttaatattatgtgtcaatatcatattattcatatacaaataataattcttataaaaaaatgaacatattcatccgaggtgtcccgcgggtcaatatctagttttgctagactttttggccaaaaatccctatactatttactattaacattcaggtccttacaaattctatctcaaccaaatattttatgtataaaaacttacaattcgttaatttgcattaaatacttcaattaactctctcttaaacttttttcttaattaaatctttctttacagaactatattcgattaaggctaatttcctaaaatctcaatatcgatattaaatataaacatagaatttttctgtcactatatttgttcttatatctaatttatttttactttatatataaaatacatatagttaataaaatatatgattttctgcatctgatataattcgaaaacaaataaataacttaaaagtatatttttttaaagtaataaaaattgtccggaagtatatcatagtatcatacataaaaaacaatagcatgtatctataaatcatctttaaaaagaaattcaattttttatttaataaaaatatatgcatgtgatgcacttcttgaatatgttatttatatataaataatactccctctgtttcataatataagttgttttagaccaatttttttgttttacaagaaaagttattttctagtttctatgcaaattatatgttactttaatattttatgattacttatattatttagtctcttttatgattggttgaactttttcaaagtaaatattcttaactgaaacaacttatattgtaaaacggagggagtattaattaaaataaaaatcactaattttctaacaaaaatatcaacctgcggtttaccgcaaatcaatctgtagataatacatgttttaaatatttattacctctaaaaaaccttaaccacaaaaatactgaattttaatattaaactaatatacaacaaatatcagaacataaaacatgaattatccaaactttacatagaaaaaaaatatatgtcaaaaatatatgccgtgaattcgaaacttgtgtttgccaaaacaatcgcacatttgcaatttcgttaaatttctgtcttaaagacataatctttttgatcatttagcttccatagctaccgtagtatctaattccttcccttagattttgatttctctcattttatgtttagcgttaacgcaaacgagttcaaaattttgagttttcggtttcttatttttagatacatgcctcatatttagacttttgctggtatcttgcttgattccttttgcaatttctcttgtttaccttgaaatataattttgtattgattgataatacacttggtgtgagcagtttttgatgggaagggatcaaatggataacattgtggaatctttgcaattagataagagtaagttcttagaggaatcgagaaagatgacattactaagctctttcagccatgtctaaacattttcaaatgtacagtattaaattacattgtagataaaagcgcgctaacagctcctcgataattatattacaaaaaaaaaacgtgcggtttggcgtggtttgccctagaatttttaatgtcttagtactccaatgttttttataaaatttaatgttggattttaagagtgatttttctatgattaatatacatataaactaaattccttaattattatttttgatacaacttaaattgattcatgcacttacccttgctatacagaaacctagaaagaaaatttgaattttggcatttaatcttcacacacattattagactttcgatttaattcaattaaaactcttttttcttacacattaaaatttgtggttggacactatatatatccttttgctttgacgggagttgtgaaagcgacaagcaaatatataaacgaccttatcaacaaagcaaacgtatagctacaaacgattgtgagcttttatatcaaacaatgcaaacatatagatcctcataactaacgtggtacacccatatatataacttatatatttgtaaatctgcttaaaactttacaacttacggcctttatacctttagatacggctatgcaactatacttttactggatttgtaggtttgcatgcaagatttaagtgccataaacctaaagcctaagggtcaatgtaaatataaaacaacctaaatctagatctttatatcactttgctcttttcatgatctctctcttaagtttggttttcccttctttcctttcctctagtgattcaccacctctgtcaccgtggcaagaatgcatagtatgtctgcctatttctgaatgccgcatgcgattttaaccacacaaaataagagggaatcaaaagattttttagaatagtataaatttcattattattttaattgatagactctatggaaacagccatttttctgaagaaaaaaactacggttctagcctcaaaactatcacgttatcttccatgtcaactgtcggttacgcacaatgttattttagtcaaattttaatagatg

SEQ ID NO: 33285 - DNA, 3003 bp, Unknown
  misc_feature (1)..( 3003): 2750-1469P.txt file - cDNA_ID_3067845; gDNA_ID_1620538; Annot_ID_159962
ttgggggtaaaatgttaaacatatcttaaaaggttgagtttcacaaaaaggttatcaagagttttgagaagaataagagacaacaggtacatacaatagtagaagatcagtaaaacctagcggttaattgttgtaaagctaatctagatatgtcaacatgtaaagctaagttatacgaggtcatgtagtatggtggttttctagtttaccaggctctcagtggacaaaagtatttgtcgatttgataccatcttcctcgttgtgcgatagtgtaagtacgctccacaatggaaatagagaaaaagaagggtaatcagctagagttaaatccatcggcaaaatctaacacacatagttttcactcaatcactctagattgatttaataagtcatttataaaagttcttaatcctcaaatttctatggaaatttttgttcatatgatttaaaattttgtacggagctccaaagaaattaagtttacttggaagcgaaactcgactggatttgtcagacggaagactcttacattggatttaagctagagaaatttttattggatcgactagataagttgttctctcaaattgatactcgatactcaaacttgtacacaaactaaactacaaatgctacgttgcatctggtatgaattatgtctcaaaagaatccgaccagatccttttcaaggttacaccccgacaacaaaaccagcttggtaatttgcctggaaacgagggagttgaaaacgtaattcttggttcacaattaatcctacatttggagacttagtgcgatttagtcgctgcaaatttgttggtttgtccatcttagtttattcaacttgaatctcgctttcgtggtccaacttttgatttgaatagcatctccacaaacagaaatacacatcttttatttccagttttaaaaagaataaataagcctcaagcagctatcaaaatataatgcaatattgtttaaagagtttcattttattccgtagccatttgaacagcattcgacatataaattttaagtttagccaacaattaccgattcttgccaaaaaaaaaaaaaaaaaaattaccgctttaatgtttaaaggacgaagaaaacgtgttattttaactttaaattatttttaaaagtttaataattattgtgtatgcatggagaagcaataagttacaccaagtaacacttgagacatatacttgatttttttccattttcaacgttataggaaaattggtgtgaattagtatatccttgtctttttcatgccctgcaacttgcagctgcttatataaaggactaaggaaaggagggacactttcaaagctcattagtaatctaagactttttcatattttccaaacactaattgaagaaaaacatgcaggttcgattctttatatatattttcctaatctatgtttcttaattggaagcttgtaataatttttccgaatatttttttattgcttatatatcaaatgtcataattctaccctaattagctctttaccataattaatattttcatgacaggtagttgtactgaaattagatgttcattgtgaaaaaaccaaacaaaaagctatgtcaactgtatgttgtctctcaggtataaacaacactcatcaattgctaatatatattttttttactcataagcctctaaattctcttaatcaattgattaaatcataattaagtacattttgatttttttttgtattgaaggattattttttcttttggtattgaaggagttaactcggtggaggtgaaagatggtaaactaacggtgacgggagagattgatgcctatatgattgtgaagaaattgaagaagatatgtcataccgagtttatatcggttggaccggttaaagaaccagagaagaagaagcctgatgatccgaagaagcctgaaacgaagccaccagatgtcatttatcattatgtccctccatgtccaccttattaccataatttcaacggatgttacaatgaagatcccaacgcttgcgtcacctcttgaaaacaatattttggtcggatcagtttggttcacgatagtcatcactcatcagcttcgtcgtagtctttggttttgttctattgtgattgttttaactctttcagtccagtccattatacacactcaacatgactagaccaaggttgccactcccaggcccatttcttgttttaattccttttttgttttcttgttaataacatgcatttaaatttagatgacgacgcattaattgaccatatttaacacaaatcactaggttatatacgtctaattcaaatgattttgtttcataaaaaataaaattagatatctagtgatcttatagtaatatataacagtaatctaagtagactgctccacaattatattttactttatttaaaaagaagaaactacgtaagaggtaaataaagtacatctttaaaaacaaaatttatgaatgaaacattgtgactttaatctcggtttgatttcgatttcagctttggttttgatatgattcaacttttacctagagaacttgcttgagaagttcttatgaccgaagaagtcaataaggtccaaccacaaatcaacgttgtccgggtcgtacacgcggaattctgaaaactacacttccttttgtgttcgttagactcaaattaattttcaaccaaatcataaaaataaatataaaattggtagagaatgagtcattctgaatgactactttaacctctttgtggtcgttattgcaatactatttttatttaaaaaatacaaaaactttcccttgtggccttgtgggtcatatataataatacttgcaaattccttggcaatttctatttaaaccgatttcagtagacttgctattgtcatcatttcatatcttagatcatctctcttctctctctttctcttaagaatattggaaatttctgaagcttttctatagttgatctcgagccatg

SEQ ID NO: 33286 - DNA, 3000 bp, Unknown; identical to SEQ ID NO: 2455
  misc_feature (1)..( 3000): 2750-1469P.txt file - cDNA_ID_3067882; gDNA_ID_1620538; Annot_ID_159947

SEQ ID NO: 33287 - DNA, 3003 bp, Unknown
  misc_feature (1)..( 3003): 2750-1469P.txt file - cDNA_ID_3067886; gDNA_ID_1620538; Annot_ID_159946
cttagtatagatccacagaacttggatgcgagaccaaacttagcgattgaattagtagacaatctcgagagtatatcgagaatgatatcaatcgggattggatctgattttccttctctttccatcgtacgtttttcaaagatcgtgtattttggattttggttccagttccagttccagttccagttccagacttaacgtagacgacaacctagggttcaaaggcaattcattcatacctaatgggccgaatgaattcatgggccatgttagaggcaactaaaaggctggacgaaactatctattttagccttttaggggaggtaacgtattaatgtccccaactatcttttataggatgcatagttggttttaactaacattaaaggtgttactaacaatgggcaatgatggtaaaattataacgcagtggacacaatataacttagccataccaatgcaaagaatcttgaaactagtattaaactcagtcacgtatatgctctccagtctatgcttcgaagagctttcttctaatcccatacgaagaagctctctatgtttttctaatttaatcaggcttagacaactagtttcaaagtcataattcttggtgtctgagttgtcttccctttccatcgagttttttaaagatcgtgtcttttggtttccagttccagactacgtaggcgacacttcagggtttcaaaggcaatggcactaaaagtcactaatgggcctaacgacttaatgggccttgtgaaacgttacccaataagagacctggtttctcactgagttcaaccatcttcttccccatggctctgaattcttcagctttcttcgttccatgtcacaattacaatcaaatctgtgatcttcttctttcttcagctcgaaccagatcaactattaaaggacttcagcttcatggctatgtcgttaaatcaggcctttctcttatccctctcgtcgctaacaacctcattaatttctactccaaatcacagcttccgtttgattctcgtcgagcttttgaagatagcccacaaaaaagttcgacgacttggagttcaatcatctcttgttttgcccagaacgagcttccatggatgtcactcgagtttcttaaaaaaatgatggcgggaaaccttagacctgatgatcatgttcttccatcagctacaaagtcgtgtgcgattttgagtcgttgtgatattggtagatcagttcattgtctatcgatgaagactgggtatgatgctgatgtgtttgtggggagttctttggttgatatgtatgcgaaatgtggagaaattgtttatgcgaggaagatgttcgacgaaatgcctcagagaaatgttgttacttggagtgggatgatgtatgggtatgcacaaatgggtgaaaatgaggaagctttgtggttgtttaaagaagctttgtttgagaatctcgctgttaatgattactcgttttcgagtgttattagtgtttgtgcaaattcgactctacttgagttaggtagacagattcatggattgagtattaagtctagctttgattcttctagctttgtgggaagttctttagtctcgttgtattcaaagtgtggtgttcctgaaggagcttatcaagtttttaacgaggtgcctgtgaagaatctcgggatttggaacgctatgctcaaggcgtatgcgcaacattcacatactcaaaaggttattgaattgttcaaaaggatgaagctttctggaatgaaaccaaatttcataacttttttgaatgtgctcaatgcttgtagtcacgcgggtctagttgatgaagggagatactactttgatcagatgaaagaatcgaggattgagccgacggataagcattacgcttccttggtggatatgttaggacgagctggtagattacaagaagcacttgaagttatcactaatatgccgattgatcccacggaatctgtatggggagctttattaacgagttgtacagtccacaagaacacagagcttgcagcatttgcagcagacaaggtcttcgaattaggaccagtgagttccggtatgcacatttcgttatccaatgcttatgcagccgatggtagattcgaagacgcagctaaagctagaaaattgcttcgagaccgaggggaaaagaaggaaacagggctaagttgggttgaagaaaggaacaaggttcatacatttgcagctggagaaagacgtcatgagaaaagcaaggagatatatgagaagctggctgagttaggggaagagatggagaaagcgggttacattgcagacacaagctatgttctgagagaagtggatggtgacgagaagaatcaaaccataaggtatcatagtgagagattagctattgcttttggactgatcacgtttccagctgatagaccgatccgagtaatgaagaatctgcgtgtttgcggtgattgccataacgcgatcaagttcatgtccgtatgtacgagacgagtgatcattgtgagagataataatcggtttcatcggtttgaagatggcaagtgttcttgtaatgactattggtgaagaagacaaatgagagttggtttatatttaaccataatttcattcagttcacactgaaccggcgaaatttctttgccagacctattcggaattgaaacaagtggagtctcgaaacgaaaagaactttctggaattcgtttgctcacaaagctaaaaacggttgatttcatcgaaatacggcgtcgttttcaaagaacaatccagaaatcactggttttcctttatttcaaaagaagagactagaactttatttctcctctataaaatcactttgttttttcctctcttcttcataaatcaacaaaacaatcacaaatctctcgaaacgctctcgaagttccaaattttctcttagcattctctttcgtttctcgtttgcgttgaatcaaagttcgttgcgatggcggatgttcagatg

SEQ ID NO: 33288 - DNA, 3003 bp, Unknown
  misc_feature (1)..( 3003): 2750-1469P.txt file - cDNA_ID_3067894; gDNA_ID_1620538; Annot_ID_159941
atcaattcacgtgttaaacaaaaataacatgcaaattatcaattgatatctcatatgtttatttttgaaaagggttatatattcttgcctttggtccaagaaacagcccatatggtacacctttgaatttgtctgtgtggtgtagctaaaaagataaagccataatcgttagcaaaattttgtaaatcaataataactatatggaatgaagaacgttaagagcgttggttaacgatggtattaaaacctggtgagcggcggcgacctttcgaaggtaaggaacgttggcaatgggacctacagggaatctcttgtgcacaagtccatcgtgaacgaacatgtaagccattccaaacatcgttattcccagtccctggtgatattacaaaccagtcagcacaaaaaacaagaaacagatagtactcgtatagtggtttcattagtctaagtacacccaatctttcatgtttggacgggtactagatgataggtctcacccaactcacacgttcacactctttgtgggacggtgaaaagaaaaaaaaaaaccacaaaaaattttcatactttcggtttccgtgactttatttaaagaagtcaaataccaatttactattgcttctctctttatagaaaaacaaaagacttttgatcttttctttataagtttcggatattgtcgaaagagagaaaaaagacttacggcaccgaagcagagaccaggaacaagtcctttattcaagaatccataatagagtagaccaatcgcaggaaccgcgtttgttatagcaaacacatcgtttaactcaaacgctccttctcttggtttgtgatgtgactgccacaaaccaataaccggctatgaatattcttaatttgttagcagtaaaccggaaaagaaaaaccagaataatgagaaaaaatgaaatacctcatgcatgttccataaagaatcatgccaaagagctctatgagcccatcttgcccaaaactccatcccaacctaaaattcaaatatacgaaaatataaatgaatcggaataagcatggacattggctttttacggtttaacttgttctggttattgaacttcgtttttttcggatgttagaaaataggctgaaaacaaatgtattttgataagtctagttaaaaataaaatttcttatgaatttgtggtttaattctgtttgtttgcatagaattttatttagtttgagttataaataaaatttggttcggaattagattgacatatttcggtttggtttggattttcccaccccaaaatgggaatataatgtaggaatgaaacttacggcagcaccaacggaaagagcaaatgtaccaaacatctctaacacagacacttcacctccctaaaaaaaatcaaatttttcacttttggaaattaggacaaatagtattgaattttcgttatttatttatttattataatttaccttcatttgccaagaaaatcggtaataaacagccattatagccatagaagtgataccaaagctcgacatcacagctgctattaaataagtgaacctctctgatttcttcttctccgctttcttgagaagccgcgacgtcatcaagatctcagaagagcttgtcgtgctttctggtttgttgtcatcgtccatgggagagctttgtttccgttcttccacgacgaaacaaacggtgagaatctttcgacgtcggaagccgttgaatcttagagatggagggaaaactgcggtggatatagggtggtttgcggagaaagaagagcggttgagtggtttgagtgttacggcgattgttgatagtcctgctgccatggaaggagttcgttgaggttttatgaaactttaacgaaagagagttatagagacaaatataaagagaaacacaaggagactattgtgtggtaaagctttgcagagagaagagctaaatggagagaggccacatttttattttcttttacaaacaaattatataaaaactataccattttgttttttttatatgttgagtcaattacaataatattgttaatgtttataataagaaaaacatttcgcaaaagcaagcatataaacaaatacaaaaagtgagtttattagaatttgaggtaaggagaggtgatggcctgatgggccattttctaggattttcccaagtcatcgacagcgaatcactccacttctatttaatggctccacgtggcctcttcttccaccgaataggcaagaggagtatcaccaacttccacatgtccaatccttatttgttcatattgtttcatcagatgacactcttcaaaggtaaatgaggtattgcttgacatgaagcttctagttctcgttctaaacttgtgcgacttaaaaaggatctcaagtatacaactacaggtggtttaatttacacaagttgtttccatgcattttcaaaacagatttcagcttgatttgtagttttgacaagttactaacaaaacaaaatagcaaaagttatgactgaaatatatgaatgtgactatgtgagtgatcagagcccagaaaagttactaaaaagccgcagcataaactaattgtttaaagttacagatcaatttgctttggttttaactaaaaggaaatattaatttgctctgtttgattagtatgttactcaactaaaaatatgcatttctgataaattctggttaatgtggttctgttacaccaaattcgcattttactactatagtaaagaaacttatttcgtattattcggattattataaagttgactaaattcgattcgattacaacttggttcggttcggttcggttacaacgccgacctgtaattaaaacctttttaactgcaaaattaatgaagatacacacacgtaatcgaatattctcaacgacgcgtaagcttcctctctaattacttacttcgtctccagggtaatctgatctctctcatcacctctctcttctcctgaaatcaccatg

SEQ ID NO: 33289 - DNA, 3003 bp, Unknown
  misc_feature (1)..( 3003): 2750-1469P.txt file - cDNA_ID_3067898; gDNA_ID_1620538; Annot_ID_159939
tatgagtcatcacaatcttcgccaagtaagacgtgcagagcaacagcctctgctatggcggcaccttcctcatccaatcgcctttgttcctcaagttttctaagcttcttcttctctagctcagccctgatggctgcagaagtagcgatggatttctcaatacgtctctttttcctctctgcttgtttgatacgctccagttcctctctctcctgcttcttctttgcagcatatgctgaatcttcttcaactgctgcgtctagctgtccttccttcttcatttgcttcttcttctctagctcagcgcggatcgctgcagtagtagcaatagctttctcaagacgtctctttttcttctcagcaatggcagcaccttcctcagccaatctcttttgttcctcaagttttctaagcttcttcttctctagctcagccatgatggctgcagaagtagcgatggatttctccagccgattctttttattctctgcttgtttgatacgctccagttcgtctctctcctgcttcttctttgcagcatctgctgaatcttcttcatctgctgcctctagctgtccttccttcttcatttgcttcttcttctctagctcagcccgaattgctgcagaagtagcaatagctttctcaagacgtctatttttcttctcagcttgtttaattgggtccactacaccttttacttttttcttcctggcttttctaacaattggctgagcttgtttgcacatcgagctactgctatccatgattgctacaagtctttgtttgccttgcttttgttaactggcttcttcttttagttggttgtttccttttactttgattctaccaaactcactacaccaaggcgcgatgatctcaatgactactacacccactcaggtatgtaggtatacctcattttacggacaatacaatcccaaacagaaacaacaggagataagagaagggagacgttgtaggagtttgcagagttatcctttgaaagcattcgtcctaatttccaacatcccttaacttctcccattttctacaaaagaaaacaatactagattagacttgcgttaacagggatctcaaaaataatataccaaaccaaaccaacccatctgctttcttaacctaatgaaagctgcacgaccacacagttctattttctatatggctatatgcaaaaacattaaacaagaaagctttttcacaaccagatgttacccagctgattacttaattactcactcaggttaccaacctataaacacaattgcacaagggacctagaagatacagtgattcaaaagaactaacactggtcaacaaaccaagataaatcaaccaaagttgaatgtacatactctcgatcaacattgaaacccaaattcggaaagctagccacaaactacacaaagtaatccacgaaacatggacataaaaagtcaatttgaaacaaatcataagccaaatttaacgaaattcatactgcgcacactaaatccgggacaaactgcgatcggatgaatcaacctataattatcattcagaaactaatgcatacaccaaaatcaaatcaaagcaaacacgaaacgagtaggtcgattcagagatcaaaacctaaggcaatcataaagtattacaaaatcgactcaaattggattgatctatggaaattgaagaagattgaatcgaagcaattatgaaaaggaattggatcctaacctcggcaaaatggcatagaagcagactacctcgactaacttctcctgagatttatcggatagaaagagagagagagagagagaccaaatcgcggacgtaaagttactacttcgatccagagagaataaacgcagagacgagagaaagaagattttgagaaagaagattttgagaaagaagagacactggagcggagcaattatgttatatttaatccaattagaaagtaacacgtggtggatgatgtgttgagtggaggttttcgattgggatttagggacctaaaacttgattagtcaatgatatatgtattggatccacatatatttttcagccgttagattcgacaagtattgccattaatatttgataatgaacggctgagattggatcttagagaaagcaacaagtgtatgaatgaactgtcaaaaatagaaaacctcgtgggccttttctgggctaaatcttttagattttgatagaaaatgtggatgggctttcatcgagctccagttccgcagcgctcttctctaatatatcttctccacggtaataatatgttaggtgggccatgtgttatcagaaaattattaaaattgtgattattattcgtaaatacattgcttaaaaagttagttagattttgattcgtttccaccagacgaatcttcgtaacgcattttcgttgattcactttccagctttatctcaaactctctctctgtcgtctcgatcgatctcccaaatctcaaattctgaattgattttttttgtttataaacaaagcaaacaaaacacataattttggttcggtcttcttcaattttcaccgacacaaacccgtcttttcctcttctctctcatttctatcaatttttctctacaattccccagtcgtcgaagaagctacaggtaaaccgatcttctcaattttcatctcttctcgtcgcattatgctcatacctcgccgcgagaggatatcaaaaagcgagatttgttatttttgcatccgagaattttggttatggattacacaaccgaattaatcgaaattctctttgttcgtgtttcccttgatcgccacgaaagtttcagatttttttttggatttcttaaccgaatttagtttaatcttgctcatgttctgtttcataccatgttctgaaatattgtttttttgaatcataccttttgaaactcatcgccaccagcttgcaatttgctcgtgttctcttccatcattcctttgttaagagcctcttcatg

SEQ ID NO: 33290 - DNA, 3003 bp, Unknown
  misc_feature (1)..( 3003): 2750-1469P.txt file - cDNA_ID_3067918; gDNA_ID_1620539; Annot_ID_160008
attcgtggaagaaatcgcgtgcggagctcaccatgtcgcggttttgacatctagaagtgaagtcttcacgtggggaaaaggtgctaatggaagattaggacatggagatacagaggataaaagaacaccaactttggttgaagccttgagagataggcatgtgaagagtttatcttgcggctcaaactttacgtcaagtatatgtatacataagtgggtatccggagcagatcagtcaatctgctccggatgtcgtcaagcattcggatttacccggaagaggcataactgttataactgtggtttagtccattgtcatgcttgtagctcaaagaaagctttaaaagcagctttagctccaactccggggaaaccacatcgcgtatgtgatgcttgttacagcaaacttaaagccgcggagtctggttatagttctaatgtaaacaggaatgttgcaactccaggacggtcaatagatggatcagtaagaactgatagagaaacaacaaggtcatcgaaagttctcttgtccgcaaataaaaattcagtcatgtcatcatcaaggcctggattcacacctgagtcttctaatgctcgtgcctcgcaagttccatctctccaacaacttaaagacattgcattcccaagttcgcttagcgccattcaaaatgctttcaaacctgttgttgctccaactactactccaccacgtacacttgttattggaccatcatctccatcaccgcctccacctccaagatcatcctctccttatgcaagaagaccgagccctccacgcacttctggattttcaagaagtgttatcgatagtttaaggaagactaacgaagttatgaaccaagaaatgacaaaactgcatagtcaggtatcttcattactttttttcttgttttcaagcaccaaacactaacaatataataaacctaactcattattggaacaactcaaacttttaggttaagaatttgaagcagagatgtaataatcaaggtacagagattgaaagatttcaaaaagcagctaaagacgcttctgaattagctgcaagacaatcttcaaaacataaagcagcaacagaagcactcaagtctgttgcagaacaggtttgcttcatttgttttatgctcaaagaatctttttttttttgttgcaacatatcatatgatattttctatttcagttaaaagaattgaaggagaaattacctccagaagtatcagagagtgaagcatttgaatccattaactctcaagctgaagcttatctaaacgcaaacaaagtatcagaaacatctccacttacaacttcgggacaagaacaagaaacatatcaaaagacagaggaacaagtaccttctaactcaagtataaccgagacatcgagttcatcaagggcaccaagtacagaagcttcatcatcaagaataagtggaaaagaaagtaaagaacaatttgagcctggtgtttatgtgacttatgaggtagacatgaatggtaacaagatctttcgacgagttagatttagtaaaaaaagatttgatgagcatcaagcagaagattggtggaccaaaaacaaagataggttgcttaagtgttatagttcaaattcatcatcatcatcatcatcatcgaatccaacggcttccgactcacctgttgctccacaaccaccgtctgatccgtcggtacctgaacagagcaatgagaaggaaccagattctgaaacctagtcatatgtgtgtaagtttatttattgttttcatttgtatcagttacagaagcaaaatggagaagtagtcactactgctagtacattgtcacatgttaacagtaatgtatgaaccgagttatatactaacgtataattttgtatacaaacgagctgagtcttttaattacatttatgttcatttaaatttattgtatttttcacatctctattttatttttattttttaagcgctaacaactttttatttaagattttttccccccaatatactcaaatgaacgaacttttaacaactaatatttttcgaatatttcaaaacagtttttggtataaattattttaagacttaaaagattccaacaattttaaatatagaatcctttcaaatatatgacaagttttaatttaaccaattttatatttgagactttaatctatatacaacaatcgcaaaaataatttggattggagagttccatctctttatcattactacttgttttgtatatttacaaagatcacaatttactacaaatgtagtcacattttttttacttacctcatcttattatcaactttcgtttcatattctttttacaatttgtcacatttatttattataactctttgttttacatctactaacacactaaatgtttgtcccacatcatgtgagagattaaatgtcatttctctaggacctctacatcacaatgccattgaaaataatcattagaagattttttaatattttaaataatataagaaaatatatatgaagtttagtgtaacataaaatatggttacaaaacttatactttttaagtatactgatcatgaaaaaaaactcacatatttttcaaaatggttaatgaatggtttataatatccaaaaaatcatctccaaaaaatagttaaaggatacaaagatgaaatatcctaaactatagggagcattttataaaatccagtaaactctatagaaggaagaaacgtcaaacgtgaattacaaagttgttgtttcctctgaatttctcagaactcttctttgctaaggaaaaattaaatatccatccaactgtgtgaattagatattttctcttatctcttctctttgttcgatcaaaaattcaattttcccgagatttttgtttctctcgatcgattcaacacctaaagattgaagcttttgctcgtgggttatgtaaagtttccacctttcgtcttctttctgatctgtgagcaaaaatg

SEQ ID NO: 33291 - DNA, 3000 bp, Unknown
  misc_feature (1)..( 3000): 2750-1469P.txt file - cDNA_ID_3067922; gDNA_ID_1620539; Annot_ID_159995
aggaaaaaaaaagcagaattaatatcaactgtcgtagttaaagtttttaagatagactattaatcctttgactaggaaaatatgagaaaactaggatatattgcaaatttatttgtttaagtatgagaatcggtcaagtgacattattgtctctgcagaatctttgagcgcgatatatagtttgtatccacaccaccacagcaaatagttgagtagaaaaaccaatagaccttgttgacaaaaaaaaaaaaatagagaagtaggagaataaaaatatatcattttttagattcaatgggatctccataatattattgaaaagaagaggtaaaattaaatttatttataatcagaaaactaaacagaacttttttttatctaaatctaagtaaactattctcgagttagatcaatgatatattgtaggacacttttcagattctagccagtaaggcagtaacttgggccaagtctatttaatttataccctgaagccaatcaacacacttgtgagttgtgacaactagtaatttaaattttcccgggaaaattgactcataacagaataacttcctaaactaaagtatattatattgattattactctttactccaaaaacattacactgtaagtaagtagtgatgatctagcggtttgcgtcgttacaattgtcttggttagatctctcaccataatctaaaagctcctccaataaactatcatccaaatactcgaactcaataacttccctcccatcatcaccaccacctcctcctctatatcccgacgacgaggaagccactgcattctcgtggctgccatttggaccgtccttcatcatttgatactcgtgaggaaaattgagaatggccctttggcctctcatgccgaaagctgctctatcataagcccgagccgcgtcttccgctgtgttaaacgtcccaagccaaacacgagcaccgtgtctagctgagtcgcgaatctccgccgcatattttccccatggacgctttcgtacgcctctgtatttcatctcattcgtgttataagactctatacgttccatgaaagcttttaaggtttttgtttttgcatgtacatgagttgatagctatgacaacttatacgtggaagtaatgtgactctattagagaaatctagtggatattattttaacgcacgtgcctgttcaaaagcctcctttaaattaccaataaagttaaatcagggggataaattgcaaataaaaatatttatatgccatcgtaatagtatatgaaatttattggtgcgactaaaaaattggatatattgtggctgctctgtgtacattataatatatgaagaattaagggactaaattgtaaaaatcaaaaagatagggtcgtatgtgtatctggatggtcaaggagacggctaagttgaatgaaagtatttttatgacaacggaccaaaagatactctcagcctctcacttttgtttttttgggtcaagctatttgtttttgtttttccttcaattaattgactcacgtgtcaaatttaaatgcacgtgtagtagattctagtcttttaaatttcaatttgaccatcgccaaacacatagaaatgtgtgtgaattgaatcataatacttataaagacatgtaaaatatgatacacttatagtagataacataaaatatttctgcattttgatagagcatactacttttgtttttgtttttccttcaattaattgactcacgtgtgaaatttgaatgcacgtgtagtagattctagtcttttaaatttcaatttgaccatcacgaaacacatagaaatgtgtgtgaattgaatcataatacatataaagacatgtaaaatatgataacacttatagtagataatataaaatatatatacagttttgatagacaagttatttcagttttaataacatatattttaaaaaatatagttaaaataaattcaaattttaggagttgtgtgtattgtaaacctatttgatcaaattatatgtactttagcatgattatatcactacaaaacattgcagaaagaacattttagaacagctgtatattagctaggttcaaaaaaataactacaaatgtcaaatcatgggcttaggcctcttaattcgacattgttactgggtatgttgagcgacccaataagcccaacaaactgtttcccaccaatgcttgaaggccatatattggacaaaggatattagtttataaaaacatcttcatctcaaaatatgtaggagaacaactttaacatccaatagaatatgttcacttttgttaactttatatattaccctaggtcgtatcatcttttcaatgtgaaattcctaacacgttctcctcgaaataatggttttccgtccaatttcgaattgatcacactatgcaaatattacgtagatcaaatatggtctctaataccacattaagtttcatagcttttaacttgaaattaattaacaatgagtgtattatctcatatcactataggtcccatcacatgttggatgtgggttatgcttaaaataatttcgagtattgaaatgtgtattttcatgagtataaaacaaaacgaaagaaatctaattcagaaattggataaagttgtggaagtaacatcagcatgtaccaaataatttcacttaaacaaaaaaatgtaccaaataatttcataacataggttttaaattacaaagataaaatataatgaaaagatcatctccgggagatagatgcttgaaatccgaagatgcatggcggcgtttgaaaacaccaacgaacgttttgttgttccaacttccaagtgtcaaaaacttaaaagaaaacatgaatgattctttgattctttcactgtaatgatcatgacactgcttcacttgtctttccttttcttcgattggccattttcccactttgtgtcttttatttgttcctgcttttatcaaagttagattttttttccatg

SEQ ID NO: 33292 - DNA, 3003 bp, Unknown
  misc_feature (1)..( 3003): 2750-1469P.txt file - cDNA_ID_3067926; gDNA_ID_1620539; Annot_ID_159993
acaatattggatcaattatttgcctacaactacatattatacgtaaaagttatataagcaatggatgattttgtagtataaattaccgtcaagatttctccttttgattatgactcttcttcgtcaccaatgtaaatgcacatctctcttacttctttcttttatttccttatcctcaacaaaacccttcattgacctctgctctctctgtctctatcttattatctccttaaacaaattttttaaaccttaagagctacgagtgaattggttttattgtaaactgttttgacaagcgtccatacttttgccaagttatatagccaagtgtataatccctaagataaatgtcaagagatccatcttttctgtatgtgatgaattggaattataccgcaccaatacaccaagtacaaacaagatatacttaataacatggtatagtagactaataaattggtaaaatagaacaaggaacctatacagatgtcaatgaaatatgctatgcacatgcacttcatctttaactacaattttatatttttttaatatttttgatgaaattaatctaaattttcttagagatcaagaagcttgaagaaagaaggaaaaaaaaaacaacgtgcatccactattttctccggaaagaagaccaaatctgcaaattcatcaccaaagaatcagagatggatgttgtgcaaagaaaagtgaaaaaaattggaagaaaagttgcttctttccctcatgttgaaactattggaagagctctctttgcctcctccttcttcctctcttcttggcatgagtaagaaacatcattctgattcgtacttggaattcaaatagatctaagtcagagtaatgggatctgataatttttgaaaattcatatatacaaacatttgaagatgacttgtaattgaatgattcttaggcatcagagactctttgttttaacaacaagaaggttattgaaaataaagaaataaaaaaaattaaagaggttcttgatatttttctcagttgatgattaaacttaacaagtgggattcttttctttgttatatctagttacatggagctcaaagccaactggaatggaacagaggattattggagcccaaagtttggctattcaggagaccagattaagcatcttatgacagttagtatcattgtgagaactcttggaggacttatcttcatctatggcagcttcttcggagcctttctcttggtactaatatgaacactttatttataggaaagcttgaaacctaatgaaattaaatacgaatacattgaaataattataagaataatatacagctattgtgatatgcatcacttatagatcatatgctttgtgtcttattccaaatcaatatgtttcttgtgggtgcatatagcttatgtaccaaggcattgctacaatggttcatcatgatttctacaatcatcgtttagatactgaagaatttggactgctctatctcaaactcaaaagggtataacgacctatatttcttctttttaaggcactttcagtttctttagctgctcatttgttctttgttttgtctcctggtttgtttgtcagattctgaacgaaacagtgtcgtacaatactgcatacaatctctacaaatcagactttgacgagcagcagatagagcaagtgaaatcaaaattccgtgaggtgcgttattgaggcctacatgtaaatgtaataattgtagcttgtgaacactgtgtgatgattgatttaatgtgttgtgtagcttgcggatcacgcgatgacaaaccctgcattgttcggacataatgagtttcttcgtcggctcttaagcttcgtcaagggattggccgtagtaggagcattgctgtttttcgtggatatgaagtatcgtctcaacaaagccaagaagcaatccaaagttaaaaatgattgaaaactaaaaagccattacaaatgctttatctttatgtgctattgaactagaatcatatatccatcttttgacaatccaacaaatatgttacctttattaatttggtcttgatttgaataatggagctataattaattcatgtagttgaaaagttcaaaatacgaaaagaaaacaatatgactagctaaatttatttattagaagttgtagcagaatataaaattgaccacattagtacaactgtgcacgttctatgctactagctagcatagtcaattacaagcaagtaaacatatttttaatgaccttttcacaaattttcgaaaccaaaaccagacaacacttgataatattatttgttgtaaagctacaaaacgtgagaatcccgatagctatctttaatacattgacttctaaccggttaaaaaagaaaagacatttggtatgtaccaccaacgagtcaccctaactaaaactataattgggaactccgatcaatttttcaaatccctctagtcatcttaaaatataaatttatttcactctataattgagcataatgcaagttcgttctgatccaaaaaaaaaaaaaagttccggtcgttttataaggcaagtcaactttgatagaaactaatttagcattcgcataactgtacattttctttaaaatacacattaaaaaggtttaaacgttcaagtctttattttttatgatgaggatatagacggtctttgatttcaaatattcgaaagtcatttttttttaatatcacaagttgtagtattttaaacaatatgttatttcttgacatagagattatttagtcttttatttatatgtgtttactattcttcttccttttatataatcatataacctatagtttgtatatttcaattattccatcatttaccatttagtcgtctccttggtgatccaaatacttcatcaccttccttcatagcaaattctcttcgtctatctcatacatttaaacaaacatagacatacactaatcaatcttccttaatttaaaaaaaaaacatg

SEQ ID NO: 33293 - DNA, 3000 bp, Unknown; identical to SEQ ID NO: 2463
  misc_feature (1)..( 3000): 2750-1469P.txt file - cDNA_ID_3067932; gDNA_ID_1620539; Annot_ID_159990

SEQ ID NO: 33294 - DNA, 3000 bp, Unknown; identical to SEQ ID NO: 2462
  misc_feature (1)..( 3000): 2750-1469P.txt file - cDNA_ID_3067942; gDNA_ID_1620539; Annot_ID_159986

SEQ ID NO: 33295 - DNA, 3003 bp, Unknown
  misc_feature (1)..( 3003): 2750-1469P.txt file - cDNA_ID_3067946; gDNA_ID_1620539; Annot_ID_159985
gaatctcggttgtcatcgcttcctagtgataagcctaaggccggcttaactaatggaacttactagtgataccataatgcgaaaggtgctaattaagcttgacagtgaagaggattcttatcaagttttggaaaattttaatggagattccttggttgggaagaagtatgaacctttgtttgattacttttagcgatttctcaagtgtgacttttcgactagtagcagatgattatgtcatgaatgatagtggtactggtattgtccattgtgctcctgtctttggtgcagatgactatcgtgtttgtcttgagaacgagataattaagaaggttagatttgacaacatcttccttatatcaccacctttaacattaagtttattttctttcttgtttaagtttacagtatcttcaagaacccatgttcatgacacattttgttcatgtgttgtttagattgtcagagatttcaaacgtccagatggtttgaaagatacagagattgatgcagctgtagatagtacatatcttaattaaaaataccacttctctatgctctattgttgaggaaacatataatatttgcattcgttcatggttcagatatgatgttatggtaattcttgatctacgagaagatgaatctttgaaaaacgaaggtgttgcccgtgaggtaaataaatgtaaccgaagcgattaatggtcatatataagttgtatatttgatatatgggtttccttctcattgtgctcatgcattgaaaagcaccctgttatgactgtggttctaggagaacatttgcatttgacagtcggtgactaattgttaagcaagaagaacgcatgagagccttttaaagtgttttcttctagatcgttgcaaaaagttaaatgtctcttgagactttgtactcattctatagataaagatgggatttattacaaaaacaacaagaaactttgttacttgtggaaattcaaaattatccgaactagcttcacaaaatatgctcaagagtttcaatgtatttttttttgttctgtaattgtatgactccgtttgaagcatcaagattatggttataggtagtgatgctaaaactctctgttgttacagtgaccactaaaaacaccaacaaaaaaaacttaggtaacgtgtcgtctaaaaacttctaggttcaatttctttagatagtactatcaataaataaaataaatatgtacaaaggctttaaacaatgatgtttttcaaagatgattggtagatactaattagagcttcaatataaaagaacacatgcgattctgacattctgtggtctaacatggtttcttctagagtcaaaaccatacaattaaaagttaggaaagtaatagcaatgtggtttcaaatatatactcattactctttagattcatgtatggtgaaggaaacattataataaaatcaaagatcacagttttgtaggtccctcatattaatcaacatcttaaggcgttatacatatcttctttttgtaaatatttgactaattaaaatatctaattagagtattagactaatctcatcaaatatccgactacttgtgtcagttcaaaacacagtgattacgttagattttgtgctcttttgtttataaacaaagctaatttaagaaatatatgatctatttgcctccttggtcttaattttatactttcttggaataaaacacatttattaaaataatttttaggttcctagattcatgtcatgtggcttgatagtttccaacaattataccaatattttactcattcatatacaaataaacaagctttattctattcttcagtctcatgatatacgggattttgataaaattcagagtacccattaattattctatgttacagcttgtaataagttaaatttataaaacgtacaagttgaggaaataacaaatgttttcaatattaaatgatttattaatacattagtgaccaaaaaattattaagtgtaagaaaaaaaacacaactcagaaaaaattcaaaagaccgtctaagttcggttcatgtaagaacaagtgggacctctttaagtttctaaatcagagaataaagaagaagaaaaaatctcaaaaccttcctctaaaaccaacggctcctacctttacttacaccctatacatacacttctctttttatcctccatcggcggcttatggcggttttccggcactaatcatctccggcatatataaataaacgtacttcacgtttttttatataacttcaaagtagtttcagatttgtctctatctcttcacttttaagtcttctggttttgtcatcaccagctttttttgttctgtctctgtctttctctttgtgtatttttattctcgtcatcgttgttcttctatgagaggaagatcggaatgtcgaagagaattagaagattctcgtacatcacttcgttggaatttcacaggtcgatgagagatctgagaactgtttcattttgatccaaactcatctctttcaggtattccaaatttttctttctctgttctttctactattacccaaattaaagttttgatttttatttctcactctgtttcttgtttttctaattgcagagtataatggactaagcattttttttctccgaagatggttaaagaaatagcttcttggttattgatactatcaatggtggtgtttgtttctccggttttagctataaacggcggtggttatccacgatgtaactgcgaagacgaaggaaacagtttctggagtacagagaacattctagaaactcaaagagtaagcgatttcttaatcgcagtagcttatttctcaatccctattgagttactttacttcgtgagttgttccaatgttccattcaaatgggttctctttgagtttatcgccttcattgttctttgtggtatgactcatcttcttcatggttggacttactctgctcatccatttagattaatgatg

SEQ ID NO: 33296 - DNA, 3003 bp, Unknown
  misc_feature (1)..( 3003): 2750-1469P.txt file - cDNA_ID_3067973; gDNA_ID_1620540; Annot_ID_160024
ctaatcatgtatattatcaaattttgaaactaattaagtacgtacgccatccaacaatccaataatgtaaactatataatgttcgcctaaaaaaaagaaatggattagcatatccataagacatggccaaatcatgcatgttacgtatattaaatttgaaactgggatcctggctctagtaagagtggtttataattttatattgggtttagaattccaaattaaatggtcaaattctttcattccaatacaagcagaaacttttatgatagtaaaaagattatgagaagacttatgaggtgttaagaaagtgggagatgtattatgaggaggagagattatgagtatagtaaaaagattatgagaaaaaagattatgacaatagtaaacaagaaggtccatacagtatccatgtttttcaagaaagtgggagatgccaaagtcctggacctaatatttttgttttaagttttgataactaactaattttttttaaatcagacacaaaaataaacatagactgttgatattttagaaaattaagatctattaaaaaaatattgtattttcttatagataaacaaaaaaaactttttttttactaaaagactaatatcaaactgtcctaaggtccctactaattttgggccggtggtcctgacaagtgacaacagtttaatggtccattttgtacttaaaattgagtcaaattagttgcggcaataagagcagagcagtaatgtgttacacccttaaaggacgttagtactgaagcccaaattctttggaggttggttggttggttgatgaagtgcggttttgattaattcacaaatatgacttacttgatgacttttcacaaacatccatctggaaacgctactatttgatgatgtattaacagtagaaagcatattaaaaaaaataaaatctcttattgattaaattatcaagcgtcaaaacgaaataggtctgctttacaagtcaaagaccttcgatacattatctttgagactacttcatagagatttttaaagcagaaagattacaaaatctgaagatcagtagttcagtagagataaactttcactgattcacagattattgcataacaaaaaaaggaaaatgaaagattgtaagaacttgttcacttctttgaagaaactgttgatgaatctggctctttccatgcagcttgccattgtttgtcatataacgtagtctcatcgaacagatccttaagtttgtctaaatcttcattcttacggatgaagagaactccagctacagccacaaacaagagtgttttgcagaagaaatttcccatttgatcaacaagtcctactccggtaagactatcaacaaagtaagccatgaagaaccctatcatcgcagcacgacctacaccaccaagacaacaacttagatgcacaaaatgttaagtgtactatatctaagtgttagatcataagtgttttgaaaatcaccattgagaagttcagcttcaggtagatggtatctcttcatccatgcccaccatggaataatcgaagtatcgaagacaacaagctcgtcgttactcgttgtttccgggttatcttcaagccattttctcctctttgcctctataaaaatacataatcaacacatttacacaacaaacactcctcttcttacacaccactataagaaaccaaagcagaatcttcctaataacaaagcatagacatatatcaagtattcaaagaatctgtactgaactgaagttttaaaaggatctaaccagaaacgataacagaatcccaatcagttttgccatctttctcgaactgtttcagatcccaagttccattaacccacttcgcattctgatatttgattaccgtctcagtactcgaatcagtcgcttcacctccaacggcgccgttttcagaagcggaggagctttcggctggagatttaactggaacttcctctacagccacagaagcaggcttcggaatctccacgacgggggaagtcgtaccattgtcggaggaagctctagggacggagattagagagaaacgcttggtggagagaagagaggttgagatcttggggatgagattagggttctgaagtgaggaagagatcggcggagagaataacgccatggatatagacatttttttgttaagatctctctctctctctctctctctctttgtctctctcgatctcctctgctctgagttttttttttttttgcagagttagtttgaatgtgtggtttgaaatgagctatgaaggaagtgaaagagatgttgttatcgttagaaacttggattgtatgtcgttttccttttttaattcagtttaaggaagaaactacgtgatgttttctgtaagcaaaaatagaaagataaacgagactgttaatgggctttgcgatcagcccatatagaactagaattcaaaacctgacatttaaccatactctcgacccatgatttacgaattgactagacgatatgaaaatgtccttggtcttttctttattagtttgttaaacttttgatgcaactgaaaataatagagaaagattatagaaaagtctttgtaaattaataaatactgttatccaaaatactttatcacaaaactaaaacaaatttattcctaagcttaaacaataatatgtaaactaagtgaaaaatccacgtggatgattcttattggttagatgacgatttagatatttcatttgcttcgcggcaaagtttcaactcattacgacgacgacgatctcaacgttcaagaagtttccagaactacccttctccgtgtttaatgcccctacacgtgtagcgaatgcgtaataactacacataagcagtaagggtattattgtcaatttagtccccaatcataaggcccattataaataacgaaagtctttattttctaactaatattttcattaatcgattctcaaagtcaagcaaaaaaaacgaaacaatg

SEQ ID NO: 33297 - DNA, 3000 bp, Unknown; identical to SEQ ID NO: 2465
  misc_feature (1)..( 3000): 2750-1469P.txt file - cDNA_ID_3067976; gDNA_ID_1620540; Annot_ID_160023

SEQ ID NO: 33298 - DNA, 3000 bp, Unknown
  misc_feature (1)..( 3000): 2750-1469P.txt file - cDNA_ID_3067979; gDNA_ID_1620540; Annot_ID_160019
aaagaactcaagcggattcagacattccatgctgtggagtgattctctctaatccccctgtacggcgacgcttttacatatcctccatgttctttgactacaaaagccaagtttgaggatcatttagttgaaactcaagagttcagacaagaatcatttgtatgaaactcaagagttgataccaaaaagaaatttctcacggaagatgacacttcccctggcacaatctagatgagcgtgatagtgggacgttgtccatatctaaaaaaagaaaaatggcatggtatagagaatcccggaaatacggagaagaggttaatctgttgtataaccgcagattcgacctcggattagtactgtattgtactctataattgcgcttaactcgcaagtttatgttcatggttttttttttccttttaactctgtgtgtgcacttatcctccatactatgggtgtgattggtaacatgagttaccatgagttatatatgcttgcacaagtgatctatcttctacacctagccacatacgtttatgttaatggtacaccttaaaaatttgtgtattataatggaagaaaaacttagttcatgtctatgttcaaacttccaaaaaagaatattggaattttggttttccctttactatttcatgattatatttgcccaaaaaacaattcttatcatcgcaccgctttactattctgggccatataatttgaaccaattctattagtgtacatagagatttgatgaataatctctcaaccaaaacttaacatgacgttgtgttggtgtttggacttgtaatccgatgatagcactctctatcatatgatatatataactctgcaggtaacgagagagagagagaggagagatcatatcttacatatccaattagtcttcatcaaagtacttatcttcagcgtcacggccaatctctcgaagccaatgatcatcaagagtctcgtcattgtctatctttgcgtaatccaaatgttgatgatcttctcccgataagaacttctgttccatgattgatgtgaactgatccatcatatcttgcatctcctctggcggtaagactgttgttgccttctctttctgttctttaccattcagacttgaagagctagcttctgtaggattcttcgcttcttcatcttcttcttcttcctcctcttctgattcctcctcttcctcttcttctgattcctccatcttctcattaccaacccaatcactctctgaaacacctaacctctgctgctcctctctaatacgagtaaccaacaccgcttcctcagcccgtctcatcaaagtctcagaccaacgttctccaggcctagccatgttccttcccatcacatcctgaaacttcccaacatactcatgatgtagatacggctctctatctctcatagcatcctctgagaaatactgtccctcggatacaagcttattcaaataagccaatctcctattcctcacagctacagacctcgatttaatctcttctgaagtcggacttatcttcttccgcaggtttttcaaatgccaatcaacctcgtagtcatgtttcatagcatcaaactcaagcaattcatctactagtagctccgatccatatctctctgaaatcatcaaagcaaaaacaactaatgcttcagttcccaaatcatatttaataaaaaagtttcattctaataacattacacactcaatacttagatgattatgaagccaaaactcatctatctactaacctatgaactaacctaaggactaaaaacttaacctaatgaatcaatagtttcaccaagtacttaattaaggactaaaaactcagtaacacatccaatcatacttagacaaaattgaaattagaatcgaggaattggagcagaataatggaaagtacctagaaaaacggcgggatcacgacggaggaggtcgaggaggatggatttgcgttggtcggaagatgcagcggttaattggacggcgcgtggaaaatagagattgtcgagagaagagagtctctccgttatatcttccgccgccgtgcctttcattgttgttgcttccatctccatcgtcttcttcttctcttccattgttctcctctctcggactcgaccgactgactaaagaaagatgtaaatcgtctcgttcatgtgctggtcacgtgacaagactttgccggtgttcatcacctgttgggctttcttgggccatttaaaccactaattgatgttttggatgatgaattggttaaaagacaaatcggtcatttttaaaacaaattacagcaagaaaaactgaaagattatcaaaaaaaaatctaataatatacgtgacatgaaagattatcattagtaaactgtaaaaaaaaatcttaaaatattgtaataatgtatgtgccaactatgttattaaaaagacaaaagaaataatacaaaattttttattcttttatgtaagtaatttatgtctatcttgttaagtgagcatatttctaaaaacaaatgtgggcaacattggcaaaatggcaattaaagaaacaagagcggtcgttgctgtgcagtgaaatgctacgtgttgaaccagaagttagtggttagttcgattcgacccatctctcccactactttctctctagtggctagcttagctaccgattcactccctcgtctccgggagctctttatttctctatttcccattttacccctataattttttttcaaatcaaaaattaaacggtgaccaaaaaataaaataataatctttctctgtacgaaacagactagttgcgaaacgcgaaagaacaagattcgacaaaagctaaaaataaaataaaagaagaagcaaaaccctagagctcaaggtaatcgccgtcgatttctcaatctctcaccggcgattacatgccgatgaaagttgtacaatagctgctgtaagagagagatttatcaggtatttttagaatcatg

SEQ ID NO: 33299 - DNA, 3000 bp, Unknown
  misc_feature (1)..( 3000): 2750-1469P.txt file - cDNA_ID_3068009; gDNA_ID_1620542; Annot_ID_160054
tgtagctaagaatcaggatttgttttggtaagaagctaaggatcaggatttgatgaaaagaaaaagctataatgtagccgaacttaggcagaaaggggaatacttattgtttgttagtgaattagtatattagataccatcagaaaccaagttatctcaaaagaactccaattctaaaaagactactctgtttcaaaaatatagatgttttagattaaggcacaaagtttaagaaaataattattttgagttttttaacattaaaacataaattaatatctattaaaaatattttgaccaatgatataatttattgcagaatataaacaatcatatagctgtttaatttaatatttttgcatagaaacttgaattgttttttcgaaacatcagatattatgaacaaaaaaaaatctaaaacatactataatctgttatttatgggtggactagacccacttttgagtaatgtgggggcacttgcacctagtaatataaatactgttttacactagccaaagtattcaaagtggcaaaatggtttgacatacaccctaataatccatgaggtaccaagtttgatttcttgttctagcaatttgcacccgctaacattttaatggcgtctctagggctagctataagctctaatgagtaattagttttattgtctgatttgttgacgcatcctggaaatctccagatcaaaatgttggcatcggtttgtcgcttcataggaggaagtgaacacatctttttaaagtatatatatgatgcaagtggaaccgattcactccccattgaaagctaaactctaagcttaagaatggtagtgcaccaacttcggagcctaggatatactcaagtaacattatgttggggctctacaacctaattttatactatatgaaatgatacaaagtagaaaaagcagcgactacaaagaagaatgttgacatcattacctctcaacatatgtatgtgacatcttttagatgtagttaatgcatgattttaacttcctctatctcactagaagtgtaaacttagtcaatagcatccatataccttaacaaaaagagcttatactcaatgtaatccgtagtatcttggaacaaactttgtaaatacttatctaatgaatttaccttctttgacgacaaaaagaagaaggaacattgtaagtttgtaacttcaaacgtagagaagaagacgcattttttctctataaaacaacaaaaagattaagaaaacaaaaattagaacattttataatttaagtcgaaggctaatgatttggattggccggggatgagaggcacataaacaaaaagtaggtattctttcgatgactttttattttaaaatgagatatattccaataatatcatcattgttaattctctcgatctcgctaaataatacaaagaataataaactagatggtgttggccggtggggaatcatgattcatgagtaatttatataatataccgacctgttatgagatataattaataatcaatatataacttttaaaataatgagggaaaaaacggtatggttgtgtttgtgtatcctctataatcggatttgcagcagcaagcacgtgaaaaccagcagaggcagtccaaatctagacccgaggaaacaaacattactgattccgataatgtcttttggattttcttgagttcaatagtatatgattatttttttatataagttatttcatatagcttacatattacaattattaattatacgttcgtaacttagctattaattttaaataagtttacatattattaaacttggcgggtaatgtggtgttaaataagtaaaataaagtagttgattttatataccgcatatattttggagatagtcagaagttgttaattagacagataacttttcaaataaatatatcataaaaattacttataaaacaaaagttttacggcaaatgcatgcatattgaatcattgtaataaagaaatgcatattgaattatgaaaggaaataaaagtttttatcgacggtaaagtataacgaaaaaatattaatattaatctagtaacaatctcaaacttatgaattaataatcgaaattgttttagcttatcaaaaaagtacatggtttttcacgaaacaaactatgagcacatcattttcaaaaaaaaaataaaaaaaaatctaaactaaacaaccatgatatgtatataatgttgagagacgcgtaaactatatataaatacaatcgaatttacacaaaactattcatgaacaattttcactcaaacaatatatgagaaattttactgaactaaaaatttaactttttatcaatagtctggcatagttataggtcgatgatataaaggagtctaaatgtctaattcaagttgtttaccaacgaaaaaggagtcttaaagtgaaaaagttattaaaataaataaataataactatatacatataaggaagatgtgttgagtaccaaattaaaggacccataaatcaacgtgaagtacttataaacattatcattcaccgagtagcacttggtccagtaacgtatgatcccgccaaatgaatgaaaagtcgtgtttccttgaaatgctagtttcggtccaaaggaatgtatgtccctaggatccgaaatctcttagatattcagaaaaatgaaaataacattcataaagaatttcaacttgagaattacacacgcatatattaatatgtatataattaaaattgtaattttcaagaatgatttgagtaagaggaagatgtataatgatttcagttcccactagtcgttgcatgtgccatctctaccttcttgtcccacttacccactattctgctttcaactctgtctctttctctctctctcattctttctttcttaaccaaatccatgacttaaaaatgcagagcaaccacatcataagtcttcataccttcggattcttcaatctcttctacacatcatg

SEQ ID NO: 33300 - DNA, 3003 bp, Unknown
  misc_feature (1)..( 3003): 2750-1469P.txt file - cDNA_ID_3068013; gDNA_ID_1620542; Annot_ID_160059
ccaaagttcatgacagtccacttgggaatcctctgcctatcagagcagctaagacagaattggtactgcctagagtttataataacttttcagtgggaacgcgagtgcaagttctaatcaatcgtcatcaacgatggctagtcaattttacagctgatgtgtaaactcatattataagcaattttcatgggatactggcatatctaagagacacaccagacgtctaagagtgaaaaatatttcatttttctaggcatgtctgcatttcctaagcactttatttttctagcacaactttagaaaaaggctgaaaatttcggagaaaagtgtttgtcaagatagtctacctggaccatgagattaaaccggtgggcactggatgtaagcttattctgaaatgctgtactagcatgacgactaccagcaggaggacttgtcagtacccaatcatctgcagcagccatagctgcagtgttttcttcaattcgcttaagatttgcctccaatgcctgttccacaataggcttaaagtgctttaaaagcactgggcaaagggacaaaccacgagcttccaacaaagaacaatgcccaagagctatctgtgcacactctgcggcagctcttagtcctcccgctgctgcagaagaagctaatgcatgccttttaacaagaagggaaaacgcctctgtttgcttagtagcccaagtcacaagttcagaactatatgctggctctttcccaaagattcccaatgagtcactagaagcttgagagatagctgagaacacaagctgagaaagtgcagcagtgtacgcccctccatatgaggtgctagaaggacgaagactttgcatgttgtattgatatctctggaaatgggcatcaagaagtacagtatgggctcgaggaccatcgccaagccttttgagagctgctatggctgaccgaagttccccacctcgagttgaaggttgacaagcagccttggcaagttggtcagctaatttttgcttgcgttcggcaatagcaaactgaagagatgaaagtacagaagagcttaaagtatgcttttcgtttgcttgagatactaaaatttctccctcatcaaaagctgccagagcttcatccacccttctttcagctaataaagcatcaaggtggtcaggaaattccgtagcccatttctccagatcagagaggccgttgtcctcaaaattcaataaaccattcgcaagagattcatcagaaactttatcgtcatcaatgttaactccatctgctaagccatggattagagtcgcctgagtggagagaagatttctgatagatgatagctccccctcaagatctgatatctctttagatgtgctgcacagaacagaaaaaagtttaattttcaaaataacacaccgccaagaaaaaacaataaggtagtgcgaggaaaaagaagtcatatgcaaaacgcaaatgcaccaatacccacaagaaatgaaataacttgaaaaagtagagctttattatcacatcaacttcaaagaaaataaccaagcactaaaaacagacaggatatcagctaaccgtataaaggctggataattagcataaacacttcgccgcatttcttcagcagatgctctcttcaaatccaatagatacgagcataactgctttatatcctgtgaaccgaacagaaatatgtcatcatcccaaaataactgagaaaaaacaaagagtccagccaagtaatccaacaatctatgttaaccaaatcaaacactactctttttgtagtaaactctagaaggcctaaactaacttttccctcagctctctcacaccatcacagaaagtgactacacagacgagacaccctttatacccaataccataaccgaattgaatcttttctgtaacagaaaacgagaacaacagattctgtctctgatacaagacatagtcatccatgtatattcacatgagctacattctgtattacactgaacacatcatttggcaagctaaaagcttataaatgggtactaaacctatcagcatttcttaagagtaacatttttacataatcataattcacaaactgccttcaaactccagaagatcacaagaacaaccatacaagcaatgagtattgttacattgctcatcatcttctcgagcgtataaaatctgctgctacctaatatccattccacaattacgatttcctacagctaaaacgaaatgcaacaaaacaagaacactgcgatgatacaatcccaaatctacgaacaagtccccacagactcagtcctagaaaattctcactcgtgataacaacaaatcaacgagaataagaacacgaaatgataaaagaacagaaaaaaaccttctcgttgatagaacatttggattgcacataagcatcagcatcgaacttatcagacttgaacagactcaatccttcctcgactctgacaccattttccttcgtcggcgtagcttttgatctggccgtcttcgccgccatcgttaaacttgcctgtcttctcagagaaaacctaaaatttcacagcggttccagatcagcaatcccagtgatgccggtaatgttaccggagaattaagcacagatctgagggagctcctagatacggagagcagatagagaaagtgggtagaagaagatgatgatcgagttggcaaccagagcgatttagccaacgacggtagcttggctttttcgtctgcttaaacaaacgaattttcttgttgaaaactaataaataaaataacgactctgggttttttttactggattttttactagtaaacggcaaaacagaaaccctctcatttgcacggaggctttcctttatccttcacctctgccatcacttgagctaaaccgacgccgttttaaagaatgcttactttaagattgccgttaatgtaaatctgagcaaaaacctttgaagaatcatatcatcgagacaacagagagagatg

SEQ ID NO: 33301 - DNA, 3000 bp, Unknown
  misc_feature (1)..( 3000): 2750-1469P.txt file - cDNA_ID_3068017; gDNA_ID_1620542; Annot_ID_160057
tgaaaattgcttataatatgagtttacacatcagctgtaaaattgactagccatcgttgatgacgattgattagaacttgcactcgcgttcccactgaaaagttattataaactctaggcagtaccaattctgtcttagctgctctgataggcagaggattcccaagtggactgtcatgaactttggatgtatttgtcaagtagatccttttgataatggtattttgttgcaggacttctttgaggacgtaggacctctgctaagtatgcaattgggaagtaaagctctggaaggtctgtttcgggtgtttaactcatatgtagatgtgctggtaagagcacttcctggttcgatagaagaagaagatccaaattttgaaagttcatgtaataagattgtccaaatggctgagacggaggcaaaccaacttgcattactcgcaaatgcatcattgctagcggatgaattacttccacgtgctgccatgaaactctctcttgatcagactggtcagaggacagacgacctaaggagacctttggacagacaaaatcgtaatcctgaacaacgagaatggaagaggcgtttacttagtactgttgacaagttaaaagatgcgttttgtcgccagcatgccttggatctcatttttactgaggaaggagatagccatctgtctgcggatatgtacgtaaacatagatgaaaatggcgaggatgtggacttctttccatctctgatattccaggtagttgttgtttcatttccatcagtccagttagcctttatgaagtactgtacccagatgtgtagtcacttgggaactcttatcggcagattggatactgtagagttgaatccatgtttgtcatagtctactgtccacttcaagaacatgatttttttctgtcttttttagcttaatattcttatactttgggtgttgcgtcgttggaaaacaggaactttttgccaaacttaacaggatggcaagtctagcagcagatatgtttgtaggaagagaaagattcgccatatctttgttgatgcgattaacagagactgtgatcttatggctttctggagaccagagcttttgggatgacattgaggaaggtcctcgacctttgggacctcttggcctacggcaggtttgtacactcattcttgcttctgtatatgtatattcagcgagcatcgaaattgttgtgtacctttgttaacaaacaacctgcatctgtcacagctgtatttggacatgaagtttgtcatatgctttgcatcccaaggtcgctacctatcgaggaatttgcacaggggaactaatgagataatatctaaagccttagcagctttcaccgcaacagggatagatccatataggtacatcggttttgagggtgttttgcaatgttttagcctttatggtaagtataaatgattaaaatgtggttgtgaatgatgtgcagtgagctgccagaagacgattggttcaatgacatatgtgtggatgcgatggaaagattgagtggcaagacaaagggcaacaacggggatgtccacagtccgactgcttcagtgtcagctcagtctgtttcatcagcgagatctcatggcagctattgaaaccaaacccatcttacatttgttaagaaggtgaatggtcaataacttttgatcttctcttttcagctctgcttttccaaaagctttctattttgtagagtctccagttgttgatgagatgattttgggggcgtgtaaatgttgttgagttgacatgtttgttttcttgtattggtcctctctctctctcaatggatgcattctttgggttaaaatattgaagagagtgttgatctttcttctctatgatacactctctttctgttttggtattggatcagatgtagcaaacttgaatgagatatcttacgattcactttttgtatttcctactcgaatcatgtagttcatagcgtaaattagttttaagtaaatcgtgttgtgtaaactcctagtctaattcttggtacggtgggtcggatcttgggatgtacaaaagtttgaataatgggtaaggacggttacctaccacatggacccttaaaggcttggtaatttggccacgcatgcccgataaggcaataatcattcgcgaatgaggcttagagatgctagagtcatccctcgccattgatgcaaacacctcctttgcttctctacatgtttgagattcatgttttgacagatgacaaacaaaagtaggtggtgatactcaggctgtgaatggtaaccaaaaccgtatcgcaacagtgctgtaacagtatcaaaatctttacatatacatatgtatctatgtattttcgttcctatttgaaccgcaccgcacttcttccgcaccgcaaaacgcagtcaccattcggagcctcagaatgtataaaacatggcaaggaagatgtgatgttgatagctctatggtagatttcaggtaatgacttttccaatgataattccaagtgatagtagtctataatcacgtgggaggaggcacaatcagactacattactgaacattttgatttcagcttacttaccattcacatgttatgagctgaatctgatatttaattaacaaaatttgcctcgttacaaaaatcgaattatcagggtgcaaaacacaacaatttattcaatagattatttctattatgtagcttaaaatattttatttttttggtgagaaagtaacttaaagtattttaaatgtctagtttgatcagaatttttattttattttgtcagatatacactgtgggactaaaaagaataaaagaagagataaatataataataaaatattggaggtgaatttgtttgtggaacaactggtttcgcttcttcttctacagagcttccctcgtttcctccgccggagagacactccattaaaatcccttcttcatcgatccttcattagatttacaacaacaacaatg

SEQ ID NO: 33302 - DNA, 3003 bp, Unknown
  misc_feature (1)..( 3003): 2750-1469P.txt file - cDNA_ID_3068046; gDNA_ID_1620543; Annot_ID_160084
caatcaaagatctatttaagaagtttatttataatgtggactctgtggccgtttagaaacataagagaaaacgcaagttgatgagggagcagaagctcaaatgtatgatattttcattgaccagatgaaggatggacaaatggatgaaatcaggctaaacataagaaagagagctcaggacatccaaatattatcactagaaataatttattatgttgtaaatgtaaatcatgtttaaatatttatcatgcatgttgaaggttgttttcgggttttccttatgtgtgttgggttgtttttcttgtttttattttaattgaatttcctctgtatatagtggctcattttcttaacatgaaataaaaaaaatgtgttcatgaaattagaatattttgtgatccttcttacgctgtttagctaattttctttatccttttggtttggaagtgtcaaatggtgatgcatttcgagtttgtgagggtatatttgattgccgtgtttgccaaggtacatcataaggaaaacacggctatgggatcgaccttccgaatctctttgccaaggtactcaaatacatcaccatttgaccatggtggtggacgccatgggatcgaccttccaaatctctttcatttgttcctcttaagtcttaactctattagctttccattatgggtatagttcatatttgtatgcttttaagtttctcaaatctctttcatttgtcagtttttactttttaggactggtttattttgcacccattccaatcgtggggttttaagttttaacccgtaaattatttttttgtttattttgtatttttgatacgaaagcccataaattgtgaagtaaaaaggcccaataggcccataaaattgggagaagagacgatcatcggacaaaccgagaaagtgaaacaacaaagaagaaacctgactcttcagaaactattcaggcgagagagagagagagaaacaattttggacaagaacagaaacgatgtacgttttctgtgatctcaatattagatatagtattccagttaatcggaaacaaagaagcaacaatttgcaaatcacggaggttgaaccactggaggagttggattcagtctggaaggaaatccaagttaaccaacaacacttttagataatcggaacactatattcaatgactattttgattccagagactgttttgcaacccaaacagatcctgatctcaagaatagctaccagagtagctatgaaggcagccgtgtatgatgtatcaagttcttcacatcttcaggttcaaagctagtaaaccatttgagaatccatccctggcaacattctttcctttctaagacattgaatttgatgagctttatacatcttaggtaatgttactgttgcaccagaactttgtgattccggcaataccataatttaggagttgtaattaatcttccttgagatattatgcttgtaaaacacatgtttaataagttattcaagacttttccacaagtcttgttgaacgtttttgaagttgttgagagatatcatagaaaattccaaaaataatgaatcgctagatcaatctatatccaaactgattattaagacccagtcaatacacaaattgctattctagcaaatgtaagtggtgaggtgcaccttaggcttcaaatggccacggcggactgacaaaaccatttgcgggattggatctcttgttgtttaccattcataaactgtagtctgtggaccgaaaaaaaaaaaaatcgccgtagacaaactagctactgattttacatactgtagaaataaatttggtatggagctgacaacatggtttagtccgctccgcccgtaacatccattcaaagccttaacatataacgtagttaacgcgtagagtatttgagtgtatatatgtatcccctaaacacacgtagttgcacgagtgtagcttgtggacactaacagtttcagtccactatcaagttgatcgacaaaacattatgttgacatacatcaatagcttgatcctaccactacaacattgctatgatgtttctccacttcttgttgttgttgttgtccttgctacttgtactctcttagtctcccctagcttggtaataaagttcatcaatagccaaatttaaaggtttggtccttgtaagcttgacacaacacaaattagttacacatcttcttctcatagctcacatttatttatatatgttttgcatacccactcgattattaaataattagttttgaagttctagtcaatatttcatcaaatcatcatcatcatcatcatcactgttgttgtaattagtattagtatatcaagttggaaaatggcttgtcctcatttttccaacgaggcaacgaccatgactttattcaatcttggttgttaaaaaaaacatatcactgcatagttgatgaccacaactatattccacaagtctctctttctgagatctaacgatttgggcaaacaaaatcatattttattctttgtttttgaagtttatagatatttttttttgtaatcaataatgagtgtatttaatacagtagataaataagggtcctactttagtttcgcatcacgacaactcatatgtatactttaatgtattgtttcataaattgttccttcccattactcaattgacatttccatttaacaactcttcccaattgtgaaacctttatatcccattatcagctgttttaagttgaccaagttttttcttatggtcctcttcctattttcttcttttgatatacttttttttttaactctatttgttcaaagtcttcgtcttctttttgttaacattattgtttacatgtttttgaaagagagattataatttttattaagagattcgtcaaacctttgtgtagagcacatgcttttttcttagattattttgagataggatcagaaaacagaggaagtgataagaggttctttttgggtttgaagatg

SEQ ID NO: 33303 - DNA, 3000 bp, Unknown; identical to SEQ ID NO: 2473
  misc_feature (1)..( 3000): 2750-1469P.txt file - cDNA_ID_3068054; gDNA_ID_1620543; Annot_ID_160081

SEQ ID NO: 33304 - DNA, 3000 bp, Unknown; identical to SEQ ID NO: 2472
  misc_feature (1)..( 3000): 2750-1469P.txt file - cDNA_ID_3068058; gDNA_ID_1620543; Annot_ID_160080

SEQ ID NO: 33305 - DNA, 3000 bp, Unknown; identical to SEQ ID NO: 2483
  misc_feature (1)..( 3000): 2750-1469P.txt file - cDNA_ID_3068096; gDNA_ID_1620544; Annot_ID_160118

SEQ ID NO: 33306 - DNA, 3003 bp, Unknown
  misc_feature (1)..( 3003): 2750-1469P.txt file - cDNA_ID_3068100; gDNA_ID_1620544; Annot_ID_160116
cagtggacgtgatgatgggattgatgtttgcattctctgagagagcttccatgcattcctctttgctcatgttaaaggtcaaacatgtctctatcatgtgttgcacctatacataacacatgacacactatcacgtttttatatatatacccttaagaatgtacctaaaagaaactgttccttcatgagaagaaacgcatgcacatgttcgagttattaccagatgaatgtatacagcgggagaagagtgtctcatttctattatatattttgctacaaccacaaataaactcgtatacttagattaaaaggctccactatatatattgacgctcatttatagaagagcttgcaaagaagaacatgaatagtgatgtaaacatgtggcccgaagaccgcacacgtaggagattaattataattggttgagacatgataagaagatattgtaagaaaagtgaaaaaagagagagagaaatttgtaaaaattactcttttatctcctcttctttgtttccatttccaatctatatctcatttttcatccataggtcctatattttttcccaaaataaataaatttattcaatcaattttgctatagccttatctgcggtttattaggtcataaattttaattaatacacaaatctaaataaatatgttatatagatcatagatttaaaaacttttacgggaatttatctatttaataatttacaaatactagttgaaattcaatgttatcttgttaatgatttattactagatttgaaaatccgaaaatacaaagattcaaatccaaagttaaacttttgtatttcaaaatccacatgtctgattttaaaatctatataattttctgggtcccataaagatttatatattcattaacaaataatggtatcatatatagagttacagaataacaacatttgcttcactaaacatgggaaatagatattggattagcaatagactattaaatttttttgagtacataaatgtaatttctaattactgtgtaagcaacattgtttttctgcaaccactacttccgcataccaaaaagcattcaacataaaaggtttccatgaaaactaatataggctgtggtaatgatttaaacatccaaaaggattcagaaaagaaaacaacaataaggatgaaagcttaacgaaatttgcttcaaaatacttaaataaatatctttgggtcgactgtgtaagcagcattaagaatgggtttacccataatttgtccagataaaatcgtcactctaatgtcaaatctctataatagaacccatctaaaactcttctattgagttgtttgatttttcaacccattgtttacaatctcatgtaatttattttaccactttgtgtaggtttgtttaactaagttctttacatgcatctatcatcaaaacgtgctggtacatagctaaccaatccatatatttatgcttaatttctgttagtttttaatagttagttatccggtaatttagtgtgaatgtttttaattgctactataaaatatgttacatcaattattctaaaatatagcttctttttcttttttttttaatataaaacttcattgatcgatccctaactattgatggtactcttcgtctcgttgtcacttttcggatcaatcgatctacgactactggtcaccaacacattttgatctacaaactcctgatcgatcgttttaggccaaacaagtccaataacgcatcaaaacatccaaatctctcacaaacacctagtatatgtaatagactcaaattaaaacaagagaaaaaaaaacgtaaaaaaaactgcaatacgacaaatgattcaaacgaaaactaaacgaaagacttaagacaccaaaaaacaaaacatattagaactattcaaaagaaaatactttaataaatcataaaatttcagaactggaacaaccaaaaccgaaccaaaatttaaaaaaaaatctaatagctggaaccgaatgaaaccgaatcagaaccgatagcaatactcgaacgcccagccatactttttgtataagaactcagataaatgatggatttaaagcattctaagttttaagaaaaaaaatgatggttataacaatattgacatataaaaaaaaaaaaacgccagccgtcaattagagttttgaaatcgcaataataatgttatgcatgaataggaattaggttcacattctttttgtatttgatctgttaatatcatggccgatatagattgaacattttatctaaaatactattatatttgaccatgaaatcatgttgttcattaccactacaacgtttacaaccatattttcactaatcactagttgaattcatatatctaatttgagaaacaaaatatttcaaaaataaaataattttatagatgatccacttatgtattttcaatttgtctatgtattttaactaaactaattaaatcagtataataagcatacatttaatttcatgcaacccgcgatttctaacctagttatcatctaactacgttcataagcccagtcaaattaggattgaaataaatgtacaaaaagtcaaaaagtcttcagtcaattcaaagtcttggtctctcaagttttccatttaataaataagatatttgaattcgaaataacaaaagtctatattatttaacacaataatatatccaaccaatgaagacatacaaaatatcttagttattaataactaaataaataaaaaacacgtcaagccgaccaaactttcctccaaataagaccaaaaaaactcttaacaattccaacaacgttaagaagaaactaaagaaacttcctatttccaatttcttttcaaacaaggactctgtcttttgtctctacttgccctaccactttccttgcaccaacacttgaaaatctcaaatcttgtatatatatcaacaaacaaacacaaattctatatatcattcataacaaaacataaccatg

SEQ ID NO: 33307 - DNA, 3000 bp, Unknown; identical to SEQ ID NO: 2481
  misc_feature (1)..( 3000): 2750-1469P.txt file - cDNA_ID_3068104; gDNA_ID_1620544; Annot_ID_160111

SEQ ID NO: 33308 - DNA, 3000 bp, Unknown; identical to SEQ ID NO: 2485
  misc_feature (1)..( 3000): 2750-1469P.txt file - cDNA_ID_3068108; gDNA_ID_1620544; Annot_ID_160108

SEQ ID NO: 33309 - DNA, 3000 bp, Unknown
  misc_feature (1)..( 3000): 2750-1469P.txt file - cDNA_ID_3068110; gDNA_ID_1620544; Annot_ID_160106
agtttgttatcttttaagttaaagaagattatcgatcgaacaatttacgtccattcattaacaaagaaaaaggacgtttccgaagaacaggaacccaagagaaccatgaaagttgtattctaattttttatataaaaaatcaaaaacattattaattttatttaacattattatatcatatcatctactctattatttgagacgtacgtttagtgaattgggcatggatttcgctaaaattacaactttaccataagtttaaaagtttagtatcataaaaataactcgtttagaaacgcgcggatccttttaactcgccttttaaacaaatgggtcataacttttaatcttggccattcaattaaattgtttttagccgttcgatttcgcgttttcacttaaaaaatacgcggatccttttgacccgggttttaaaatactgggtcatactttataatcttggccattcaattgaattgttttcatccgttcgatttcgcggcttcacttaaaaacacgcggatccttttgacccgtttttaaaaataatggatcatacgttataatcttggccattcaattaaactatttttctccgttcgatttcgcggcttcacttaaaaaaacatgcggatcattttacccggttttaaaaaatcgggtactcgcctctaatcctggccattgaattgaattgtttttagcctttcgaatttcgtatttctcaaaagaaaacacggttctttttatcctgttttaaaaaaatgggattctccgtttaatcgtggccattgaatagatttattaccagccgtccaattttgtagtttcatgcataaattcatccgactatatttcaggaaacgaatcgtattaatttcattcaatttattgcgtatcttcgttttctgccttcaaatatatcacttctccataattatagcacatctaatatttcgtttggatcttcttttggaattatcttacattttccacaagtattccctatatacatccacttttacggaaaatgctaaacattttgctataattatgagatttgtgatatggaataaacttgaattccacacgaataatatcttttgcgcatatttttttgacctaaccacttattcttataaatatcggacgcctcatttcaatctactcactcatcttagactcatacagcttcatatctagttttgatttttttttaaatgatgctcgccaatcctcttccatttactcccttgaaatcgctcaagccttacaagaacgcttggcgtattcaggttaaattgcttcatgtttggaggcaatattctgtaaaggttggtgaatccatcgaaatgattttagttaatgaagttgtacgttttatagtttaaacagtatatttggtccagccttatagtgtgttcaatcatcattttcatatattaattattattcatttatttttgtcatatagggtgataagatgtatgctcctgtgagaagagagcagatcgagaagattgaaaggtgcttaaccgagggtgtttggaagatcattacaaccatcactctaaatcatacaagtggccagtatcgtatttctgacttgaaatacaaaattggttttgttttcaaaaccacggtctctccatgtgataccgttttcgatgctttgtttctctcacttgctaagtttgacgtgatcctctctggatccgctaactcaaatatcttgcatggttagcttcaagttttcattttacttttgaacatacatgcattatctcttatatagtcaatatattcatatatttattctctttgtctatacagatgtaatgggtcaggttgtcgatcggtctgaaatcaaagatcttaacgctaacaacaagtccactaaaaaaatcgatttccatttgagagattagcagtacaaagaatctatattcatattcctttttatttagatgtttattatttatttacttttttactaataaatttattattttcatttaagtgacactcggttggcatgtacactttgggggaagtatgctgagatcgttgaccaaacttgccaggagtcaaccgatggtattgtggtttgcttaatccgatttgcgaagatcaatctctacaacgataattatattgttacgtgttactacatatatattgttttttaaaatatgttcttttatttataaaacagatagtaggagtgttttcaattcttttgatgtttcacaagtcttcgttgatcccacatagactgagttggatctttttaagcaaaagtaattatatttctatttcactaaatatatttgcttctagataaaatttagcaaattatattttctttatatatagcataccaacctattcatatttttttcgttttttttttaattatgagtttgaagtttgaagaaatatattttccaataacttacatcttaatgacatacacgaaaacgtacaaaactactatgtttacacctacatatacaaaatatataattacgtttccaaacgtacataccaactatacacatatattttccatgctacaaaccgaggaaactacatatactaaataaaatatggtttgacgagactaaatatatttagttgataccaataatacatgatatacaactacatattacatataatgaaaatatagtatagtttttgtggaatatacagaactgatatttgatgattaattaaaccaaagatatcgtgtgtagcacggataccgacctaattattcgtattaatttatttttataaccttatatcatcattgttcatattacttaattttatgactaaagtataaaattagaaatacaaaaagtatatcaaagtttatttttctgataaggttagtggaggagtgactcattgattaaagtttagaaataggaatctcaatcactttcattagtttccaatttaacaaatcaaaatcagaagaagaaaaagatg

SEQ ID NO: 33310 - DNA, 3000 bp, Unknown; identical to SEQ ID NO: 2477
  misc_feature (1)..( 3000): 2750-1469P.txt file - cDNA_ID_3068119; gDNA_ID_1620544; Annot_ID_160100

SEQ ID NO: 33311 - DNA, 3000 bp, Unknown
  misc_feature (1)..( 3000): 2750-1469P.txt file - cDNA_ID_3068132; gDNA_ID_1620545; Annot_ID_160140
gtgtacgtacaacattcactaaaccacatttttcaatacatttgacgtgatatggtatagtaattattagagagaagagtttgtagcaaacctagcaagtcccatggatcaacattgcaagaacggagctcagggagatcgaagtccattggacggtggaggaccttcttggcgagatactcgaacacaagatcttcatcatcgggatcgaaccgaaacccgggagggagtctcatgcttcttccgttcatggcaaatctctgcgcagaaatgtccattgctttcttatgagtatcctttgtgtttggtttaggttgtttatatatacttatgagtgtgtcacctttagtttggcaaaagcggattctgcttttcctttagatactttttacgtactactattaatttcaagagataaatagataaaaaaaaattgataactgcaaattcagagatcgtagattggtttcatttttgtttatttaaatgcgaggatcatcataacaaattgtggtgcatgtacccatgcagtcaacgttgttaaggttttgaatatagcgagtattcaaaaatatctttatttttttggtaaagataatctagttcctttttcgttttcctgggcaaaggtaattatttattttttcaaccaaaacgaaataaacaagatttaagttccaaaagcctagatccacgctgattcattaccatataagtacattcaacatcaataactaaaacgagcacatttctaacaattggcccagaactaattttaacatgcatttgaaattttatttttcataagccgatcggttagcccaggtaaaaatacacgtaagtgtttagagtggatttaaacccgaaaaattaccacagtgtttattccaaatctgaaatgttttcacaccgaaaaagaaaacaaacctttatgttagggaccttacacatgtttagggactagtgtatatatcatccatgtaaaaatatccatgcgaccctttttttttcttatagtaatgtcggaatgatatacgaattatagatatgaatgtacataaataagcgaaagttttggacgtacgttcaacctataattttgtagtaaaatcatttcttggtataaatttatacgtggaaaaggaaaacttatatcatcgaggaatcaaaattttctttgtctttatcatttggcaagtgaaataataatgtcgggatacaatacatttttaaaacaataaatttaagtaaatatgcataagcaatgattaagaaataagaaaaatataagaaagtatattcagaaaacaaaagtgaatttgaaagagagtccaagtcgatcccaacttaaagatttgagaagctgacttaacgagtaagttattagatgttggtctgactcaattttctactctcatgcacttctttaatttcaattattttagataaattattgtatatatgtgtgtctttggactggtgacttgccttttatccttcctttttttccttggatcaataaagctcccaaagcccccaccaaaccaaagttgttccaattttttgcttcaactttccagcatcagcctttgatttttacaaatagcattttaggtttagtcctctttgtataatgttatgttttatacactagaaataaaggttacataatttgtctttcgaaagactaagaaaagaaaatgaaatggattaaagatgattgtttcattgttaaggaatcgagattagtttaattggttggaacttggaagagagtattcatcagctttcttttgctgaatcttaattcgaatgcaacatgactagcttatatttgataaatattttaaattgttaacatctagctttaattctagtccaaaatttctctatataattttcatgtgttgaaagtaggcaaagctctatttgttttatattcataaaggatatagaaaaagctttaaatttgtcaatttagaatcatatgtcttactcctcccacgcagcattttggatttggtacttttcttcacctcgaagatgttggctttccatttcctttatttgtttgttttcaatcttctttttactttagattttgatgatttagcgacatttcttaagcaacgacatacataaatgaaaagtttcatttctttataacttagtgttgtcaattgatggttgatattgatatggtacaagcaccatcttcatgttcaattattctttttaaccatacatacacttgaacgtaattttttgattggttctccaatgcaaaaagaaaatagttttaaaataatgtctttgaatctagttctaattgaatgggtttaccaaagcatactaagttagtcaagtaagttacttttctttcctttttttttttttttttgaataccaggaggttttgggacgaagcccgtaattcccttaggtccgaaatttgttccaagcgtcactcgaaccgacgacctctaaactttaaagttaatcacaatggagattgtaacattttgattatcttggagcaaatgaattcttagaagaatatttgatatacaccaccaaaaaaatacatgaactagtcaacaaatagctgggtgaaccgccagttcccggttccatcagagttttaaaaagtccggttttatgactagtttagacccaaatgtgcctgctggttccctattaaaccggtcgggtccgggtttaaaatcactgagtctacccaccctatatatccgtacactcggcccagatcatgatccatatttaaatcaaacttttacatatttgatctcaatatgattatttaactgttgggcttttaatgggggttttggcccaataagtaagtaagcggcgtctcttgaactttattgtagccttttggggtttttgagaaaagtttttagggttttcagtcgctgagaacaattttcttctccttcttcttcttcaagcagagacgctctcagctcaccagacatg

SEQ ID NO: 33312 - DNA, 3000 bp, Unknown
  misc_feature (1)..( 3000): 2750-1469P.txt file - cDNA_ID_3068139; gDNA_ID_1620545; Annot_ID_160136
gtggctttcatccttgtgaggcagtcggtattgacgctacaaatcaccacgtgatatttcctcttgttttatcctcacttacacagttctgataatcattttttagaagtttactaatcctgaaattgctctagatcaaacacatttaaccgtagaattctctcaaaacagttgaccggaaaaataagcgcaattttgtgatatggttgtcaaatcaacttttttaaatctctttgtatgcaccaccatatttctgaaatagaaatattacaacaaatttcaaaaataaaacatcaattatatttattggagccttatctccaagaggtctctccatgaagttttttttcttgacattctaatgagtacagcggattaagaatgcttaggattaccagatatccatatttcaccaaatattctttcatttttttttgtaaattcccaacaaatctcattatgtttatatcctttgctaggatatggactaaacatgtcccttttttttaggccaaagactaaacatgttcttattccattctttttgctttatcaattaatcttcaaaaaatatttacaaagtaaaaataaaagctaaatataatcatggtttaaattttgagaattaatattattttaattgattttcaattacaaacgtatcacacgaattctaatctagttgcatgaaaagtctaaaatgttttactcccatgcatgtacaatatttagagactccatgtagaatatatatatccaattcaaattatgatttgagtttgataaaaacaaacaacaatacatgaaagttgaaatatttaaaatatatttaaacaaaccattttttaatacacccctttttggtttagaaaattaccactaaaattgtaaagttaagaaaacaaaaagcacaacaatttgtgctttaagtagtgttcattttaaaaattttgcttatctttttgataccctttctaaaacacaagtttatggtaccttttaataaataacataaaaacctgataattttatttaagaatgacttgtaaaactaaataaaacaaaactgtatgcgaatcacacgtattttattagatatccgaaatttctgcaagtgatttttttcttctaaattgaaaagaaaatagtgaccaattactttagccagctcaaatagatatatattcccaataaaattagtttatatgaaaatataactgtacgttttaaaaatatatatataacttcttcttttttttagaacaattaactttacattttctttgtcacaaactagtcgataaagttatggaaggtggaagcatagattaataagagattaataaatatataaataaaaggttagggagataatttgctttgatacattatcgactagtttgtgataaatttagataacacgaaaagtagccaagtggaacatccagaagtatgacgttgaatcctacctatacccacacgacagtcacgttattaagataaaacgcaatacaactctattcttattttctttcgtgatttttatatcgtaaaaccaaatatacaaaaagtgaaaaataccatttaccatttatatttttctttataatcgtttcttcttaaattttttaatttttagtggttatgatcactttatagtgtgatgaatttctttctgtctcaatgaaatatttgaaaaacattacccactcattaatgcaattaatcataattagattgtttatttgacaaagaaaaaaactaggaagcttataagaaatcagataaagagataaacacaaatgtgactttaagagtaataataaattagttacggacctaactttggctgccaaatcatagagtataatggtgctcataaacaacataaaatatggtacacgtggtgcagactcaatgaaaaatgttcatgttgactggtataatgaacaaaaggagcgatcacggttaggatttttgatgcttgtacctgctgttggaccgcctaatgcaacttcgatgtgacttcttctctttagatatgttttgatactatgaacttctttgttgtgtctcaacataaatcatattccctattaattaagaaatttgatatggctaatgattctttggatacacatataatatacattttgttgcaagtcatataaacaattacaacactggagtgcttaaattcgtttatgtgggataaactttttattttagtctcaaatttaaaattacttaatatcagtttcggcaatatattttgattggcttaaaaggtatttagggaatcatttggctcgactctctcccgattaactatttgagaatcattactttaaaaggtgactaatactaattaaaggcgtataatgatctatatttatttttgtcaaaagtataatgatctatattacttaaatggtactagaaagctaacagcgatcaggagcttcttggttacctctaaataataagtgaccactcgttcaatggctttctaaagaaacctctatcgaccgttctttaaattttcttttcggttttacagaaaatctttgttaaagctcattagtatgaatacgatattaatatataaatctaggtttggcataaaaagtttgatactaacgtaacagacgccaagagtgcataccacataaaagtttcatatattttccatttaaaagaatacatcaattagaaatatctgagaccaataatgtgacacgtccttctcgatgtcgtcttaaacgtattaacattgcatactttcacatgtgaaccctctatatatatcttccatctttggcattgtaaattcatagctaaaactcacaaactagagcttcaagagttagaagaggcttcaagagctctatctctctcttaatttctcttggcctttgatactttttcccgctcataagttttttcgatagtccgaccaaacaaagggagagaaaactaatcaagaaacatcaagaaatg

SEQ ID NO: 33313 - DNA, 3000 bp, Unknown
  misc_feature (1)..( 3000): 2750-1469P.txt file - cDNA_ID_3068143; gDNA_ID_1620545; Annot_ID_160135
acgttgaatcctacctatacccacacgacagtcacgttattaagataaaacgcaatacaactctattcttattttctttcgtgatttttatatcgtaaaaccaaatatacaaaaagtgaaaaataccatttaccatttatatttttctttataatcgtttcttcttaaattttttaatttttagtggttatgatcactttatagtgtgatgaatttctttctgtctcaatgaaatatttgaaaaacattacccactcattaatgcaattaatcataattagattgtttatttgacaaagaaaaaaactaggaagcttataagaaatcagataaagagataaacacaaatgtgactttaagagtaataataaattagttacggacctaactttggctgccaaatcatagagtataatggtgctcataaacaacataaaatatggtacacgtggtgcagactcaatgaaaaatgttcatgttgactggtataatgaacaaaaggagcgatcacggttaggatttttgatgcttgtacctgctgttggaccgcctaatgcaacttcgatgtgacttcttctctttagatatgttttgatactatgaacttctttgttgtgtctcaacataaatcatattccctattaattaagaaatttgatatggctaatgattctttggatacacatataatatacattttgttgcaagtcatataaacaattacaacactggagtgcttaaattcgtttatgtgggataaactttttattttagtctcaaatttaaaattacttaatatcagtttcggcaatatattttgattggcttaaaaggtatttagggaatcatttggctcgactctctcccgattaactatttgagaatcattactttaaaaggtgactaatactaattaaaggcgtataatgatctatatttatttttgtcaaaagtataatgatctatattacttaaatggtactagaaagctaacagcgatcaggagcttcttggttacctctaaataataagtgaccactcgttcaatggctttctaaagaaacctctatcgaccgttctttaaattttcttttcggttttacagaaaatctttgttaaagctcattagtatgaatacgatattaatatataaatctaggtttggcataaaaagtttgatactaacgtaacagacgccaagagtgcataccacataaaagtttcatatattttccatttaaaagaatacatcaattagaaatatctgagaccaataatgtgacacgtccttctcgatgtcgtcttaaacgtattaacattgcatactttcacatgtgaaccctctatatatatcttccatctttggcattgtaaattcatagctaaaactcacaaactagagcttcaagagttagaagaggcttcaagagctctatctctctcttaatttctcttggcctttgatactttttcccgctcataagttttttcgatagtccgaccaaacaaagggagagaaaactaatcaagaaacatcaagaaatggctctaactaacaatttatgggcatttgtgtttggaatcttgggtacgtgcacatacataagcatttataaaagaaaccatcatatatactagtaaactctaccaacactttgaattacgttttaagactcataatgtttactacgctgtaaatttgcaggtaacatcatatcattcgtcgtgttcttggccccagtgtaagcatcaacacgcccttacaaagtctctcctttttatttgtcgattaattgtttagagataattaaacgtttctttgatattatctaggcccacttttgtaaggatatgcaagaagaaatcaaccgaaggttttcagtctctaccctatgtttcagcactttttagcgcgatgctttggatttactacgctatgcaaaaagatggcacagcctttcttctcatcaccataaacgcttttggatgcgtcatcgaaaccatctacatcgtcctctttgtctcctatgctaacaagaaaactagagtatgttgaaacacccttttttatacatatatataattttatcgtaactttcacgttgatcataattacacatgcacacataaacatatgtaaatgcttttgtatccggtttgctgataactacatccttgaaacgatgttacagatatccactttgaaagttcttggtctcttgaactttttgggatttgccgccattgttcttgtctgcgagctcttaaccaaaggttcaacacgtgagaaagttctcggagggatttgcgttggattttccgtcagtgttttcgcagctcctttgagtatcatggtacgttttatttatatttctagacgtgcatatatataggaacatttatatatacgaacgagcaatattttacgttacatgacctacgaagaacataataaataaatattcctataattaatgtatgttgtgtcttgtctctcctttcctatttagttttttgcacgttgggaaatattaaaatagttaaaaactactaattttggtgcagagagtggtggtacgaacaagaagtgtggagtttatgcctttctctttatcgttgtttcttacaattagcgccgtcacgtggctcttctacggtctcgctattaaagacttctacgttgccgtgagtttatttatacaattctcaaataattctcttattttattctgtttcgattatttcaaaatatattataaaggacagcacaacattatatgattagattaattattatgggtggttctttaataaagtaaaaacagtagttacctttgtcttttttttcctcattcaaactatatgattttgaaccgtacacatttttcgctttattattagcattatataaataattggacccccactaaatgtgctaaggaattgagagtacaatagcaaatactagaaacaaaaaaactaatttgttatgttgtgatg

SEQ ID NO: 33314 - DNA, 3003 bp, Unknown
  misc_feature (1)..( 3003): 2750-1469P.txt file - cDNA_ID_3068150; gDNA_ID_1620546; Annot_ID_160161
aatatgagtagaaacctcctcgtttcatcgccatcttcgttaggagacaaagccatagcagagtcccaaaacttttgcatcattgagtttgctgtctcattgtttattccagccgtacttccagccttgtcaaaaggaaataaagagtttatagcaaaacaagaatagtatgcaacaaatatatcatgttctttcttctctcggattgtttatcgatcttgtctcatgttttcgacttcaactagaagagaataatagaagaaaaaaagtgtaccgtagtaacagcagcatgagttatgtggatcacatcaataacagcgacaacatctccatctgtatgtaatcatcaacattagacaagtgttgaaataacaatgcttcatactttatagctcaaagtcagttttgaggacattttgttacctttatccaatacaggaagatgcagaaatttgccattatgcatgatatgtaaggcttcaacaattgccatatcaactgttgcagattctggattcggtgtcataacctatagaataatgggattgaaaagaaacaacaaagacgaaaaatgagtactcatataaatctaagagttgaaaagaataatttcaaccagattcaaaactaacgagcataagcatacatacatatatagcgaaaacacgaacttaacgaaaactttaccttctccacagtagttgtctcttgaggaaggttttgggatatcacccgcatcaagatgtcctttgagctaacaaaaatcacaatttaagatcaaagttccactagaaaagattaaaacatgatattgtagagaaaaaatttcagaaccatagaaacgaaaaagaagacaaggggccaaatatgacacttacgttagaatcccaactaatttgttctccaccatcaccatggctgcgctagactgatattccaccatcttcatggttactcctaacacagtctcatccaatccaacctttaaaaccctgtacgttttcattccaaatttactcgttaagctttgcattatttctctcaataaaacaagtataagatcaaaatgatttcaaatatgataataaatatagaggagatattacctactttgtattctccggaattatagttgaaagtgaaggcttgaatattcgttctctaagtgtctccataaaagtgtttggtcctatcgtatatccaacaaaaacgccatcagaggcatgcaagaagacatttgtgatggattcaaatggagatactcaattccatatttttaaacataccagcaatagatgttccccagttcttttcaacgccttcaacagccgcagcaatagccttacccttctcaactgatctttccatgcgggcaatagcatcatacaaacactttgcaatatcgagaagcgcgataacttctccattctccaccaccggcaaatgtctaaacttgcctgcatatccactagtcagctcaagtaccaagaccaacaaagaacttataaaagaacaagaaataacaaaccttgaaccatcttttgaagagcttcaacagcaatagtatcagacaaaacaaaaacagggttcttggtcataactttagatacaggtgtttcttcaaggttaagttgtttagcaatcacttttgttgctatatccttaaaaaaaacaaaagagataaaaaaaaaaacataagtgaaaagtccagtttgcatttagaatcctgttcatgaaaacatgtataccctatctgttaggatcccacaaagtaatgcattagaatcagtcagcaataacgcatcaacacgacgagcagccattcttcgacaagcttcaaataaagttgtgctatctggtacagtaagagccttacacaaccttagtctctttaccgttctctcaccactcctttccccactcaagcttctacaccaagaaacaacatgcaaacatttacttccaatctcatatattttgaaacatgtatcattcctcagaaaaatgaagaattggaagagaatggggtgatgattacatggaagaacgagaagatgtgagagatcttcgtgggaggagatcagagccaccaccaccaccaccttcgttttctgaagcttttttccttccttgaaatgaatgaccggagaaggagagacttttcctcgacggaccaccttggttagccattttcaactattccgatctcctccttcaaattctctgaaacactttaataaaaaaaatcatcagattttgatttttttttttttttttgcagcaaatgcatattcgaattggaacttaccaaataatctttctctttcggaaaatttttgatatcaattcacagaataaaagagaaattcaaaactgggaatttcgaatcttcacttcgataatgatcgacgatttcgaatcgcctagttggggcacgatcgataatgcagttcgaaggaattggaattttttttgtttctgggaatcaatcgaaagaaattttggaagagaaagacgaaaggagagggaaagcaaagggccagaggagataataattaattgaataattaaaaaaaaaaaaaaaaaaaagaatccgtggtggaacttttcttcattttgccaatctgttaaccacgaaaatacagatttgcccttggtatccgatcgggctgtgagtatcacgctacgcgggaacgacgacgctgacattgttaatgaggttatttatttaaatccggaaactaataatcagtcccattctttatgaattcaagagcacatgtgccaatttggttcaagagctacgataagtaattgtttttaacaatgttatttcttaattatctatgatctatattcactgtgataacaagatgataaaaatgacgtgaatgcaagatatattaatacaaagctttttttaaaaacaatttactcatttacaaagataatgataacattctgagttaccataacacattaaaaacagagatatctgaaatg

SEQ ID NO: 33315 - DNA, 3003 bp, Unknown; identical to SEQ ID NO: 33314
  misc_feature (1)..( 3003): 2750-1469P.txt file - cDNA_ID_3068150; gDNA_ID_1620513; Annot_ID_159171

SEQ ID NO: 33316 - DNA, 3000 bp, Unknown; identical to SEQ ID NO: 2490
  misc_feature (1)..( 3000): 2750-1469P.txt file - cDNA_ID_3068160; gDNA_ID_1620547; Annot_ID_160188

SEQ ID NO: 33317 - DNA, 3000 bp, Unknown; identical to SEQ ID NO: 2495
  misc_feature (1)..( 3000): 2750-1469P.txt file - cDNA_ID_3068166; gDNA_ID_1620547; Annot_ID_160181

SEQ ID NO: 33318 - DNA, 3003 bp, Unknown
  misc_feature (1)..( 3003): 2750-1469P.txt file - cDNA_ID_3068199; gDNA_ID_1620548; Annot_ID_160214
tggcaatcaatgtttatatctcgggagagaaaacattcgccggagaagctgattggtatggtgtccttggtgtagacccctttgctagtgatgaagcactgaaaaaacaataccggaaattggttcttatgctccatccggataaaaacaagtgtaaaggcgctgaaggtgcgtttaatctggttgcagaagcttgggctctactatctgataaggataagagaatcttatataacgtaaagaggggcaaagatgtcaaagcagctcaacaaagattcccaacaacacagagagagattccatcacaccagccaacttccaacgggattccaaatgtaagagagcatgtagtttcgagtgctagggctagatataagcctgctacccgtaagcctgctgcccgtatggatagatctcgcacgggttcgcctgcttttgtttatccgacacaggagagtagtaccttttggaccatgtgcaacaaatgcgacacacaatatgagtaccagagggtttatctcaaccaaacattgctttgtccacactgccatcatggtttcgttgcagaagagaaaactccgcctacaaatattccgaagcccccagtcaacatctcatctaaccaacatcaccggagttccaaaaaccaagcgtcgaacaagaactcaaatggttcttcttataggagagagcctgcaacatctgttaaccataattttcagtgggattcatcaagaatgggtggttcttacagccgaaatgccacaaatgaaacggcgaatgtagttcagcaaggacaagataaactgaaaagagtgttttgggagacgcaagaaagggaggcggctagaggatttacaaactctgatctggggaattttaagaggcagaagactgatgattcccatatgcgtggtccatctgcaggcaagttgtcgaatcaaataggtgcaagtaggtccagtactcctttttatgctgccaatgaaaatactgaatcttccaacaccataggctctcgtcatccgtatgtacaagcattgttacgttctgatataaagaaagctcttatggacagaggccagtcagagatttttaagagacttcctatgatgatcgctaaaatggaagggaaggtgaacccaactgaaggggagaagaacagtacgaaggcaatgagtagcaaggcaagtgaggttgaaaggagcaagatgagtagcacggcgaatgaggttgaaaggtcagttgaggtaattccccatgagtcagatgaagtgaaggaaatcgttgttccagattcagactttcacaactttgatcttgaccgatctgaaagtgcttttaaagacgatcaaatttgggctgcttatgacgatgctgatggaatgcctcggttttacgcccgcatccaaaaggtgatttctgtgaatccttttaagttgaaaatcagttggctcaattccaaaaccaccagtgaatttggtcccatagactggatgggtgctggttttgctaaatcatgtggggattttaggtgtgggagatatgaatctacagatacactaaatgccttttctcacagtgtcgattttaccaaaggtgcaagaggactcctccatattcttcccaaaaagggacaagtttgggcattgtatcgaaattggtcccctgaatgggacaagaatacccctgatgaagttaaacacaagtatgagatggtggaagttcttgatgactatacagaagacgatcagagtctaacggtggctctcttactcaaagctgaagggttcagggtagttttccgcagatgcacagagaaacttggtgtgaggaagattgccaaggaagaaatgttaagattctcccatcaggtgcctcattacattcttacagggaaagaagctgataacgcaccggaaggttttctggaactagaccctgctgcaactccttgtgcattctcttcagagaacgcagaggcggatgagaaaagtgaagctgtgaaagagaatgagcaaggtgaagccgtgaaagagaatgaggaaagtgaagctttgaaagagaatgaggaaagtgaagctgtgaaagagaatgaagaagtgggtatggatctagattaggggggtatgaaggtagtagcagtcagtacagtgtacaatggaggaagaaacatatcgtatcatctcattagggcacaggactaatcaatgtcaggtctgatcttttgcttttttctattttttctttcttttgtttaaggttgacccagaaagtagccatattttggcataagaaactatctataccggaaaaattaacctgagtatttcgaatattttttgggggggtcaatgtacaatcttttttggtattttggtatttactcaatagaccagaaagaatcttgtaagaactcagtttgggattcgaatatatatatggtggttatggttatttgttactttttttatctttgaagcattcattttgaagttcattgtcatgtttagtgaatttggtggttgtgaatttgtgattggccaaaccggtccattttgagaccagcccatttaagcatgcaccgacttggtccttgttttagaatttgtgcctcatatatgcaactgatatctctcaatctggttaagtttgtttcttgtcagcgtcttcttatcatttacttaggcatcaaacttttgtcggcatgccattgtgtttgagtaagaggccaactttgatatttcaagataaatttgtgcctcctatatgcaactgagatctctgtttcaaagctacaacgttctctgttttcgtaaaaaggactttaacagcgaacttttagaaattgtagactagtagtgagaaatttttgactcacatcatctttttctcatgtatctgaataaagaagaagtgtgagattttgattcataagccattaatggtgttcacgtttctatagctgaaatggtcaaaaacaaaagatagatgcaacacatg

SEQ ID NO: 33319 - DNA, 3003 bp, Unknown
  misc_feature (1)..( 3003): 2750-1469P.txt file - cDNA_ID_3068208; gDNA_ID_1620548; Annot_ID_160210
tgaattgttatggttttcacagcttctccgagatttgaaagttaaggtcacatcttctgcaaagatgttttgtgacaacaagtctgccattcacattgctcataacccggtgttccacgagaggacaaaacatatcgaaatcgattgtcatacgacaagagatcagataaagaatggatttcttcggctgtttcatgtgactactgataaccaacatgcagacatcttaaccaaagcactccagccaggtccgttctactcgttgttgaaccggatgtcaatatcaaacctctttcttcccaattctggttcagtttcagaggtttgaggggggtatattagatatatcatatagtgtatatacttaggcttatacatgtaattaatgtccactatataaggtgacaatgtacagaactttatgattaatgagaataagaagtttaataatctcaatcttaatagtctaataactaattagatggtcttcttcgacaaattaaaaccggaagagtttaggttacgtataaacaagttgtggaattgtgaaaaaaaaaaaaaaaagaagttgtggaattgtgacctaaataacacggccctttagtttgtttcctcaccggtgacaaattcgtaaccacgcttttcagtgtaccaattttaccaggacaatatatatgaccattttaatttttaacaattaaagtgcattctcttaagagcttattcttgcataattgaatatgatgctcacggtcacgggtttcttagggataacgtacatgaaatctcaaaagaaccaataacgtagcaagagtaaaaactctcatggagaactacgttcagatctccttggtctaacacgctagcaacttccaatgtattctacagtttggatagatctcgcaaatgaaacctaatttttacttataataaatcgtaaaagtaaaaccatatgtgatgggttctttagaaaattgaaattgtaaataatttcctaaatcacgatatataaagaatgtgtatcaattttagttttgttattcagaataatattacttaattatgatcacaaattcacactgaacatattctaggttccactgtttcattcaataattgtatctgtatatgttcattacctctaaaggtaatatgtgatccttaccattttcattcttggtcttcgttttgggaccaattgacaaagaacgattgaaacaatctctcaacgaattttgcgtttctcttgtgatgatcagatttcttggcactacaatgctcatgtacttgaatgccaaatcttatgcgagatatattggtagtatcttttgttgttttgtacatttaaagctgtacacatgtgacacaaagtggttgaatatatttctgtgtgttttcagaaattctccttgattacatgcaagttctcaaacttatgatgtacatagtattcttaaaaccaaatttatcttattgatcatggtattttccaatacaacataacctatgatgacataaataactctatttcgatgttgtttatctcaatgccatggcaacctttgggctcataaacataattttctttatggttgaggttttcgactttattatacccataatcttcttctttttttgcctgacactaacctttgattatacaataatacttgttaaatcaataatacaaatttaggtgacataaattaataattctctgtttcgcgaaacgtatcattccaacatattaacacaacttaagaaaactgtttaaatttatattttatcttttacaaatacattagaatcaaagtatctttcttattaataacccaaaataaaagagactaaaaagatatttattttcaaaaagtgtatagaaaaaaacaaaaagacaagatttgtaaaacaaaaataaaattttaaaacgaccctattgataaaacggaaagagcataacttataccaaatagatacaccactaccactcaaaactataattttttttattttcaaaaccttagttatatgagactcataggataaagaatgaatgagccagctatggttatagtataatttgttttaattaggtttataatacaatgaaagtggctaattttagctaattgtttaaaaagttgattagttggaataaagtgaggtaatcggtaatccaatggaaaaagaatataacaaaacctagtgggagtatataaatctaggatgcatgactagtgccacgttgccgcttctgttcggtgtcctctctctctttcactactcaccaccactctctctctctctccctccatctctcttggattctctctcagattccatggaagctccaaaaagctgattcgttcagccaatttttcttcactctctctcagattcggatccgtggtcagatcaaccaccgtgtgttttccgatccgattcgattctttttttgtcagagctctcagataaatactaggattccgtttccaccacagatccttgatttgatttggatttatttcttcttctttctctcttcgagtttgattccacaagataccttgttagtttttctctctacctttgatttgatccgttttcgttatttgaatcgaaaatttgcttaggaagtagagattctggatcgtgttcgttattgttcatgatttgcttgttgaattctataatcttactcgttgaatatgcaggatctaagtttaattgaagaatttagaggttgaaatcagtttaacaacatttctcaacttatccatacagatagatagggtttgttatcttaatttgggttttaaggatccaggatctgtattttagctcttatgttgatgatgatcatgttctatgttgttgaagtagctcgtatcttcgttttctgatttaggaatcgtattattactaatgacagaatgaattttttctatatgcaggtcctgcattggagaaactaatttaaggtaaggtttgactacttagatg

SEQ ID NO: 33320 - DNA, 3003 bp, Unknown
  misc_feature (1)..( 3003): 2750-1469P.txt file - cDNA_ID_3068216; gDNA_ID_1620548; Annot_ID_160205
aaaccgactatcgtttcttatttctatagtatttttgcaagacttttttggtggatttgggtaaaagtgcattcggtcatatggtacattcccctattaaataaaaatggtatactcctatgttattagctaaaatgtttagattataattcagagtcatatcattaataaaattaatattaataaaataaatggctttttggcaagacggatttggagtgacgggtttttgaatcaacattaataaaaaaataaaatataattaatacaccgtttcaatacgggtttagaccactaatattaaacatatcaaatcatcctaatttagaaaagattatataaaaccaaaaatgttatgtggtatgtataatgttaccatatataaaatataaatgtattagagaatgatataatttgcaaaacttttatctataaaaaaaattcttaaattttaaaaattactactttaaaaaaaaatcacgggacgggttaagaaattatagaacgggttttattttggaattaagttatatggtagatgtatttgaatcaatatttataaaattttaaaatattattaatatgttgttttaataggggttacaacttcagttttttaacaattgtctcatagattcgtggtatagccttacttaataacaattataaactgtaaaatataatttttttataaaaataaaatttgcaaattttaatatatattacttttaaaaaataaatcgtcccgcgatataccgcgggttaaaatctagtgtatatttattttgtacaaacacaaatatctgattgaataatgtacataaaactacaatatacgaaaagtaaaacgataaaactttcaaaggtcgtataagttaccaaagtgactaagcttatgaatgtgaaaggcacatcaactaagcgtttatggttttcctcaacctttttatcctaaacaaaaacttcaaatatacttttcaaaaaataacaaagaggcttatactatgacaaattggtaaaatttaattcagaattttctatatcttttcttgtcttacatgtctttcactttcagtaagaaaatatataaatcagaaaggaaaaacacacacactcacacattaattgagaagaatgagaagttgggcgatagattatcagtgaagtcgacaaaagggtcggtggcgtaataatgaaagctccaatgcgttgacttatcatccactttaatttgcctttgccctacttctctctttaagtcaacgattttaattgttacccattttactaaagagtcttctcttctaccaattacatttttgagacattatttttcttcttttatccttatcttttcattacacatgatttaatcatgattaaagataattaatcatatctttagttattttcttctaactagtcctcttttattttcagctattccgagaagagctcgttacgcaatagccgtaggcgccggaatcccaggagctttaatagtctttggtcttttctgcttcgtatacagcaaaatcagttcatgcattaaacggcgtcgtctcgtcccaaccccagagatcaacaacgctcaagcccattatttacattcaagtgtcatagtaatgggtcttgatgggccaactatagagtcgtacccaaagatagtattgggagagagcaaaaggttgcccaaagttgatgacgctacatgtgctatttgtctctccgagtatgagccaaaggagacgcttcggacaattccacagtgtcaacattgttttcatgctgattgtatcgacgagtggctgaagttgaatgggacttgtccggtgtgtcggaactcaccggagcagattttgccgcctgcttaagctattatcttttgtgttctctttttcgttacatcatttgtactttttgtagttagttcaatactccgtccgttttatttaaatgtcgttcttaagattttttttaatacatatcataaataagagtttttgtagatttttaatgtatatattagcttttatagaaattaatatgctttcttggtttggtgtgaaaatgataaacgacaattatagttaatgttttaagtacaaattccataatttttgtagagttatcacatctcacaataaaaaaattactttcatatgtaatttcttgtcccaagaacatgcatagcataacacatgtttgaatttgggtggttatacatcaattgcactagtacgaacctctaaacacacatcatgatcatttttaagaagtaccactattgttcccttaaattatagcacctacaaggtttggtccaacgtaacattattgtgaattcgttcataagaaatatcatttcaaaatttggatttatgtggtatttcatatgttacatagatttttctaatcaggaggacgtaccaaaataaggagaagattctcgaacgatggaaatgatccaatgactttggtttagtaaagacaccgacatctacccattcattattcgtgggaccttcttcattttgggctatgaattttttctttaagatattcaagtaagcttacgtgacgtcttattatgatgttcgatgaaaactccaaatattcgttgacgttaactaaacaagcgacgcgtggtctcatctttgtgaatactatttatcagataatgacattttatctaccaattattcctattggtgaaacgttttaaatccaaagagataaaactgagattttggaattgacaagacgtaattgtgaagatagtgaaatgcaaataaggaaaccaatcgcattctatctactgcaaagacttgagtcattgtagtgttagaccactataaggaggagccgagtcggggtattaaaaatggataaaaatcgattagataaaaaagtcttacacgggtttatcctatcagattgtgggtacaaaacattatagtcaacaatttaaatatggatttgatcagttacataaaagcaatg

SEQ ID NO: 33321 - DNA, 3003 bp, Unknown
  misc_feature (1)..( 3003): 2750-1469P.txt file - cDNA_ID_3068242; gDNA_ID_1620549; Annot_ID_160256
gaggtttggttggtcgagcttactgattaaaaaatatacacgtccaccaaatattaaaacaatatatcccatttttcctcctctcttttggtattacattaatattttattatttccccatttgctctgtatatataaacatatgtcaatagagtgcctctacagtcatgtttccatagacataatctctcaccattgtttttctctgcaaaactaaagaaacaaaaaaagaaaaatcggagaaaccaagaaaaaagaaatgggaagtgtagaagcaggagaaaagaaggctttaggatgggctgcaagagatccttctggtgttctctctccttactcctacactttaaggttttgtttcctcttctcctttcacaagaaaatttggttttgttatgtagaatttttatggttttattgaacttgtttttgttgaaaattgaattttggttttgttaatatataggagcacaggagcagatgatgtgtatataaaggttatatgctgtggaatatgccatactgatattcaccaaattaaaaatgatcttggaatgtctaattatcctatggttcctgggtaatttcttctctcttttcttatctgccttatttttcagctttattcttgactggtgtccatgaatggcgattttctttcatctgttaaaaatggatgttatcgctagacttcaatttagatcccaatcatatataaataagatggtttcagattttaaatggaattacatctttttaatttatttgaagttatgcatagattgttggtaaacttaagtatattagcacttgtgactagcttaataatttctaagcgtgctagagataactccaaacagtacattttcaaatgtaagtaaattgtttagacatatattttaattttagataacctaagggcaaaaacaaatattagataatcttagattgtaaatacatgaaattcttatttttaatggttcagatgagttgattagtaagtagttaaccatatgatatgtaatattttgtacaaatgttattgatatattcttctcggaatttagatacccattatatgatgcatgttgttaaatgacttttgtggtatgacagaagattttggtataaagttgacttgacattattgttaatttgaagataattgaacgtgctactgttacacatctgacattcgtttataaccacacctgtcactgtttagtcttctaaattaatatgcaaacaaaaaactctgtcaatgtgggacttgtaggggtaactgaaatatacgagtaagattccgtaataactaaaagtgtaattttgatttacaggcacgaggtagtaggtgaggtgttggaagtgggatcagatgtgagcaagttcaccgtaggagatgtagtcggagtcggcgtggtcgttggatgctgcggtagctgcaaaccatgcagctcagaacttgagcagtattgtaacaagagaatctggagttacaacgatgtctacaccgatggaaaacctactcaaggtggcttcgccgacaccatgatcgtcaatcaaaagtaagcacacgcacacaccttgtttcacaagaaacacacagagcatttgtttcttcatccacaagtaacttatttttgtttcaaaaggtttgtggtgaagattccagaaggaatggcggtggagcaggctgcaccgctactctgcgcgggagtaacggtttatagtccgttgagccacttcggtctaatggcgagtgggcttaaaggagggattctagggttaggtggagtagggcacatgggtgtgaagatagctaaagcaatgggacaccatgtgactgtgataagctcatcagataagaaaaaagaagaagctatcgaacatttaggagctgacgactatgtggtgagctctgatccagcagagatgcaaagactcgcagattcccttgactacatcattgacaccgtaccggtgtttcaccctctcgacccttacttggcttgtcttaaactcgacgggaaattgattctcatgggtgttatcaacactcctcttcagttcgtgacccctctcgtcattcttggtcagtactatttcttgcgtttaaatcatatctagctaataacaacaaaattcaatagcaaacctgatgtttttttctatattttgacagggaggaaagtgatatcagggagctttatagggagcattaaagagacagaagaagtgttggctttctgcaaagagaaagggcttacgtcgacgattgaaactgtgaagatcgatgagcttaacattgcgtttgagaggcttcgcaagaacgatgttcgttacagatttgtggttgatgttgcaggaagtaatctggtggaggaggctgcaacaactacaaactaaagagggcagggcacattgatacatgaacgaaaaattgtaacgggcttgtttgtccaacgaatgttttgttgttgtctttttcaaatggttcaaacacgaatgctttggctttatttttttctaatcaatgtggattttctgtttacgtgtgtttgtcacaagaaaatcattatgataagaattttcttccacttgaactcaaatttgttaacaattctgaatctgaattatggctgacaccaattgaaactgagaaccagtttaaagtgattataaagaaaagtgaaatctttttattgccaaccaactttgggctaagtattaaaagaaaataatacttttttgataagaaaaaaaaaagaggaaaataatttgattataattaaaatctaaaaactttttcgcggaagcgttaaggaaaaatctttgatctttggaaaggaagagagcaggcgcaatcgagtaatccaaaggagttgcgttgttctgcgatcacgaagcggtctctcggcaaatctttcgacgcaagacatcgattcgtgtatttcatttttgctttggaactctatgcggaagaaccctaattgattcgccatg

SEQ ID NO: 33322 - DNA, 3003 bp, Unknown
  misc_feature (1)..( 3003): 2750-1469P.txt file - cDNA_ID_3068244; gDNA_ID_1620549; Annot_ID_160247
gtctccagtcaaccctgcactgtcgttgttgcacgtgcttctctcttctcccacacgtgcttcccagctcattctctctgtttttttttcagtaacaaaaatattccgaaaacaacaatacatactaaacaaataaaaacaatactcgaaaccattattaatatttttttccatttaaaaatgatttgattccaacattcctaacaattactgccactctcggataagttcagatgctttttttgcctttacatttttgtttcgatgtgtagcttttctccaatggtttcattttgcttcgtttgtactttattctttattctctctataaagaaacaagacgatgcatgcatgaacgttatataatcttatcacacttattagatttaatcaatagagcatcacggaaacaaattcatagttaaaaatcgtttttttcgaatcgattattttacaagtatgaaaaccgccatacatactttgatataattatataaaatggttgggacgtccaattgacaaacctcaatatttaataacaacttcgcattcattttccgtaatagatatactttttaatgatcatttcaagatatagaatagagtttcagaaaattttcaaaatttaaatatataacttactatcagaaaagttataaaataaaaatatatgtcataaatttatcgtctaattgtttcaaatggagaatataaatacacaaattatttcttaattaaaatatgcaaatttttattttaagaaaacatctttttcgtttttttttatatccagacaagacatcagataaaaatttataaatgtaaatgccaacgtttgatgaaacactcaatgctatattttaaatattaagcattcgaatttaacatgtaactatctaaacaaagaaatacaaaataataataataatacaaacaaattaaaacaaaacaatggacccctagctagtatagtatctatgcgattgtcatgtttagtaatcgatagccgatagttagactgttagaacttaagaatcataggcagtaccagaaagaagtattggcccatatcgaagacttgaagtgaccaaattagtccatgtaaatcaaaacgtaaagtaattgggtcggatacattttgcagttgggctcatataactttgaaatatctctctcgtagtctcgtataaaggatcggttatattagaggaaaaaatatatagattttttttttttgataaaggacaaatagaagttggcctttcaatatacaaagaataaagatcaattttgggtgtggatactgataaatgatttaaatgtaacaagaattaacattacttcatattcaatggacaatggttatccttttcttcgtcgtcgcccgactattaggagatgacgagtcatcgtttatcttaattatttagaaagcaattgatttagtacgtgagttaaaataatttcgttgcacgttgtccggccgtttatgtctttatgacgtgcctatgatcttatctaactatcattttctcttccttactcaacatcctaaaagaactattcaaatttattagaattccattttcttgagacatgaatactatcaataataattaaactatagttaaacagaaaggcgtaataacataaccaaagccaatgggtttttgcttgacttcccggaaatttaaaagattatgtggttcgataatttacccccaaattattgatgagcaagtagtagtctttagaaaatggagatggacagacctttttcccatctttaaacttgtaattaataaagactttttagactattgcaatactataatgaatcgtgtagtgttgtgttgtgttgatctctgtgttggaacccaaatacaaaaaaatattgtgctaaaaagtgctgcattgatttacaacaatcaaatactcaaccatatttcaagtgggttgaattttaataaggatgaatgattcaagcatcaatctataaacaccaacaacgaaaagcttctattcacaatcgaatgttgtaatcacatacatatatataaactgaaaacaatttttagttaaatatttttagttattaaaagttggcaacttctacttaatgttatatatgttgcacctactattagacaatatctagttaaaacatagcaaaagaaagcttgtggccggtgagaatacaatgaagaatgtaaccccaaaatcatcccaatttccactattttgcctcttaataatagtaaacaattaataagggaacgcatgataaaagttcgaagattatgtacatatgaatatttggttaaacaagacatatgatgttgttacaaacgaggattacataatgtaatagtaatctaaagtcttagggactaagagttcctcattttaatttttaatttgaataaaaattaaaatgatcaatataagagtttttaagatgcaagcaacacaaaaaaacaaaaaataagaaatgaaaaaggaatatttttcattagttagtgtacattttaatagtaataccgtgtatgaccacgacatcatcaaataataataatatgatatcgtatgtaatttttatatagtagtgtgttatttaaaagtttccaaagtgcgtgtaacatatgggttcctagtaccttccgggaatggttagcgtcgtcaagaaactactctgtaaaaagttagaattaggttttccaaactaagaaacatgcttgtaaccaaaatttaaacaatggacaaaatacgaatggaattatcttgcccatgtgatgtgacgtgttttttattttcaatttgtttttattccagaaaataaaataatgacacgttggagccaatacgaagaacacatctatccatcccaatcgctctccacttttctgctcttcgacgacaaaagtttcaaactctataaatacttgaacgcaacagttacaaaaatgtcaaatcgaaaacaaacacaaaaagcaaacaaatatg

SEQ ID NO: 33323 - DNA, 3003 bp, Unknown
  misc_feature (1)..( 3003): 2750-1469P.txt file - cDNA_ID_3068248; gDNA_ID_1620549; Annot_ID_160242
gctctaaccttgactcttcacgtcattcgcatattactctcctcctcgctgatccattcgaattctgcactcaaatcgtgtttttgtacatcatagtttcaagcattatgattctctctagccaatgacttttcttgcgattgaatccttttgcagtctcgttatcaaaagttgaagaatttagtttagtttggttgtgtagataagatttgtaatcgcaaaattcgatctttgttacagttatggattcgagttactctgattctcgtcccatgttcgtgcaatcaccttatggtggttggaatcaaacacagatgattgattcaatggctaatccaatgaacaatgaacaaggagacttgcattcactatctgaatcacaatcacaatctcaaccgtctcagcaattacagcctgcattgaaaaggcctagacttgttgatgataacttgtttaatcctgcttcgtcgtttcctcagccttcgagtagcaatccttggatggttccatctttgaaccctcctcctgtgaacaaagggactgctaatatattctataagactagaatgtgtgctaaattcagggcagggacttgtaggaatggtgaactctgtaattttgctcatgggattgaggatttgaggcagcctccgtcgaattggcaggaaattgttggacctcctcctgctggtcaagacagggagagggagagagagagggaaagggagagggaaagaccgtctttggcgcctgttgtgaataataattgggaagatgatcagaagataatcttgaggatgaagctttgtaggaagttttgttttggggaagagtgtccttatggggacaggtgcaattttattcatgaggatctgtcaaagtttcgtgaggactcggggaagttgagagagagctcggttataagtgttggtgctactgctgctgatcaaccatctgatactgcttctaatcttattgaagtaaatagacaaggaagcatcccggtacctgcacctatgaacaatggtggtgttgtcaagactgtgtactggaagacgaggttgtgcatgaagtttgacatcacgggtcaatgtccttttggcgataagtgtcactttgctcatggccaagcaggtatgttatatgttgaacatgtatctttgctaatgcgaccttatattatagtatcctagtatagatttgcaagttctgtgtatacaggctatctctgaattctcttcttttgaccgacatttgtttgatcttgatttggttgttgattacgaaattgcagagttgcataactctgttggaagggtagaaggagaagctatgaacgcggtagcgtctgtgaataaacaagcagtggtacctgcgaatgaagcatttgcaatgaaaccgattacacaagtaacagcagattcctctggtctgaatgaagaagggcggcgaaagaagtgtttgctcaagtggagcgactccaagaagattaaccgaatatatggagactggatcgatgatttaccggtgggtcaaaagtcgacaaagccagtagagagttgagttttctagcctggtttcatttgtctcgtccttttgatgatcaaaactgataaagctttggtcgaaaattttgaagagtagaaacactctttattttgttcattagcaattctttgattcgctatagcttagaatattgcttttgttataatctttgattacacaaaaaaagtggcttggctcactaatagcatcttattcttaatttgtttcctttggcttctaatgttcatcattatatggataggtttcgtatttcgtttgccttttaatgttctaacgaatcggaagagatatagaaggaattgggcgtatcctaaatttggcctctagtgtttgttgttggttgacaaaataaaaatgtttgttgttgacttttgttttcagattaaggtttaattatctacatcaaagtgcattaaggttaatcggatgttaaaaataaaccactttaccgatttatcaattttcttatatgataaaccaaaaccggtacggtttgctaccgttagattttggatgctcaaattaaatcggttggatggtgctagtttttagaataacgatcatacattctcttttctaatctgttgatatattatatacatacgaatgcttattgttaggtacttaggttcatcgcatgcaaacaaaatcatggaattgtaccatcaatttttaaaaatatatatgtctaaactacgaataatgcagaataaatccatttaacaaagggaccataatgattctttagtgccaagcgatctttttggtttgtttccctacaaaagaattaataaagatttcatactaacggcttaaagtgattaatcatattgctatggctatggcaatacttatttgataatttcgtcgtagctttattctttttatagaaatcacacaaaatatatgggccctcaaattaatagtgttcgtaacgtctcctttactattccccacttctccatttctatgaacttttctttttgctactattgtttttgtattcttttcaacatgacatgatgagttattaaagagctgttgtaggtagagagtcgtagtaaaaaactaaaactgtcggtggaggctggagagcacttgggaatcctatggccctcccaaaaacatataaaagataagaaaagtagtgaaatatagtaataattattgtctttgttagtgatttagtggattgtctaaccatgattagtttatatatttgttttctcacaaataatgaaagtaggtagtatcaatatctagacctaatattttccatatatttaggtcaactctttcatatctggttgatcagtaatcatacaacgttggaattgtttgttttgtttctattataaactaaaacattggtaaaaatagattttcatttgtggaattttcgtcaagtcataattcacttgtttgaaaacaatg

SEQ ID NO: 33324 - DNA, 3003 bp, Unknown
  misc_feature (1)..( 3003): 2750-1469P.txt file - cDNA_ID_3068256; gDNA_ID_1620549; Annot_ID_160232
cagagaggaataacaacgttcaagattcttagtcaagtctaaaacagaggaatgcaatctgaaaatcatgagcatacagtgtagatgatccttcaggctcccattttccatatactcgtagacaaggaacctgtaattctcaggttagatgagcaaagggcaatccacacaaatggggagaaacgaaatgaaggtcaaccgtaatcattcacctctcgttcttcttattacaaaaccctttcaaagcaactaggtggcggtgatgcagcctggcgagaagctctatctctctgcaaaattcatcttcagcttgttcagagctcttgttcatcttttttacagctgcaaccaacccattactgaactcagctttgtaaacagtcccaaagcccccacggccaatcaccgcgttgaaatcttcagttgctttccttatctccttgtagctgaatttccgaaaaccaaacgaattacctgaaaaatcaaaaccacacatttgttttacatggtctaacatcccttgttagtgtaccatcagaagaactcttcaccttcatgaatcatcgaccttgggcggggagaaggagatgtccttgttagattacaagcgatgctcttggagtcatcaagttctcgtttttttctttggataagaactattaggactacaaccatcacaagagcaaaaactgtgacagcaatcccaatagtcggaaccattgtcaagtgatatggatggtgactttttaatggagacaaaacaagattatcgctgcttggactatcagctaacactggaggagaagcttctggactcagcgatgatggagacgaacctgagtagatgtgtcaagaaagtcagaaaagaaaagaaagtccaatcttgatctgatactaagaagattatacaggacacactagtaatatatacaggatctgtcaagcatctttcccaatatagaaacaatgataagattctacactccatgaatggtatgttgacagagaaaacagtatatacctggagtggggctaagctcaggcacattaaagaagcagctagctagttcaagagccgatgaattgtcaacccggcttgctaacacagcataagttgcatcacgacaagtactcagtttgatgctattatcagcaccaacgaggctcctaaggtagctgatactggaattcaaacaattcctgcattgatcacccggaggaagcgggagtttgcagtttctggaaacatctccaaaacttgtggaatgaagcattggcggtacagtagtcagaccctcacaatcatagttaacaagaatcttggtccctaatccacagaagatggtagcatttcttgggattccataaagctccatggttctagagatagtagtgatacagatttcagtcaaatctgatgtaactccaagatcagctgtgtagtttgcatagcgggcgacagatattgcaacgaaagcattcatgtagcggcagcatttagctctctcggtgttgttcgagcatacggaagccactagagtgaagttagatgaagtaaagtccaatggacaacctgtaaacacaatatatcacataactttgcttcaattttgcaatagtttctttctctcaatgaaaatctcatcaaagactacgactttaagcaacgaattcaccacaaattagaacaaaggaacacacaaaacactttaatgcacatcgaaattcgcacaaagcttaaacctttcagaaaaagcaagattaacaacagttcgttttctcttctttatctagttacgaatcaaacccatggaagaagattgtcaaggaagattctcaaaagactgatgtggtgagagacaaaacctgcttcggtgagtaaaggaaagtactggaatccaagcaatgcgaagaatgcgagcaagagagcttgattataaaccaacaccatggccaaagaacagagagagtcgttaggagaggtcaatgagaagtcgcctgaagagaatatgacagtggaagaaggtcagtgacaatgagatggagagagaaagagagagcccccaactttctctatttcttgatgaaacccattaaacccctgaataatccttaaatttgtcattctcttatgtttttacccgaaagttcgttgtaatagttttaagcacccccatacaaataaaattactaattttcgttcaataaaacttttcatgtataaacataatcattgcagtggtcggtttttaagtttctttttttttctctatcttatctcttcacatgatttggttccacaaagaatattaacaactcttagaaacaataagccgctatatgttttcatcataaaacacctgtaaaatgttaacatacggcggacacctaaatgtcaaactagatgatagtatggaaggaatattaaaacttctccaaatactttatcatatggtttttctctcatgtgtgaggttagttttatgattgatttggaccggcacaaaacgtatttaattttcataagactaaagtactttataattttagctggcatgctaattaacttgatagcatttgattacttgataatgatgacagtctcatgcaagttcttcattttttggttaagtttattctttaaaatggaatcaaagaaccatttcatgtaggatggcatgttaacttgttaagtataataataagaacaaaccataaaggaaaacgagaagccaataaagaactctcttctatagctattaatatcatcattgtatcctagatactcgcgattcctcatgttattttttgtttgaaaagataaatttagatttaagtttttatttaccgttttttgttggttggtcaaaacaacttgtaaatcacccgttccaagtcttttggagttttaccaagtagttgcttcttcccaaagtcaaaatctttgggtttttattcttttaaacttctttatgggattttggtgcaagaaagaagaaaatg

SEQ ID NO: 33325 - DNA, 3000 bp, Unknown; identical to SEQ ID NO: 2522
  misc_feature (1)..( 3000): 2750-1469P.txt file - cDNA_ID_3068269; gDNA_ID_1620550; Annot_ID_160290

SEQ ID NO: 33326 - DNA, 3000 bp, Unknown; identical to SEQ ID NO: 2521
  misc_feature (1)..( 3000): 2750-1469P.txt file - cDNA_ID_3068277; gDNA_ID_1620550; Annot_ID_160288

SEQ ID NO: 33327 - DNA, 3003 bp, Unknown
  misc_feature (1)..( 3003): 2750-1469P.txt file - cDNA_ID_3068304; gDNA_ID_1620551; Annot_ID_160302
gtagattaagacaatctagtttttgttggaaattaacatcattttaaaggtatttaaatatttaaggagagagatcatatacgtttcacctctcgaattcattttcatctttataatatggtattgtatttactatctatggtttctaaatttttttgaatatttaatcacttcggataagaaacgatcatacattagagtttggtataaaaaaccgtatgcaaatagttcatattgatttggcggttttctcgacatatttacacatataccttagccaaaatggtcttttcattttcaaacaaccttttcttttcaaatcctattaatcctcctacttcttcatcaccatatttgaatcaaaactatctaacttctaatgtaataattgttcaagaaaaatataaatataaacatttcacttttttgtattttattaatataatttaaaccattcatcgacattaaaaaaaaaaagaaaaaactaacacataacgagtttacaaatataaattatcaataaaagtctcatcgtcaatcccaccaaagacgaagaagggttatctccactcaaacatgtgtcatgcaattgaaaacgataaaaatacgtactgtgggaataaagtgatacgtttttccggcattttttgcaacataactccagttttagacatcaatttttctttgacgaaaaaacaaaaaaacatcaatttttcattgacgaaaaaaaaaaaagacatcaatttcattttttttctaaccatgataaaactactacaaaacaagttaaaagggatacgatgtacatcaaactcataagcttgcgaaaattatcaataaaaagtgatccaagaagataaaattatgataatccacatgtgattgctaacaaattgaagattcgattacttgaaatagaagctaaaagccaatcccaattttccaaggaacaaatcttctttgatttttttgggtaaatcgttgaaccaacgacacataagtaaagagaatctgcatataaggtagaagaaagtcatcgaatctacaacactaactcttgcaataattatttaatactaaaagaaaatacgtactgacaaaaccgtgacataaaccagatatattggatggcaaatttggatctcatccaaacttgaaaactgccaaaacatactggaaaacgaaataaaatagagagaatatccggtaggagatatttttaaaattttcacattaattaacttttttgcgttttctttttttttgttactggaattttattaatcaagccaaacatgtttacaaaaccggataaaccggaaacttagccagagactttaacaggaaacagagcccgactttaacgggagacaaagccggcgaacaacaagatgtccccggaaacaaaagctcaaacgagagaaacaaacgagggagacataaccctaaagtacagggaaccaacttacaaccaaaaaaattagctcactaagagaagtctacaaccaatgcactaaacatgaccacatgttccaaagagaagcctactaaaccttcctatagaaactgtgaacgccagatagcatcaggaagaccagataagacacaacaccaaagcctaaccaatcgcaacaccgacaaggaaggcaaaaggcttcacccgataccaaggaatcatgaaccactagagccaagtcacaccatagcagacggagataaagagacaggctaggaacaaggagaaaaccttgtgattcggcttgagacaagtcaaagaagaccaacagctcttacacgcggacactcgtcgacccagtttcagccatctaccaacaaaaaactggtaacctcctcgcaagagaagaacatgtgatcgttccactgtgacgcctgtagcccaacttcaaacctcaaagaagctagaaaggagcttgtagatgacgctgcaacgaaacaccatccaaaagacaagcacaacccgtaacctagccaaaaacaaaaccaccaaacgcccaagaggacccagcaaagcagaagagcaaaggacataaaggcaattccataaccagagagaaactgacttgcgcaaaacacaaaccaagaaggatctctgagcttagctaattcaattggttaaacgcaacaaaacaaacctaaaactaggaaaattaacacaaacgagccaagacttagcaaaaccaaggacaaactatgagcagagactaaattacccaaccaaaggcaacctaatattagcctaagacagaatcgagactacatagcttccactagatcaggtatgtataagatgaagaaaccaaacctccatctccaaaaacaactgccgtaacagtgaagaaccacacgggctccgacaaaaacaccaaccacccacggagaaccaagcgacaccatcactagaacggaaccaaccttccaatcgaagcacaaccatctagaatctcgtctttaatccgccataggaggagccagagaagacccaaaacaaaggaaaagcaaataaaagacaaacagacacaccctctctgactccggccaagggcaccagataatcagaaaggtaacgtcagaaatttgagaagaaaagtttggtggtggctagacctaaaaaaatcgcctctcaaaggccgtagagccaaacctttttatgttatagaaaacttttttgcgttacattgatattaaaattcttctaaacgaaacaatataaattaatttactcatgatttgttagaaatattttttatttttattttgtgtacatgacgtggataactaattaaggttagaaaacaaaatccaacaatctgataacaattagtcactaaatattcggagtaatgactaatgacctccgctcttatccaaaatactgattagtgtctgttttaaatgatcctaccttataaaaacgacgacacatctctctctcgtcttcttcttcctctaaacctgtgaaaaactttggatcaatcaacaatg

SEQ ID NO: 33328 - DNA, 3000 bp, Unknown; identical to SEQ ID NO: 2532
  misc_feature (1)..( 3000): 2750-1469P.txt file - cDNA_ID_3068365; gDNA_ID_1620552; Annot_ID_160330

SEQ ID NO: 33329 - DNA, 3000 bp, Unknown; identical to SEQ ID NO: 2538
  misc_feature (1)..( 3000): 2750-1469P.txt file - cDNA_ID_3068369; gDNA_ID_1620552; Annot_ID_160323

SEQ ID NO: 33330 - DNA, 3000 bp, Unknown; identical to SEQ ID NO: 2536
  misc_feature (1)..( 3000): 2750-1469P.txt file - cDNA_ID_3068373; gDNA_ID_1620552; Annot_ID_160322

SEQ ID NO: 33331 - DNA, 3000 bp, Unknown; identical to SEQ ID NO: 2534
  misc_feature (1)..( 3000): 2750-1469P.txt file - cDNA_ID_3068382; gDNA_ID_1620552; Annot_ID_160317

SEQ ID NO: 33332 - DNA, 3003 bp, Unknown
  misc_feature (1)..( 3003): 2750-1469P.txt file - cDNA_ID_3068389; gDNA_ID_1620552; Annot_ID_160314
ttttcttacagaagcaaaacctgaggaatataatgatagagtaaaggaaagagagagaaaggaagaaaatggtgattccagatatattttctggatgaaggtaaaggagagagatagagagagtaattcatttgttttattgcaatcttatcctaacgcttacaagggaattcatgccatgcaatttttttgtgtaaatttgtatcgatcggtgctcaatctccttgaggagaggatgaagacggagatgatagaagagatggtgatagtaggaggtttagtaatggttcaatttgtatacgcaggcaattctttgctcatgagttatttgatgtcactcggtcttggccctttcaccattgtcatcttttctacattcgccactttcataatcctctcccctttcgccattctcttcgaaaggtctgtctgataacattttcacatagcctagaaaaccaaacttgtctttttttcttttcacgttgtaaatgttttgttttgtttttgttgttctaaaggaagcaatggccaaatgagcttagcttgaggctgattggtaagctagttttgatctcctttgcagggtaagctatttactctctttttttgtgttaaaattagaaaacttggtttaaattttcacagctttttttggttctgtattcgaaaacaaaaacagggttactctgttccagtctctgtttctagaaggaatcaggttgacatcaccagcaatggcaacagcgatgccaaatcttgctcctggtctcatttttttcatcgcttggatcgttgggtgaatcactaaatccttgttctaactcgtaatttcacgacgtgttccaacattaagtgtggtcttattttatggataggttagagaagatgaatctgaaatgtgtgtacagcaagttgaagatcttagggacattgttgtgcgtatttggcgctttagctatgagcgtaatgcacagcacttcgatcagtcacaaagaagaagatgacactccaatattcgtctttgatcgagacaaggtcgttggatgtatctaccttcttggagccgtctttgttttatccaccaacgtcgttcttcaggtaagtaaacccggttcgtcataaccggtttggttcggtttctaaaatgtcggttattgtaggcgtcaacgttggcagagttcccggcaccgatatcgttaagtgcaataacggcattactaggagtgttgataacaacggtggtactactattacaaaaccgaaaaacaaaagtacttgccagttcattaattagtttcggtaacctcgttggttattctgtcctggtaagttcaagtagatcattcgtagatataaaacataatcaattggtttatggttggttggttataatgtatatagtttttgaaatggtcaggcaggggcagtgagtggagcatgtgttagctttaatggatgggccatgaagaaacgtggaccggttttcgtttcaatgtttagtcctttcgctaccgttatttcggttgctttcgccgttttgacattaggagagtccgttagccttggaaggtgagcattattaacacaactcttttaacaatattttaggttttcattggtaacattacacatttggtcttcaaactaagaaacccatcaaattagtaggaaaacatacaatggtaaaacttactcatacacggttatattaccggagatatgctaattgttaccggattctaatcaaaccgtcaaaactaatattcgattttccgaaggttatatttgattttgtttcttttaatgaattgattaacaaaaaattgcagtgtgggagggatggtgttgatgttcgtagggctataccttgtgttatgggctaaaggcaaagaagggttctctgaaattgagagttttgagagtgagttcgactctaagaagcctcttttgtcttgattgttttctttttgttcatcttcttcttctattaaatttatggaaaagaaaaaatggtcgaatatttagatatagagttttagtctttatttctagtcaacattttagacgaagaaaatggaaatctatatatgttccatttttatattgttttttttcgcagaacattgatagaagatctgatggatgaagttacaaatcatatcgaattacacaagttttgttccataattttaatttatttttttcatgagttagagcaattatcttataagtccaccaaagattacaagttaggttaacatataaatcatgttagaatatcaaacctataagaagttactgagcttagatttgtacaaagcattgtaaataattttaaatgtcgttaaattacttgatgacataatttgtaaaagttagctttgtgactatttttcaacatactagtgttatagataccaattagattagatatatcatcatttatggaacacaatctattattatgtctgatctatttattacagtgataatacataaattaatttgttttttttgttgttgttgtttaatcaagcatacactgtattctttatattttgttcgaaaaacgttatataaaatattgttaatctttttaggacataaaaatgcggtcaataatcgatagttattggctcataatcgtcactatgaaatatttatgaatcttatggaaacatacatataagggtaaatccggaaaaaaataataatcaaagagtctctctctctctctctcattcgatctcgacgatttcaccgactaatcggagtttggatcggagattagatccgggaaatcactgacgaatcctttctggattttggatcggtctatgcttctctactctacttgatcttgatcttctagaaatttaacttcgttttgcaattgatcgtctcgctttaagaagcttgcagatccgttgatctctttctgtgattttgcggggtttagggttagggttttaatttcgatttcggttgtcaattttgatg

SEQ ID NO: 33333 - DNA, 1725 bp, Unknown; identical to SEQ ID NO: 2528
  misc_feature (1)..( 1725): 2750-1469P.txt file - cDNA_ID_3068401; gDNA_ID_1620552; Annot_ID_160308

SEQ ID NO: 33334 - DNA, 3000 bp, Unknown; identical to SEQ ID NO: 2549
  misc_feature (1)..( 3000): 2750-1469P.txt file - cDNA_ID_3068438; gDNA_ID_1620553; Annot_ID_160367

SEQ ID NO: 33335 - DNA, 3000 bp, Unknown; identical to SEQ ID NO: 2547
  misc_feature (1)..( 3000): 2750-1469P.txt file - cDNA_ID_3068442; gDNA_ID_1620553; Annot_ID_160365

SEQ ID NO: 33336 - DNA, 3000 bp, Unknown; identical to SEQ ID NO: 2550
  misc_feature (1)..( 3000): 2750-1469P.txt file - cDNA_ID_3068446; gDNA_ID_1620553; Annot_ID_160361

SEQ ID NO: 33337 - DNA, 3003 bp, Unknown
  misc_feature (1)..( 3003): 2750-1469P.txt file - cDNA_ID_3068474; gDNA_ID_1620554; Annot_ID_160401
attttctattattgtattattcgaagttaaaactagggagacaagtttttgaagtggtatggtgaataaagtttttttctgaagttacagaaaaaaaaacagaagatattttgaaggtttcaagaaaagtattttctacgtatttatctcccgatagaaaggaaactcttcaagtgcatgatgaagaaagagaaaaaagaaagaacctgtttttgggatgaatgatgtatttataatcattatgaccatcggtttcaattctccgatgctctgatgaatcaagccaccgaaacgtctcggctaaactgagttttcctcttcttgatgaaacgtcgtcgtttgattcctcttcttcatgatctattatctcttgccgtctccggagacgtcccatgttttcaagaatcggttaaatgaaatctccggcgatctcttcgacacaaagatctagaaaaacagagtttaatacccgattcaactcttgaatctgacactcgaaacttcgtctttttggtagaagatagatcttgtaatgttttacaagttgaagagaaaaggcgggaagatcacgagagctgcttctctgtttttttccaaattattttttgtttggtcttctttagttcttctttctcgtgatgttaaagctatattgattttgtttctgtcgagaaactactgttttttttttgtttggtttggactctttattagttgaagtgtataacgtaaggttttgtctagaaggaccgaatttatataggacatcagaacatgtcgattgtcgaacatatatcattgtttttttaatataaaaaatctcatctaaattaaaatttggaattgaattgtacgaacggctaataaaaatttaccaaaagattacgatgctccaaatctggatgatgattccctaaaccggtttttgtgaatcatttctagcataatcgaatttaagttaatctggactagtgtacttgaacattcacggggtaagtgggggagttatttttttttaagacaataaatctgttgtaaattgatgtactagttatagacattaatgggtgtgtaacagcatttcctatatgtttaacgtaggatttctgtttaaagtaaaatcaaaatttacatcaggttttgagatttttagttttaaattttccaaatggtcggctttgtataaaaccaagagaagaaattaaatatacacgaatatgaggacgtgtccagaaaaagaagaatatcgacaataaaaatcacctaatttgcatctaaatattgactttcatagtacgctagagataatcagttcatcttcaccttattctttgcattgtgtaaaagagagattatgcagagtttcctagttgacgagaatgagatagcagagatatttcttgttttcgttttgcactttagaggtactaccttatcgagttgtatgaatatgattgtcttgcttctatttttttttttcatttttggctttgattgaataaaggtgagaatttttatttatttttcgcaaagtatttccttaaaatattagtatttcggtttagattagaacaaatacgagacgataaatagtttgataacaaaaagctatatatgttgtgtttcatatcttatcaactcggtcacatcctctttccattggatgcaattctttttcatagaagaaccactaattcttttttttcttttgccattaacccaacaatttttattgtagttagtggttctcccttatgtttctttgccttggaatgtaatcactctgttttgacaaaaaaaaaaaaagaaggaatgtaatcaccctgtttgacaaaaaaaaagaaaggaatgtaatcactctgtttgacaaaaaaaaacaagagaggaatgtaatcactcttaaagtgatctataacaatttgaaaaagtgtcatatttattagctataacttataactttataagttttgaatggatgcagtggacaaagcggtatactttgtatgcggtttaatctaccttattttgaggcggacaataaaccgctgtggaccaagtttatttatatgtaaaaatagttcgtggatgattcacagatgatctgttgcggttttcttcttttttttttgtccggaccactgtgcactataattgattaatggtaaataaaaaacagtctgatccgttgatggttttgtccgcccgaaccgccgtaaccattcaaacccataattaaaattataacgaattactatgtaaatttataactaaaactatcaaattaaacgagttaaattatacttatcatgtctgcctgtaatgataagataatatatatcaaagcttatgaaacttcatttttttttttttttggttgtcattgcaaaggttagattaataacaatatcactgataatgatgcttacacgtaaacctaaacaaacgaggaaaataaactaactcttacacgtaaaccttaaccgatgcagcataggtgttgacaatattttctttccttttatttaaatagacgacgttgagatgtttaaaattgtcatcatttataaccatattttaagttgtctttatctgaaatatacaaatgttcaattagtacattgacctaaaagtctctaggactaatgattgattagaggtttattttgctagaggttctaatatgttgtatggaactagaagcaagattgttttaaactcaatgtcattaagtgaattagagaaagatcatcaaaactcttaaactatatctcccaaaattaacttaattcagtttgaaaagaaaaagcccacaaagcccaaaactcactcattcataagccaattataatatccaaaataaaagcccataaagcccaaaactcactcattcgtgtctccttctctctcgcacaaatgcttcaggagttctcacaacaagatcgagaaatacacacatagaagacgaagaagaagaagaagacgatacagatccacaacgccatg

SEQ ID NO: 33338 - DNA, 3003 bp, Unknown
  misc_feature (1)..( 3003): 2750-1469P.txt file - cDNA_ID_3068508; gDNA_ID_1620555; Annot_ID_160438
gtgaaaatatgctaaccagttaacctatcggaatttggtagaaattttcttccatttcacttttcacatagtgtgacataggtaaaagagggaaaatagcatttggtcgaagtatgtcaaccagttgagctatatatcagaattttgtaatattcaatcgcttatcaaaaatatactgagatttaatttacctaaggcaaatatgttgcaatgtatatatatatgaatcttttgattcaaagtggaatgttatttaatttgaagacctttgtatcgctggtttcggttaatttgttggtcagcagttcagtctttcagtttccgctaaagattacaaattttagaggcaaattatttgcgatatcgagatgtgactggttaggagaaacttcggaaggtcacacgctatctaaaccactataccaggttggaagtctccaactaaagatgtttgacaactttttgtcatcgaaaaatgatcagaaagcggtgtttttaactattctccgataaatattggtaagaatttgatctattatggtgagtacattatccaggtttatatagatatggtaaattatgttttgagttgggtctagttagtggcaaagcatagagcaaccgattgcatatagtttccggtgaatatgatataactaacacatgatggttataatgaataattatgtcgaataccatgcggcggatcatatgttttaggctgtatatgccatacgtgatcttggatgacatgtctttttttcgagatgataacatttattagtcggtcgcttaattgatttcgagttttctgttgccattttaaatacacatttgcgtcaaaaaaaaaaacgagtttgctgtctcgaaaatagcaccaatgcccattatttcttaattgtattttttcggctaaggtttctaattattaatttattatcaaaaccttacatatggtaatggtacactgtacgagtttttggttgtcttgtgtttttcaatttgttcttcctctttatgttttgagttttgttgtcctgtttcattttattcttacttttgttttctctgaattttgttttcagtgaacgtataatttaaaaatctgcaatacaaacaaacaaatatctaaaagtcaagttggctttacgcatgtgatcgacgaaacacctaattgtcttgttctttttcattcgtctgaataatttcatgaaattaacaagacaaaggttcacatttataaaaagggaacgagagcaatcaaactacagaagatcactacatcaaaataacgcatttctcagattctcagattcaaacacattcacctaattgttttgttctagctaggccttttagctatacaaattttgcattaacattacaatttccatcggcatgtaaacaattagcactaactaattaattagtactgcaatatatcaaacataaaagatggttaattaattcagtgtcaagttgctgatcctaatgagaatgcagtgctgagacaagatctgatgagtctaacaaaaatgtgactaattcaaatcacattaattactgtatgtagcaaacataagattatatatataatatatcacaccaatttatatagggaataaaacatatccttgtatgcaatgcataacgtagttattaatatagccttacatgaataacgtcgttaagataacgatatgacactataatgacgaaaccttatgggaacatcatgaaaataatgtaacgcgagttttgactttccaatgtaaacgaaaggagtagaaagcaacggaagactacgaatgaaagtatggagctacgtatagtttacgaaataattaattatacatatagaaaagtagtgagtcaacttttctttccatcgtaatcaatagcccaactgtttactatcattgtttgaaatatcctctgacacagaaatgttatcttatagtcaatttgacgtacaatatgctctcttaataaaatcaagaaatctagtttttatcaaaaactaaattttgtccccattccatggataatgttaaaacattacattcattatagatccatgcatgtgaatgaaaaggctcacgggtaaaaaggttattaaggtatcaatatgacctcaaattttggatagatattgaagatttcataccactttttttagtgtcaaaagacggaaaagtaataactaaactatactacttttaaaagtttgaaaattgaaaaacagattttacacctaatttaaaatatcagatcaaagatcttatctacaagactaaaattaaactagtagcggtctttgctgtccattgaccgagttttgcgggtggtttactcatttaagtaccacagcatcaaattaaaataactgtcacttgtcgaaagtgactagataaaaccaaaaatagctttaattgagtcaaaattgtagttctagtgcaaagtaaagagttatcatcttacaaaatgcgactcattagtgtattaattaattaattttcagtccaataatctggttaatttggtaaactatccaaagagtaattaaatgattcctcgtcataaatactaattttctacgttttaagcaaaaaagacaataattatttggtctgaaaactaaaaaaagacacgagattaagggaagaagataacgatctagaggaataggcaagtggaagaaccagaacaacagctgttcttttcttctaaacttcagaagtcagccgacagttaatttctcctttttttgaggttttgtcgaatcctataaatttcaactaaactcttcttcattttcaatatcaaatcttgtcttcttcttcttcttcttcttctttttcttcttcttacatttgatttctctgtctgaattcgagaaccagatctactaattacctgagagaaaaaagatctgctctgtttgtctgaaacagacagaagtcaacaaatctttcatttgttttttagcaaatcaaagaaatg

SEQ ID NO: 33339 - DNA, 3000 bp, Unknown; identical to SEQ ID NO: 2561
  misc_feature (1)..( 3000): 2750-1469P.txt file - cDNA_ID_3068512; gDNA_ID_1620555; Annot_ID_160433

SEQ ID NO: 33340 - DNA, 3000 bp, Unknown; identical to SEQ ID NO: 2556
  misc_feature (1)..( 3000): 2750-1469P.txt file - cDNA_ID_3068516; gDNA_ID_1620555; Annot_ID_160425

SEQ ID NO: 33341 - DNA, 3000 bp, Unknown; identical to SEQ ID NO: 2555
  misc_feature (1)..( 3000): 2750-1469P.txt file - cDNA_ID_3068520; gDNA_ID_1620555; Annot_ID_160423

SEQ ID NO: 33342 - DNA, 3003 bp, Unknown
  misc_feature (1)..( 3003): 2750-1469P.txt file - cDNA_ID_3068542; gDNA_ID_1620556; Annot_ID_160451
ctgagcactgaagagagaacgctcctgcttgacttgttccgcaaacaaaagcaagatcctggtgcatcaactgtagttacccaacttccagctgtgcaaattctgctcgcaagactaattatgattgcagttagttactgtggaaacgattttaacgaggatgattgggattttgtcttttctaatctgaagcgtctgattcaatctgcagtagttgtgatggaggaaacttccgagaacgtcaacgacttcattagtggtgtttcttccatggagaaggagaaggagaatgatacccttgaaggacttgggcatatagtttttatctctgatccttctataaacagtgctcagaatgctctctcagcattttcgttgcttaatgcgttagtaaaccataaatctgttgaaggtgaagacaatctgaaatccttggcagatgaaacatgggatcctgttaaagatcgaatacttgaaggtgttctgcgtcttttcttctgcacgggtcttactgaggctattgctgcttcatattccccagaggcagcatctattgttgcttcatttcgagttgatcatctgcagttctgggagctggtagctcaccttgtagtagactcttctccacgcgcaagagatagagctgtcagagcagtggaattctggggactaagcagaggatctataagctctttgtatgcaataatgttctcttccaatccaatcccgtcattgcaacttgctgcatacactgttttgtctaccgaacctatttccaggctggccatagttgctgatttgaatgcaccactgaatgatgagtctctcaatgatcaggactcaagcaatgctggtttaccatctgaagacaagctactgctaagagatgaagtatcttgtatggttgagaagttagatcatgaacttcttgatacggacttgactgcgccagaaagggtaattcttacttttcaaaagctttatttggtttattttccctctttgggcaagtcattcactgtttaatcacttttaatggcaggtgcaaacgttcctggcgtggtctttgttactctccaatgttaactctttaccttcactaacccaaggacgagagagactggtgcaatatatagaaaaaactgcaaatccgttgatattagatagtctttttcagcacattcctctagaattatacatgggacagagcttgaagaaaaaagatggggatattccgtctgagttatctgtggtagcttcagcagccactcgtgcgattattacgggttcgtccctgtcaacggttgaatcactttggcctattgaaactggaaagatggcttcgcttgctggggcgatatatggtctgatgttacgtgtccttccagcttatgttagagaatggtttagcgaaatgcgtgaccgttctgcatcatctcttattgaagcatttacaagaacgtggtgcagcccatctctaatcaagaacgaactgtctcaggtatgtacaataaaaaaccttttctcatctctgagagttgcagtgaagatccactaatgcatttgcaaatattctgttcattgtttatgtgagccgcagataaagaaggcagactttaatgatgagagcttttcagtcagcataagtaaagcggcaaatgaggtagttgctacatatacgaaggatgaaacggggatggatctcgtgatccggcttccagtttcttacccactcaagcctgttgacgttaattgcgcaaaaagtattggaataagcgaagcgaagcagaggaagtggttgatgtctatgcaaatgtttgttcgtcatcaggtactgtactttatgagtcatatcgatctttgttaacctgaatgatatctccagttccatcatgtagaccatatatgattaatcttgtcctctccatctaagcccaaattgagtgcctgtcttgattgaatgtttttcttcttcttctttttctaatgtgttgttactgaaagcagaatggggctctggcggaggcgataaggatatggaagcgaaattcggacaaggaatttgaaggagtagaagactgcccgatatgttacagtgtgatacacatagggaatcacagccttccaaggcgagcttgcgtgacttgcaagtacaagtttcacaaagcatgtttagacaagtggttctacacgtctaataagaaactctgccccttgtgccaatctccttgctaatacaatagctgaggatatacatttttgtgacattagtctgtgagttttgctttaactctttaacgttcttaggttttactttccaagaaaataaaagggtttaggtggaaccgcattgccattgatatacatatacccgtatcatatgtgaaaattggaaaagtaataaatagagaaatttacttcgggtacacacacacatgtagtagacccggtcgagaatacaagctaattaataagcgaaagatttgggtgactaattttttttttcctttaattattttattttatggtcaatgcatatatcttaacagacaccaaaacacatagaaatacattaccaaaaaaaaggaatatatttaagctggggattcgcggaggtaaatgagaaaatacaaaaggaaacatatatttaaatttaagaaaacaactaaatgttgtaataataaaggaaacaaataattgaaattaaaaaataaagtgcaacgtccttcgaaatcgtcctcactaagaaatgatgggatttttgatatatcttggaaagaaataatcccagtttgtttccaaaatggcgtaagaagaataagtcaaagctattaattgcaatttaaacaaaaaaaacgttcgttattataacgcaaagactagaaataaaaagaatatttcgaaatatataaactctcctccatcgcattcacatatatcaaagaacaaacaacgaatatcaatattacttttgagttttgtatctgtttgtaagagaaaatg

SEQ ID NO: 33343 - DNA, 3003 bp, Unknown
  misc_feature (1)..( 3003): 2750-1469P.txt file - cDNA_ID_3068550; gDNA_ID_1620556; Annot_ID_160464
tatgtggtccgttaatacaacattacgctgcaatctcggataacaacagtttcggacctatatactctattacgagtatttttcccaaacggaaggatcaaatttaatctcatgtggatttgtgttgttctatttatagaaattttaggctgtataatatctatcctatcaatctatggctaattaaatttcctacaattttagaacttaaataaatgcaaagtatcgatagctactacacatctatggtcagaaaaattagttgctatcttattaggatttcataattcatctaagttcagttttaaaataaaatatttattcttaccctgcaatttaattcaaaagaagtattcaagtcttcaatatctttactaaatacagaaaatatcaaaatatttgtaatcagaattcacctcacctgtattaattacagatttgatcttcttattaataagtgtgttcaacctacaaatcttggaaaatggagaaagtattaaacagaatactaactatatttagcatctaatttcttttacctaattataattagtaacgctaaaatcacaaccaaatgttagaaaccaaaacaaaaacaaaataaggagagagatttaacaattccaaaaatcttccaaccacttttttattaaccagccctctctcttcttccccaaatctccattttctctgcaaatcccaaatccatcacaaaccctaattttagtctctcaaaatctccaccgtttctaccaccgtcaatgtggcggccgtggcgtaaatcgtcggttaagattcacgacacatactctccaaccaccgcttccttcaaagacattcaccatctctgctccgacgactcaccttccttcccttcttctccctctccatctccaaaaaccgcttctagagtcttccaccgagtccgtgcagctaatttgatcctcaaatcgtggccaactcgtcaatctaatcacctcctccgcgcagattccgaacctatcaatctaagccggaatcaaaatccagaatcagattcgaaacaatcgaaaaccaaaaccgaaccagatgtacggatttcaatcccaggcgcagagaaaagcattgtcgtatacttcacaagcctacgcgtggttcgtccaacattcgaagcctgcaaatccgttacatcgatcctccatagcttcccggtacgaatcgacgaacgagatctctcaatggacgcgtcattctccaccgagctacaacgaatcttcgggaaggatcagaaccagaaccagaaccaggcgaagacgccgaagctgccgcgagtcttcatcggtggtcggtacataggaggagcggaggaggtgaaacagctacacgagatcggagagttgaagaaacttgtgcaagagttgccgaagattgaaccaggggtatgtgagatgtgtggtggtcatagattcgtgccgtgtaaggattgtcatggtagccataaggtgcatacggagaagctagggttcagaacttgcttaacctgtaacgagaatggtctcgtcaggtgttcttcttgttcatttccacaatctcctccaccctaattcctagattttcagtttttttttttcaatttcaattttcgaataccagaaattggaataattaaatattggtttttaatctaatttttaagaagtttccaattttgtataattcgtaatggaaaagaagtagtttcggattattagattcgtcgaaagaaaaaacaaatcattagatcatgtgatgaacgtgattagcagctaagtactatttgctgtccaagagtatatatattttcaaattttaaattatagatctgaaatgttgtacggaagaggaaaaaaaataaaccagaggtctaaattgttagtataaaatatagcaaaagtagcaaagattaataattgatggacgttaacacatttctggcctaagaaagaatgtatatgtacatgtgcgcattacatttcatgttatttttgacattattattactcgatttataaaaattataacgcttcatagatgaacaattgattgtccatatcgttgagttaacgtacaaaataatgttggctgtttgagtttttatttatatcaaattttccgagaataggtgaaaatgaaatataaccattggtccactgcaaatatttttagtatttatttatcaaaaaaaaaagcaaaagattattattttttaatgatttttaatttgtaactctgccataccatgattttaaaataaatattatgcacttgtaaaaagtaacaactctaatgaatacaatttgttttacagaaatgaatacaactagattttaacctgcggtataccgcgaagacaatttacttttttaaaattaatatatataaaagtttgcaaattatatctatctataaaatatttttattttctagtttacaattgttattaagtaaagtcctttcaaactcgtcttaccaaactcgtcccgtaaaaaaacctgaagtacaccgctaatttaaatatataattaaaataaatattttacgggattgcaattgtattttagtttgtcaaacagatttttgttttaaatagttgccaaaataagatttagtgaattgataagaaatgtatttagatgcgttttgctcattttaaaggattgcaattgtattttggtttgtcaaacattttttgttttatatagttgtcaaaatctagttcaaatgttggaaaaacatgcgtgatatatgggattggaaaatatttagaatgtttttcgtttgttaatcaatttattgccaaaaaaaccatcaattaaaagctaatggcaaccattgtaaataagtttgaactccacgatttatttcacaaaatcgctgcaaaaatgtatatatagattttatatatcagttattatgttctaacataagacattgtatatattaggtaaatactgttatttatcttagttaatttatatgttaatg

SEQ ID NO: 33344 - DNA, 3003 bp, Unknown
  misc_feature (1)..( 3003): 2750-1469P.txt file - cDNA_ID_3068554; gDNA_ID_1620556; Annot_ID_160463
agctttcttggtttggtctatgtctatatataatgtctgagagatttgggagagtttacaaattcctcagtttcatttggaatgcaccaaagatctatgaaatacccttttctataagctactcgtatcaaggtgtataaagatagctaataaattagataaatgagttgtataatcatgggaaacacacacatggcctcaactattccgaaagactgagagtaaaaaacaaatcctcaaagtaatgtattgtgtagactgtagtccaaaaagatacgaattttattcatatgatgcatggatgtacctcttagtggatcttcagcagagtaccactcactccaaggacagtcatcatcccagagcaccttattgcgtgactcagaaccatagtgttctgcagtgtctgatttgtcacccataacctcatccgtatcaatttcctcatcctcctcgtcatatgggaaggtttggtatgttagcctcatcataaaatggactctgaaagtatgcatcgagaagtccactcctgaataaaccttcaaataataaaatgtcatcgatgaatacaatatctagctaaacaatttaattacgtgatagaattgatggctaatgcttaagtttcaggtccattttgataagcaatagccatactaatggacatcactaattaagagccacgaagacttacaaacttagaaacaaacaactcatatagcccttccaggtgcatgagtttcacgggaacttggctgccaacacgatctgcttcaaatcttctagtaaaaacagtgcccatattctggattccaatatatgctttgcgtgaagggtcatgcacagggacaaaggctggccacaagctagataccaaagtagtataaaaattcttaataatcactcaaccaaatatgcgtctaatcattatctacttagcaaagacagggataacacatttctatcaactctgatttccaagacttcggagtaattggtaggcaatttggatcaactcaaagaaacagtgtatcgtaagagattcacttgacgatgcaaaagctaaagtgatgttactggctaggatatcgtacctgccacagttagacaaagcaatagcaaccgcactcagaagcttgctagactctggtgtatcaagaagcaccccactggcactttgtggagcaatcaactagaagatgccataaaaatcaataaaatatcatatatgtaaacgggcaggaactatttcaagaaaaaaaaaaagtggatttaaagtgtaccagaaaatccttcaccccaaagcaaagctggagatcatgtgaattactgttccaattaccaattccagctgcatcagtcagatactgaattatgaaacagaaaatacagtttctcccagataaacagcattattttgaaatcatataccttgttggctaccattattatcaatttgaaagtagaactccatacaatagctctttgcaacattcttaagttcgtgtttgaccgtaaacagattctttgaatcctccactgcaacagcacccttttcctgcactcaccaaatgcaggtagcctaagaggtcaagcagataacgaaactaaagtggatttcacaaaacaagactaactccatctttgatcatcaataatatccaaaatagtacaaccagctataacgtccgggaagaagaaaactcgagcattcatgggattctaacgagttctcacttatagaactcgatcgaagatggatgagatcatttggaaaagcaaacgtaccaccaggtttttgggaccatcagctaaccattgacgacaagttgcttcaatgtctgagatgaacctaaaaaagcgacgggattagtaatgacattagtgattgaatcaaagcaattgaaatcgtgaagatgaatacctttcccaggaagaagctagagtgaaatcatcgaaatgttgcacctgcaaaacaattgctgatcattgaatacaaaaacgaacagcagaagaagaacaaaaaagttttaggatgtagtaactggcatacctcttcttcagcatcatcatcttcttcgagatgattcgatttgcttacagaagccataataaattgcgtaacgaatatctctcagtctctctctgagtttgtatgggtaaggaactcttgcagatcctccgatcacacagacgaagagatccgcttcgggaaagaacaacgacgatgatggtaaagttacaggaaaacgtcgtcgtttgaagctgacttgagactttgacaaacggcatgaacaacgcgtgccgtttcgtttgattgaaaaacgggttgcattattgttcgacgattaaaaaggccaataataataggcctaatattggcccattataactttaatgctcaaatttaagtagtgaagtgaacacatgttaaaaactaagaccatctctatcaatggtttcttatctagaaactgttcaaagtatgagaaagagtagaattagtttttcaagtgagaaactctgagaaacccataaaaatatttatatatcatctattgatcaaatattattttattattaaaatttaattatataattaatatttattaaaatactaatctcttttttttactgatgaagatgccttaatcttttcgttgtcatcctaaattcctaatatctgtattttgtgatcattaaaaacacaattatgttagcagggaccacaatccaccactaaaagataattatctgtaagaaattaaatgaaattggtccaacacatataataagaaaattaatgataatttgcaaaattaaaatacaggagcgtagtggatcgagaagagagtgtaaaaatcgtactgctttacataaatgaagtcgtcctcactaaagctaacaaagatgaagaaatccaaaactccctgaaatctgaaagcacaaaacttccattttcatctatctcaagtgctcattgttcattgtcgacgtacaatg

SEQ ID NO: 33345 - DNA, 3003 bp, Unknown
  misc_feature (1)..( 3003): 2750-1469P.txt file - cDNA_ID_3068562; gDNA_ID_1620556; Annot_ID_160454
gtttcccattttctctgcgtatccaacctgcgtccaattcaagaacacaactctttctttaaaactctggactctttgattactagcaaatttatatattcctatcctctcttctaccgcattatctttaaaagaactcattttcatttgcctacaagagacccatgaatgccatctttttattctacttctccactcttgaaatctcactaagaatgaaatcacacactttgtgcttaaactaaacaatctccttatcacattcttcactctattgggcaattaagaaaggcatcatccttctaatgttaatgtgctgcataataataacgtacctggttaacaacaaaacccttcatcatgttcatgaagtctgcacgcctttctctgtccaacctctcaacctcagatcggttgttttcctgcaatgatacaaatttacacagagcataaccaaaatattcatatcatgttggtaaaacagcacaagttgtgatatgcatagggttattactaaataccttgattcgctcataccctttgatggcaacattttttgcatcctcagtgaccttgattgtttcttttaactcttctatttttcggatccttgatttgtcaccaccaaataccttcgatgatgcagcctctagcttctcaactctagtttgcagagaaggaagctctgatagaagcgtctgaactgtcagtaaagcactagatctatctgcaaatgcgccttggacagccatcatcatgccaaggtactcatggagtgtgtcctgaaatgaacaattaaaataaaagaacagctcttagtgaagctcaaattccagcagcatctccaacataagctgacaatctgccaagtgtccactagttaataatgaagatacttgctacgcatggcgagatttccgaaatcctaatgtcaatcgcttaaatcgaaatgatcatttttttcagatgaagaaaagaaaataacatttcatttgattccaagtaagggaggtagctgtataattctgtagttatttaccaagtgtttgacagtttgggaattcaactccctataaaatctgcttgcttttacagcagcagtggctaaattcttcatatcattagcacgagttctttgggggttgcagacagcttcctcgttctcgaacttagtcagcttaatgaatgctaatcccagttcacccatggtttcacccatgtcttgctgtgctttcacaagggattccgcctacaaaaagaaaccacaaaagggggttgttccaagcaggatactacatactgccagaatgatgcacaattcacctaacaagtatgaaattttacctgctgtgaggcattgataatttgctgctcaagatcatgcatcttctccttcttttccaagaactctttatcttcttcaacaacgggaggttttgatccaccccagtcattagaaactgactgcctcagctccttgaataatctcagcagatccctacctcctcttgcaggctgacccacctcagtcaccggcactgcagaggctccgccttcaccgaacaactgttttgggagcttcaccgccccatccaacatccgagaggccacatcagtactcattggtagtggcaacttcccttgcacctgaagaaacactttcaactcgtcactgttcctaataacagggtgtgcacttagcctgcgcaagtatttctccaatgcaactcttctctgctccacgaactcttgtttctgcattacttggctctctacgacgctcttatctggccgtggtggtatgcagaaccctctatacgtctcagccaatcgatcagccaatgtgacaacatctctgaatcttcttcgcacgctaaactccgatgggccgccaaagtcagggagattcgttctggtcgtaatttggtaggtgatgtaagtgtttcctccaacaatggaatttgaaatctcctgctctttctgagggttagatacagtgatcttgatgtaatcagagcttgaagaagaaggagatctcgatagtgaatctgagaattgactatgaaggctattatcctcggtaccgttaatctcgctatctgagttctcatcaaagggactgaagataacatctgcatacgacggaggctcgatgtaggagttatcgctgctgatcggcttagagctgaagctgctgcggaaatcttcgtaggaggatggcgcaaggagtggatcagaatcagctggaatcataacggtcggtggcggcgagagcgggtcacggacgttggagagtgttgacatggcgctacggtaaccagagttcgatgtatcaccgttgacatcgcttatcttcagaggatggtcaccaccatctactcctaggtcgagattctccatatcatccctttgcgcattgagattagtttcttcgaatccatcggcattctctgagcccatcatttcgacttctctggagtaacgacgaactaagctaattgaaattaacagaaaattagggtttgatgatttgggaacaaacggagatcccctgaaatgtgacgctgagcgacggtgtggctatcgaattaaaagaaaccggagtgactaaaatgcgcaggtggggactatgggagcaggagactaacgtgcacaccgtggcgggttaggggtggcacgtgataatggcttaaagtctcgtcaattgacaaatctgccaatgcgtacatgtgatgtgaagaatctgacaactttcaggtaaagtatagtcgccgatgggcttgtttaggcccattaggaaagcccaatattaattattgacggagatagccatatagctgcatccaaacattcttattaggtttcgttaagcagctgcagagcttccctgatcgtgtcgaaatcctgtgtttaactggaaccgagtcttttgatgtaaaaggtcaacaactcataaagacacttcaaaaaggttttccgacaaaattcttatcttctcagatg

SEQ ID NO: 33346 - DNA, 3000 bp, Unknown
  misc_feature (1)..( 3000): 2750-1469P.txt file - cDNA_ID_3068580; gDNA_ID_1620557; Annot_ID_160490
attttgagattttggtagtgactgtgggtttctttggtggctataggttgtaaaaatgagttctagggctggtccaatgtctaaggaaaagaacgttcagggtggttataggcctgaggttgaacagttggttcaaggtttggcagggacgagactggcttcttcacaagatgatggaggagagtgggaggtcatttccaagaagaacaagaacaaaccaggaaacacttctggaaaaacttgggtttctcagaattcgaatcctcctagagcttggggtggtcagcagcaagggagaggtagcaacgtatctgggagaggaaacaatgtatccgggagaggtaacggcaatggtcggggcattcaagctaacatatctggtcggggacgagcgttgagcagaaagtatgataacaactttgtggcacccccacctgtatctcgccctcctttggaaggaggatggaattggcaggcaagaggaggttctgctcagcacacagctgtgcaggagtttcctgacgtggaggatgatgtggataatgcttctgaggaagagaatgattccgatgctttggatgattctgatgacgaccttgcaagtgatgattatgactcggatgtgagtcaaaagagccatggatcacgaaagcagaataagtggttcaaaaagttctttggcagcttggatagcttgtcgatcgagcagataaatgaaccacagaggcagtggcattgtccagcttgtcagaacggacctggtgccatcgattggtataacctgcaccctctactagctcatgcgaggacaaaaggagctaggcgagttaagctccatagagaattggctgaagttttagaaaaggatctacagatgagaggcgcatctgtcattccttgtggtgagatttatgggcagtggaagggtttgggtgaggatgaaaaggattatgaaattgtctggcctccaatggtcatcatcatgaatactagactggataaggacgataacgataaggtggaattcttctgtcttttacttctttaatttttctcttgcattctactgatcttagaatgttacattgtagtggctcggcatgggcaaccaagagctgctggaatacttcgacaagtatgaggctcttagagcacgccattcctatggtccacagggccatcgtgggatgagtgttctgatgtttgagagcagtgccactggctatttggaggccgaacgcctccaccgggagttagctgagatggggttagatagaattgcctggggtcagaagcgcagtatgttttctggaggtgttcgccaactgtatggcttccttgcaacgaagcaagatctggacatattcaatcaacactctcaaggttctctcccccaaagaaatttgatatatgcttttagttttgtcattggaatttaaagttttgttggtccgtgttaatgcatctgttatgtatatatctatgattcattaggcaaaacaaggctgaaattcgagttgaaatcataccaagagatggttgtaaaggagctgaggcagatctctgaggacaatcagcagctgaactactttaagaacaagctctcaaaacagaacaagcacgccaaggtgcttgaggaatctctggaaattatgagcgagaagctgcgtagaactgcagaggataatcggatcgtgagacagagaactaagatgcagcatgaacagaacagggaagaggtatgatttttcctagaaaatcacaaacttgacattttgtattacctactgattcacatttttgattatattgtccaacaaaaaacctgtggtggtttgaagatggatgcacacgacaggtttttcatggattcaatcaaacagatccatgaaagaagagacgcaaaggaggagaatttcgagatgttgcagcagcaggaacgtgccaaggttgttggccagcagcagcagaacattaatccctctagcaatgacgattgccgaaagaggtatatgtactaactaacataatccctctggcgtttttgtttttcaaacctaagagtaactgaattattccggttttgattctttcgcagagctgaggaagtgtcaagcttcatcgagtttcaagagaaagagatggaggagtttgtggaagagagggagatgctgataaaagatcaagagaagaagatggaagacatgaagaagaggcatcacgaggagatatttgatctggagaaagaatttgatgaggctttggaacagctcatgtacaagcatggccttcacaatgaagatgattgagacaaaagtctggtacacaagacaagactaagtttctttgttttgcttttggtatgtcggaaagtaggagatctgagagactccatttaaatactaggacaaatctaaggagattatagattattatcctccaatttttagtagacggatctaaggaagcattaagttcttgtgactaaaaccaagtttccttagtattttgtttttttttggtaaaatttcatatgaaagttagacatattaccaaacgtcagagtgaatcacagaatggcaaatcaaaatcatgtttttagaattttatatctacaaaatatatgggtacaaatattattttctaaaggttcgggaaataatagtaaatatctaaaatacagagttctttagatgcaaatgttactttgttctaaagtctaaagcgacgtgttggtgtcataaaacacttctacttgaatcgcattggaagagcatcgtcacgactccatcacacttatatattttgtttattcaaatcttctttcagatttttatacaaaaaatataaattaaataaagaatcccataaatatctctctatcgaactctctctgcttttacaaatctcagaatctccttcagcgaattcacatctcagctgcttttgaatccgccgtaactaaaaacaatcctccttttctcgattcgttaaactatg

SEQ ID NO: 33347 - DNA, 3003 bp, Unknown
  misc_feature (1)..( 3003): 2750-1469P.txt file - cDNA_ID_3068588; gDNA_ID_1620557; Annot_ID_160486
gttggaagcagtagcaccattgttgtttattttttgccatgtgattggtctttgttttgttgagatacttttgttttccgcaatagtgatgtcatgaatgcttggcctctttctctttttatcctctgagttgatatgtgcaaagtatttttgagcatgacttgcaacctgagttgatgttcttgtcactacacagtgacgagaaatactacgccaatcacctttcccatattttttcaaaccatgcagaaattgtctagtttcattaagaaaacaaaaaatagtgtgagaatcaacatattttgagttctaatatcaaactgaaaatgcaataatgttaccagtgaccacatatacaaatcaacacattctgagtttcacattcagtgacctgtaaaataataactacgtctaaaatattatttaaaaacaagtgagtttagtaggaacctgtgttcaaaaggcttccaaggaacaccccttcgtcgtttttgctttagttttgatttacctttgtgtttagactcatatttgcgatcgttgccaccttccaatatgcttctttctttaccaaaagcattgtgatttggttcttctaaaaaatcatcataatctggaagacgtacacatccagattcaatcaacataacatcacgagctaaaatgttgtaatgctctataacttgttctaaagtttttcccggaacaactgtagcaatttttttccaacgaatctctgttttatcgttataaattgcaagggctttctcgaaagcaatatcatcatccttgctccaagacgatccgacactaatttcctgtcctaaattcattttctcaaaaaaatctattacttcaaacaatttagatcaaccaaaatactctccgaccaaagaaaaaaaaagaccaaaacaattgatttgaaatcgtaaactttgttttatgaaccccacaaactagtattgatagactagtaagaaccccaacctttgattatttcaagaactatgaacagaagatggaaaaggatcaaaacaccagttctatagtatttatagttaaaaccacaatatttttattttcctttttttctctaattatggtgcttaatactttgtaccatacgacaaatggtatataatatcaattgactccttttatgttaggaaaataatatatagaaataaatcttcttttcttggcagcacatagaaataaatctaaattaaaattttccattttataggattaaataaaattgtgctggtgtcaactgtcaagcaacaattttgcaattccaacacatctaagtcatgaggccaaatttaacttttaataaattgccctatatatctttaagaaaataatattaaataacatcttaagattccatcacattttgatgtagaatattctttcacacgcctagtgagacaagaatcataagaatattttttaaataactaaatatgtggtctctacatttttttaaataattgaataaaaataaaatacatttttcttaaaacgtggagaccacatatttaattattagaaattacttagtaaaactaaatatatacatcttaattatttttttcttaattttaccaaaaataatatatatatatattaattaatttcctatgtgtaaatagatatatatgtttaaaataatcttgtgtctatttaaatacgtcatcatagctgacgataatggccaatgactaagcatgaacatttgggtactcaagtcggtttcggtttgggtctttcgagttcgggtttttcgggtttagaagtttaggatccgttcggttatatgtattatttcaggttgaatttggttcggattcacctcgggtttagttgattcgggtattggtcgaaaaacttggtaaataaccaaaactattttgggtttgagtactacttactgaaaccttgtctaaatatatccaaacatgcaaacatacataaaataaaagtatccataaaacccaaaagatctaaaaataacacatattttcttaagacaataacataatacaagaagtaaactttattttgagtttgttccataatccaatcattaaaaaaattataaattaaagttatcagtatatatatatatgtctgtacatgtgtgtatatatatacattcgggtaataaaaagtactcaccggtatcagatttggttcgggtaatatccaaacctgaatttattttagaacagaatccgatcagatattttacaagaaccgaagtagagcggattcggattattcgggtcgggtttggcttttggattcgggtattgcccaggcctacccaagacacgctttctcgcttattgtcgacaatctccgaagacggcccacttgagaagttcaacttctaatctatcacattaatgggattaaagtctgcccgtataaatgcagacaaaaaataaaaaatctcaaacttctcttattaatgggctacgcccatataaacccagacaaaaaaatggaagaagtaaaacttttttattaatagataagtaaaaaggttataaataaaaattaagattagagatgtgataaaatcataaattaacaaaatatagaagtcttcgaaaagaaaaccgaagcggctagagagctaaactaagccgattcaatcgtggagtcgtgagacgaacaaaaggagagagattccttttgggtttcgccgtgattcgatcttcgcatgtcaatttgaaaaccctagtttttgatctctctcaattccaagctactcctaatttcaaggttcgtctctttccctcctccttagatctgcttctgaattgaaatcttttgaattacgattgtaggaacttggaattttcttagctttttgtttcattgaaccgttttgagattttgatttgttcttagtcgtgaacgttgtgcagaactcaaggaacttcagacgaatttaaggagaactagttttttttttttttttttgaaatg

SEQ ID NO: 33348 - DNA, 3000 bp, Unknown
  misc_feature (1)..( 3000): 2750-1469P.txt file - cDNA_ID_3068597; gDNA_ID_1620557; Annot_ID_160480
aaaataatgtgagaatcaaattcaaaaaaaaaaaaaactgagagaaaatatgcgtgcataacacataaaaaaaaaacgtaaaaagcctaaaataatatgtaaagaatatgattattccattaattttacttatgattttaagtttcgttatatgatcgaaaccattaatatgattttggtgataaagaagtgccatttttttctatgcgccaaaatatttcgggcaaaagaaaattttagcctaaaagatggtttcaaatcaaactaacttcgactacgttgtttttaagaaaattatttatgggaattaaaaagaaaatcgtttaaaaatgttttaacaaaaacaggagataagatttacatgtaacgtgccacatttgatattttagtgtagagtgatatctctaattattgaaggctttattggacaatagatgagtgatgattccactcccatgtaaaggagaacgagataatatcagcacattgtgtttttttgcccttttctttgtttttctctctttctctttcgcttctttatttttttataaataatttgcttctctttttttttcctaacatactaagaacaatgatgttggtcttttccaaaatctgatagaacacttggcaacttgtgtagctgtagtataattgtatttctttttatcgcaataattaatgccaacatatcctcaattatatatattatcctagctaatcgtatttgcaccgtacgtctatttcttatatttttctactctattaattacttttattcccttaaaacattaacactaatttttattgcgtagaaataatcatatttcattatgtaagaagaaaattattttaataatggaatatattttgtacatatataatgtgtaaaaaattaattttaacttctattactaatttgattaacaattaaacgcatattttcattacgatggcactcttaagcagtctagtatctagagtgtagacaatagacatgcatggttattgagactgtttacctaatctcattaccatttcctcagccagttgatagatcatgcttcactttggcttcttgtgtttttttcctcttcatcatattttatttgtaaataggtgatcgtgttcacaaactatatacgttatacattattatttataaatgaaaaaccggaattggttagtaaattaaaccaattatgatatgtgcttggtgcgtatgtgtatatgtatgtctataactctatatatcctttatataaactcccactatggcactctcatctttgccgttaagatatgaattagatataattcatcaattataaggcaaaactttcgaatatggttggattttagtagagctggccggcagctttggtgcacaacaattgtctctcttctttacaaaatttatatatattattatgttgctaattaagtttatctgctcagacgtataagatatttgtactcacatattgcatatcgtactgtatatgataatggaatgtgctaaggatatatatatttaaaacgttttcataaatctcatcaaggacttgatctttttataaaagcattttcgtgcctttctaggtgtatggacgtatttaaacgaaggtttatctagtccttcctcaactttattaaactgtatgcaaattaatcagttagttgtttattttgtagaccaaatataatccgagtctatattcatttgctgattcaaaaagaaaaagtatatatatatatatatatatatatttttttttttttaaaattaaattcaattaggtttaataaaattatacaccggactaaaataaaaaaccaatttgaattattcatccttcaaataattcttggtaagttaaacgaaaccaaatcaaacataatcacgaattttccttactcactcgttttatgcaagatgaaaattacaaatcgaataaatataccaaaatatcaaattaaaagtcacatacatatagtaacgaaatcgaaatttgagaaggaaaaattgatttttattttcctctcgcttggttggtgcatgcacgatgaaaatgttttatctttttttttttttctctcaaaaaccgacttgacattgtatctatcggagtgttgtaaattatgtaacctcttttgataaagacgagactctttttcatcgcaacaatgacatatcctaattcttagaaatccttatttggctgctatagaagaacaacatatttttttctttttccaccagccattctcccatctactcgttggtgcaatattcacatggaaaacagttggatttaaaggagattacaaaacttaattcataaaatcgaactctatatatggaaattaagggtgacatattaaatgcaattcaacccaactaaaaatgttgcaaccgaaacaaatcaatcaaactaaaataacatgcaagtccaaatatatcataatactaataaatatgattcttttgtctcattaagcatctggttctatggtgtagtggttagcactcaggactttgaatcctgcgacctgggttcgactcccggtagaacctcatttttttctttctccaaactaaattttaaagttctaaacaaacaggtcatcagctatcacatttgggcctagtttgaattagtggactccaaggcccaagatacgtaaaatcgctatttcgttttaaggttctaaagataaattatctgtactattaaatattttaatattaaaaaagaaaagaaatggttttatgatccgatcccttctcaatctcacggaggggaaaagattcctccaattcaaatctctgtctgtgtctctgtctctcaactttcaatttctgagagagtcggaaatattctccagatcgcctaaggcaaattcgttttccgattcggcctagcgacggcgagagaggagaggaagaggcaagttgattgaccggagaagaagacgaagccgttcttggagaaaatg

SEQ ID NO: 33349 - DNA, 3000 bp, Unknown; identical to SEQ ID NO: 2573
  misc_feature (1)..( 3000): 2750-1469P.txt file - cDNA_ID_3068622; gDNA_ID_1620558; Annot_ID_160528

SEQ ID NO: 33350 - DNA, 3000 bp, Unknown; identical to SEQ ID NO: 2576
  misc_feature (1)..( 3000): 2750-1469P.txt file - cDNA_ID_3068657; gDNA_ID_1620559; Annot_ID_160564

SEQ ID NO: 33351 - DNA, 3003 bp, Unknown
  misc_feature (1)..( 3003): 2750-1469P.txt file - cDNA_ID_3068669; gDNA_ID_1620559; Annot_ID_160555
tgtttccacacttttaaacagtaaaaatcaaatatagtagttgtacacttaaaatttatagatataaaagttataaatttagaaaatacaaaaaattaaatcatatatatttttaatgtactaaacaagttaaacttttatttttttttttataaatatgggttataatctagtgcaattatataagtattacatatttcaattgttttaaaataatgttgtttctgaaaaatgaaatgttataattattggttttgaaaactgaactaatgtataattattatatgtttgcaatatcagtattaaattgcttatattgattaaagtttatgttgattacagaaatggatcattcaaacaaaatgatagcaaagaaaaatatcatagaaatttgcatattagataatggaacaacacactattttgagagaagatatttttctctaagttaaaaccgataaaaattattatcaatacaatgtctaatcctacagacttgattgaaggaagtggcaaagaaaattttaaattgcctaatggatcggaacaaagttttccataaagaatgctttatattctctgaattcaaagagaaatttgttgagcctcaagacatataccttcaaggatatgttactcagtgtgcaaatgagaatggaaagaagtgtatgtctttaactactaattaatctggaaacaaacatgtctaggaaatattttcagaacttcattggtgtttgcatcatacttataaagttatatagatgccataaaatcgtatcttctgatcaaaagaaatctagaagatttcgtattatggcatgatcgccttgggcatccagacactaaaatgatgcagaaaatcatagaaagctcactaattaaaaaatcatgagataaatcatggaaagaaaatgacatatgcaacatgttctcttagaatattgatcataaggccatcgacaaccacaatcaatagaaaatcaccaaagttccttgaacgaattcaaggagatattttgtggaccgatacatcaaccatgtggaccattccactattgtacggtaatgattaacacatctagcagatgatcacatgtttgtctattgtcatctcaaaatttggcttttgcgagatttatgactcataatatcaaataaacagctcaattctcagattattttattagcagagttagattacacaatgcttgtgaattcacatcccaagcattcaatgattattgtatggtaacgggaattgaagttgaacatcatgtagctcatgttcatacacaaaaatggtttgtcagaatcataaattaaacgtttgcaattgattgcaagaccattgatcataagatcaaaacttccaacctctatatgcggacatgctattttacatgcaaacgcactcattcggataagaccaagtgcatatcataaatactccccttatagttagaagactcactacttgtgccacaaatcggaagaaaataattactcatgccattgttatgtttgctatttttttttttttttaaatcgagtaaaagacaaaataaaccaaggaagaagaagagggaaccaatgctaatgttgtaaatttttgaatggtgcttcggaaacaagtagttcaactaggacgaaaatatggtattgataatattccggattgaatatgcaggatacatataaggatgatgatgattttcaaccactaccgccacaaagtctatagttttctccaactcagtacaccaaggtgtgtaagataggaaccatgtgtcaattggtccaaatagtggaagtgatagagaaaatggatgcataatcgaggtgatttaggaatatgatcagtttaagcatatattccacatgcctaaggaaccaaatcacatgattcaaggcaccgctaaacgaagatgatgagagagtgttggtttgtgatgaatggagtgcatataagatattctttgaaaaagcatgagtttttgaccgggtaggactgccatgagtacccaaaaaattataagaagttggacattttgaagtttgttgaaaagatgtttaagaggactgggatatcaaaataaaagacgtggaagtgaattgatggaagagttcaaaagtgagacgtctgtggctaggataaagttgacaatcttgttatttttatccaaggttgtgagagtagattcgaaaggtgatgcaaagatagaggacttactattaaggattgttgataatgtgaaatcttgtgagacattcccgtgaggacgattttcatttgagcagtgtatgaaaggggtccggatagtgatgaagaacatgaaaggggtggtgaaaccaaaagcacagactaccttttatggattcatttctccacttgacgttatgagactagtaaattataaaaattaacaattttgaagtgttgttgtgcatttaagtgtgcgtgattgtgaatgtgtagattctagcatttaagtgcattcccccagcttagaaaaagattcatagaagttgtacccgcagaaaaggattatccaagaatgtgcaagcacaagttcactgaactggagagagcggcttatcaagcacaagcacaagcactgaaagttgcatgaaaggatttactttggaagaaataaatgaagcgcttggagatataaaggttagcttgatcccttgaaaactatcaatttgaaactgtgtggtgtttgattatatgttaacttgacaagatatttcaaacatcttagaacctgatgtggatgagagaaatatgttgtctcgcctaccgagagttatgttgatgatgagatttgatatatcgatccaattgttgatagctggagagagcgacttatcatagagaagaagaagatctgttggaatagactttacaaatcaaacattgatgttcgacgtattattgatgttaatgatgtccatgaagtccttgttgcattaattctcttgttacaggaaactatg

SEQ ID NO: 33352 - DNA, 3000 bp, Unknown; identical to SEQ ID NO: 2577
  misc_feature (1)..( 3000): 2750-1469P.txt file - cDNA_ID_3068677; gDNA_ID_1620559; Annot_ID_160545

SEQ ID NO: 33353 - DNA, 3003 bp, Unknown
  misc_feature (1)..( 3003): 2750-1469P.txt file - cDNA_ID_3068711; gDNA_ID_1620561; Annot_ID_160595
aaggccttgccaaggaagactagcaagagagactgaggtttagggacaaatggaaacaaattgaagaaaactctaaaatactgggtgaagtaaagatgtatctataccttcctcgaagaaaatacataagcacgtagccaagagattccagatcgtccctcctactttgctctgtttaaaggatctcaatttagtttgataaacgtacaaatagtcaagtttttaatgtgaaaatgaaagaagaaaaagcaaacaatactcaccaattccaagatgagtgttaacacttgcatatcgagctgttccagtaagattcttgttttccctaataagtaactctcgattagtaaatatattaccaatatttcactaacaattcgaaaattttaaattgagcaaaactttttaacaagaaaaagaaaaatgtgtacctgtagggaatgtgtctatgagtttggagatctctatacttttttgcaagtccgtagtcaatgatgtacacctagacaagaacaaagatgacatatcagagaaaagatgcaaacatatagaaggattcacaaggtagtagcaaaagaaattccaaaaccaaacaagtatattatcattccacacaataaagttgcataccataactactcacctggttcgctttgcgtccaagacccatcaaaaagttatcaggctttatgtcacgatgaagaaatccccggacatgcatatactcaactctattgatctgaagaaatcaaatcatgagcaacacaataactcaaacatatcagagaaaaggtagataatatatccgtaccatttgatctgcgagcattagaaccgtctttagattgaacctccgactacaataattaaataaatcctccatactcggacccaaaaggtcaatcaccatacagttgtattcaccctcaaccccataccattttagatgtggaataccagcttcaagaacacaaatgtaaaagttaataaaagaacgataactgaaggtttaaaccgacaaaaggcaaaacttacttcctccttgaagaagcatataaagctttgattcataatgaagttgaggatgtctagctctcgcaggttcctacaaagaaaaaaaccaaagttttagtaatcaagaatgagtttttacacattactgaattgaaaagggtaatagtcaaatgttgagacttacaagcttcacagcaacttcttctccagtttgtacattaacccctgaaaacaaaagagttattacaaaagcaaaacttggaattaccaaaagacagaagaaacttcaaatcacattacctagaaaaagttcaccaaatgatccacttccaagtttacgtccaagcttatacttaccaccaaccacacgatccatcgttaccaaatcaaaaagcttcctcctttcttcgatctcttaaaacaactaatccccaacaaaaccaaaagttgacccagatctcaattcaatgttccctacctctctaaaagcctgatcgaaattcaaagatccccaattcaaattctagtaagaacccttcaaatatctgaatcaaatcaaaattgtaatcgattcaccaagtaatcttatgcttctgctttaacacaaactaaaaatcacccattgaccaacaacatcttcatagaaagtctgacactttttttcagacaaaagctttagatcagattgaagaaacacaaaatgaaacggaagagacaaaaccaaaacaaaaaaaaaaggtgaaaagaacaaagagagacgaaatcagacccaaaaaaaaaaaaaatgggtcgttggattcgattatcgtttgatctataaagactgctacgagacagcttgattcactatttttttctcttttttttttgctgaattttttttttcttaaggaagataatggattagagacgaaaccaaacgttaaaagaaaaatgaaaaagaaatctgacgagacggccttgaagaagagattttgagattttctttccttatccctaattttttacaactttttatttttttgcttaactaatttgttttctttttctccaaatttgatttattcttcattaactgtaaacagtaacgtcactatatgaaaaagatgataattaatgacataaaattagttggattttaatattttctagcatctttattttcttccgctcaagcaatattgattattttttggtaggcctcaagcaatattgatatttgatttgaaactattacataaaaaatatcataaaaaaacataatattctaccaaaaaatgagtatttgataatatatttttaaaagtaaacaaaacaaaatttgtctcgaaactatcagatacaccataaaaaaaaaattggtactatttataaaatactatataatcacttgattgttaaatttgctttttaatttttattggtaataagaaaaattattactaactcgataaaccctgatataaaatattttattatgtagaataaagtaatataatagaatcgaatttcgattgatattatattatcttctttttttgtttagaccatttcttcaataacagtgtcaaacatataatgacatgcattttctacaaagacagctagaactttagttttatatattcagacaccacttacaaaagaagaaaatattaattaaacatgaaaaaagtaaacattgaacatccccatttaattagggctttaccaaattagtcggtacgataaactcgtctaaacattaaatgggcttaattagttgggcttattttaacactaaattggcccattataacttcccaaaatgatattggttcgagatgattcgataacgtgggcatcaatccatggatcatctcagctttcaccatcaccaataaataaacacacaggtctgctttcataccttcacgctctctcactgatcattcacaatctctctctttttttcaccggcgataattttccgatctcgattataagatg

SEQ ID NO: 33354 - DNA, 3000 bp, Unknown; identical to SEQ ID NO: 2581
  misc_feature (1)..( 3000): 2750-1469P.txt file - cDNA_ID_3068725; gDNA_ID_1620561; Annot_ID_160618

SEQ ID NO: 33355 - DNA, 3000 bp, Unknown
  misc_feature (1)..( 3000): 2750-1469P.txt file - cDNA_ID_3068738; gDNA_ID_1620561; Annot_ID_160613
gaaatcattgttctgtagctgcatggttccagtttcaacaaaccaaaacttcaagatccccaatatcaaatcacagtattagtataagatcatgagctaatctaagaatcctaaaacagaaagaaaacaaaagttctaaggaaagattttgtcgggaaaaaaggaaaaggcaaggtattgcttgctcatggcaaaaccagaagaaaactaatattgatactaggcagctttcggcttaggtgtcctcttcttcaaattcttcttggcgggtgtcgagttcttcattccgataaagaagagtaacgctccaaagagtgcaacgctctgcaataacaaaaggcatgagatttttatcgagatattgtccattgtgataaacagtatgatctcttggctttacaaggctgaaactttaaaggtgcaaagctgcgtttcttaagattacgataattgataataagtttctggacaaacctgcaagaactctgtcaacagaagagagaaatgacgttcctgaggtccgtagttgtagaaatcatagagaataggaccgaaaaccaccaagtaggaagcctgaaacaaaaaagattaagattttaagagatcatacaaatagcaagctttttgaatcccttatttgtaagttgaacaagaagaagcctaaccagaagataagcaccgaaggtgtttccgataacaaagagtaagcctccgactcctttcagggcaataatagtagcaacgacttgtctcacctataaaaattcattctccaagtcataaaaagacacttttaaagagtgcgaacaagagacaagaacatcataaccaggtcattacctctattttgggcaatgttactcctaatctagaagataaatgtgccttaaccaaatcaagctttggagccaattctttagctgcaggaccaccatcattgaacctattcaaattcccccaaataagcgttgttaaaatttagtaatatagtcaaaagaggaagataatattttgagctatcaagtaaacaaactaaaatcctagtaacgactaacgaatagtacgagaacaatcttattttacatttatcgatcatcttccatttagagtaaatgatgctttgtctctagaccactaaacattggaataaccaaaccaattcaacgtctaaccatatgaacaacagagctaaagacatctataaacgaatataagagagaacaattatatgtgccctaaatgcggtaataagcccaagccagattcaaccatgatcaaacaacatcatacattgattgataacacaagatacataaatattcaaactttgattaatctaaagtgaccagatcaccaaaacctaaaatcaagctcaaaatacaaatcaataacagtaagaaatctagatcgaaacataacaagtactcaaaatcaaatcgtgatagattcagataaatatccaatttcacgaaaccctagatatcaaaaagagcctataaagcttctcaattcccagattagatctagcacgaagcaattcactattaagcatcggaaaacaatccgaaatctcaatcaaggaacacgaagagacgcgagaacagatcgagaatggagaaaaaagaaaaaggcctcacatttgccaagcggagaggataaagagagaagcgaagagaactcttccaagaaaagagaagaaacccatctctatgagtttggtcttaagctcaggctcgcttgttcgtagatttgtctgacggagagaaggagaatcttcttcgtttcggcgaggaggaaaaactgcggttctattggtttaggtttatttattaacatttcaaaaaaaagaaaaaaaaacattatcaaatttattaaattttaactcccaacgagaaactatattttacacgatcgattcatttctccgagaagaatatgtacttttttactttcgacaaaagaaccatatttttagcttgggaatcttggattaaatattaggacaatatttttaacttgagaatcttggtttaaatatgagaaccatatttcagaaaaaaaaagtttatatatgtgtaattttgtcggaaccggatttactaacattcgtaggtagtcggatttggtcccgtaaaataaaatggtaaataaaacaaaattaatagtaaagaaaatgaaaaataatttacaaacacaaattaaattgaatacaaactagctatcataatatttttcaagttggttttcatgaacattttagagcactaagctatataacaaaataataataattaaacatcttttaatcattaagtatttaaagatccatacaaatgttggttacttggtacaaccaacaaggcaaaggcggtactgaataagaatataagatacatgaaaaattgatctactatactttacaaaacgcgttagatattatataattgctactcgttcaattcatggggatgtagctcagatggtagagcgctcgcttagcatgcgagaggcacggggatcgataccccgcatctccacttttattgttttctttttaaggttctttttcttttaatttattttcaatcttctagtcttcaattctgtttttgtttctgtcggaatctcttaaaagtcaatttaaatactttaaattccttgcacaacactcaattttgatactttgaattccttgcacaacacaacacgtcgctatcaatcacagacaccacaaacttggacacttatctttagttctgtcttaaactgaatctccctcttatcaattctgtttttgtttctgtcggaatatcttaaaagtcaattttaatactttgaattccttgcacaacacaacacgtcgctctcaatcacagacaccacaaacttcgacacttatctttagttccgtcttaaattgaatcttcctcttcttcttgagtcttcagaacaacaacaaaaaacagaatcttgaaagaaagaaaaaaagaaaaaaacatg

SEQ ID NO: 33356 - DNA, 3003 bp, Unknown
  misc_feature (1)..( 3003): 2750-1469P.txt file - cDNA_ID_3068774; gDNA_ID_1620562; Annot_ID_160651
tgagaaagatttcttctccgttgttaaatctagtgaacgcgtcgtttgtcacttctaccgtgagaattggccctgtaaagtaagtttgtggattcttcgtccatgtgatctttgagtttctttagagcttgtgagggattagtaagtaacaatgcttgagttttttgctgctgggcttcgaaaagtttgtcacttgttggtttgatccacaaggtcttcttctccatagctactagacatgttttagcttaagattcaagtttatatatgccttgtggattaatcattgcctgattcttccgtgtcatctctgagtttatttagagcttggaagtggtgtagtaataactaacaatactcttgataagttgtagcaatgctcttgattagtggatgtaatatgatgttgataagatatatgaggcacagaaccaaaagtggtgcttccactagacccgtttttagcctaaggttcaagtttataccttgtagatgtttctgtattgtctgattcttccctgtgatatttgaatttcttagagctttggaagtgatataggaacaatgctcttgtgtgtttgtctctatgaagattatcgctgtcgtgtttcatccgagtgtgcgggattttttgctgctgggtttagcctttcttcaaaaagttattacttgttagttttattgttttggtcttgataagagatgttaggacagacatggtgcttcttgtctatagccactagacctattttagcataaggttaacgaaattctctctacataccttgtggatttgtttacattgcctgatctttcctgtgatcgctgtcatgtttctttggaatgattgatgtttataaatggaaaaatctttgtgcaggtgatggataaacacatgagcatattggcaaagcaacacattgagacacgtttcgtgaagatccaagctgagaaaagtccattcttggctgagaggcttaagattgttgttcttcccactcttgccctcattaagaacactaaagtcgatgattatgtggtatataataataatgcttaatctaatctcttagaatatgatttatatggatgatacaatgttgttgttgttgataggttgggttcaatgaactgggagggaaagatgattttagcacagaagatcttgaagagagaatagccagagcgcaagtgatccattacgagggagaatcatctcttaaacaaaagtctacaacacaagtcagaaggaacgtgaggcagagtgctcgttcagattctgactccgaataaatcccttttcttatcaaaggtttgttcgtttgtatcctcttgttagttgtaatacttgcaattcatcgttttgatgatcaaaatcaatgttgatcgttagattgatgaacatgcaatatctagaatactacattgatgttttatatgttacctagtgagagtgttggaatgaccaaagtctttttgagtttgttctttaacttttgaaaaccttctgtctcataccatgtcttctcgattcctccttaagtctgaaacctagacaagtcaacaatcgaacaacactttccctaatttttttaatttattagtaattgatagtggagtacatgaaatgttttatttaaaggacgaatcacgttacctaaactctcatagaataaagtcattaatggttgcattagatctcttaaacttgggaaaacaattatataggacacgtgatcattttactcaacttggttaaacaacaatactattaaactaataccccaacaacaaattttaattaatatttcttatcgatgcaagctacttctactactactactaaattattcgacaagaatccaaattaatgatggcgaaacttcttggtttcatcgatatttaacatatatcccgatttcgatcaaattgcaataatgtcacaaatccatacgaattccacatactaataataaaactaaaatacaagtcatggatgggtcatggtcatgtatacaatactagaaaaagtataacttgtggacatcataaaagatagcaactttgattttgtctacaaatataaaatgtagatgccatattccttgaataaaaaatgaggccaaaaacataaaataaacagaagaaaaagaagaatatgattcttttagaaaagttaaactatagtagaacagtctgtctctctttgtttgttgtatttatatatagtaataaaaagatttgaataggcaatattagttttatattataataatcactttcaaagtaaattactaattatttcgttttttttaactatttgttttgtaaattactaattaatttgtttttttttaactatttgttttgtaaaacacaaaatttgattttttttgtattttacactgaaaaatgggaaacaataaaatagaagatcgttacagatacgcaaagcactccattccactctcgtcccgcttcgcctcttttagggcgcaaccaagagacagagaagaagagagagactcgtaagcaacaataaccaatagctctctctctctctctctctctctcctctgctgattcttcgctgactcttgcctcctcgacgtcgtcttcggctttgtagcatctcgccgaagcgtcgtaagttctcttcttctctaacctctttgcccttgagaatcttagatcgaatctgctcctcctttactggaatctaacatctttaaaaagtcgagtttcgttatactcctccaatcgcttctccaagttcgtgtatgttgttgaatttgaaggaattttttttttttgtaaaaaataaaagtcttgtctttttcagatgggtcatgtcgatttcgtgtttattgctttagggtatttgaaaagtcgtcgtctttgaacaaaagattgaacctttaatgacattcttggtctgtttgttgtttttgatctttgaacaggttgatttgagagagacccaatttggattgttagaaaatg

SEQ ID NO: 33357 - DNA, 3003 bp, Unknown
  misc_feature (1)..( 3003): 2750-1469P.txt file - cDNA_ID_3068778; gDNA_ID_1620562; Annot_ID_160649
aaaagaaccaactttttttgtggatacatccaaaaaaaccaactttcggtttgttcaaaattccacaaataattaaaatgccattggcatatattccttggacaaaagctttttaaaacatgtatgcaccagattaggaccaatgccatataggatacgaaaacacattagaggttattattaatgtagaaatcttaaattagtacatatgcggagtggtggaattattatgtaatctcgcatcatacggataattcatactattagcaaacaacttcgatatctaatatacatataataggtattcttaagaaaagtaggaatgtgaagcaaagctcaaagaaatcaacaccattcgcatatttttaggaaatgagttttagaaggaaaaaaatttgttctacaaaatgtacaccattttacagtttgtttgattcaacctcatgaataagaaatctcaaattaagcccaagatacaaggaaaacgcccattagttaaatgaagcccagaccataacaaaaaaaacacgtgattaaaaagcatgtatagagtctggtgcgtggaagacaagaaaagcaaaaattctgtttagcagacaagacaagtgtcaaattatcattcgagaatgtgagctccaagtttagttagggttttgtataaatattgtacacactttctttcattcttaaaaacttgtgagaaaagtattgaatcaagaaaattgcttcttatccgatctctctttcttctcagtcatgatgaaacaatatttgttcaagatcgccgatctcttaactgctcctgtaaccattggtgttgctcttgcttcagtggctgtcgtagttgtggttcagcatcgggaatttctcatggagatagccatgaagaagaaggagaataaggcggagaagaagaacttgaaggaggaagagacggtggagaagtagtcggcggcaaacttgaaggaacccgtggagtagaggagtttacttgtttgtgttttaatgtttcttttgcttaatcagtttgtgcttttaatcgtttgtttaacatcggcagctaatgatgtttagtttcttttactttatttccttctttttttttcaagttttattagtgttaagcattgaagaactgatgactaaatccagtagtttgctataaatttgtttggattacctcaaccatcatcttatattttagtttcttccagagtataattaataattatcagtagaatatgaatttttgtttatggtaacagtttttttggctttgacattaaataataatcatctatttttttagttattctctatgtttcataatataattttttaataaaagtacggaattttgtttttctacgttaaaaacagaattcaatattaaactaaagataattttgacaataataaaatatatacggcagaatagatcgaccgtagtcataactcataaaatctatataatttgatgaacatctttctaaaacatctatagtaaaaaaaaaaaaaaaaaaactctaaaacatttgtatatgaaactggtggagtgttggtattaaattgaaggatttggctacattgtaacaaaaaagatcaattttaatattagaaacaaatatgtcagttagaaaaaaagttaaaacaaatattaaaatttatattgaagacattttttgagataattgtgaaaccaagggtctaattgaaaaagacaacttggagcttacacttaaatggtaattttactattaaattgaggaactattttttttttttactttttattttattatgcttggcgaaaaattacttggttgtcaaacaaaaaaaatacgtgctttacaattatattataatttaattaaaattgaaaaacaccattttattggattgattttttttcttaaagtggtaattttttaaaagtaaaattaccattcaagaaggtgtaagctccaagttaagttaggtttactgagtaacgtccaagttttaagacttcttataaaatacatagtttcgttcattgttaaaaactcaagagcaaatattgactcaagacaagtttttcttcattaacttcttctatcggatctctctttttctctctctcaatcatcatgatgaaacagtatatgtccaaggtgaccgagttctttaaggctcctatgaccaacggtatggctcttggtacagcggccgtcgcagttatggcaagcaagcgagacctattcatggaacagttggccacaaagaagaaggagtacttcaaggaggagaagtcggcgacgggcttgaaggagaacgtggtggaggccgataagaaggagtcggcggcggacgtgaaggagaacgcagtatagaggagtagcgttaatgagttttagtttggtcttttggttttgatgttttctagctagtttgatcagtttgtggttttttttaatcgtttcttttaagttttaacatcggtagctataatgatgtttagagtcaaaacttgataataataactaatactttttctttatctcaacctaattcttatatttagtttcttccagaattatctaccactagaatactgaaagttttgtttcttttagattctaaacttaattgagacaaacaaagaagtgttggagattacacaataaaagtaaaagtacgtaaaaaagatcctctgaggaagcttgttgcttattccgtcgtctacgcaacttggaagcagagcaataacatgctacacaactcgcatcacatataaaccggtttggattaaactgaccttaacccttcttataaaagactctgtatcaattagaggctttactttaagtcttccgtagctgagacactctgtctcacgcagagtcttttgaacagattttaaaagcgaagagagatctacatcttctcatcgtcgtcgtcatcatcaacaattcgaatctgaaatctgcaattcacgagaagaagtttttttttgtaacaatg

SEQ ID NO: 33358 - DNA, 3003 bp, Unknown
  misc_feature (1)..( 3003): 2750-1469P.txt file - cDNA_ID_3068788; gDNA_ID_1620562; Annot_ID_160644
atctaacttaaagcattgtactttcttttatctcattctcctttgctctgctttcttctggtcaacccccacgagattccttcttatgtgattgtaaagagaagatttttcagagatgggtctcttcgaatcggtgaaatcaatcgattgggaacaagaatcgttcccaacttatcaagatttagggtttttgcctctctttgcagtgttcttccctacaattcgatttctacttgacagattcgtcttcgaggtaatttacttattcatgggattttagatttgttgtttcttcaatcgcatttattgttgtttcaccaaccaacccaaaaaaaaaatattactttcggatttctactttttagttatgagttatgacccttgagagaccaatcattagtcttgtctctctgtatgattctgctgatgtttagattttgtctgaaaataaatgcaatgtatatgaagatattgtttggtaggtgaaagcttacatatttgtttttattggtgtttgtagaaattggcaagtcttgtgatctatggaaggatgagtacgaataagagtgacaacataaaagacaggaagaaaaatagtccaaaagttcgaaaatttaaagaatcagcttggaagtgtatttactatctatcagctgagctacttgctttatctgtcacatataatgaaccttggttttcaaatactctctacttttggattggtcctggagatcagatttggcctgatcaaccaatgaagtaagttgtttcgttatggtcatcgatatcttttgtgatggtcatttgctaaaatatgatactgctatgtgtgcaggatgaagttgaagtttttatatatgtttgctgctggattctacacgtactctatattcgcgttggtgttttgggaaacaagacggtctgatttcggagtttccatgggtcatcatatcacaacgcttgttctcattgtcctctcctatatctgcaggtacgtatattatacacttgtgttgtggaggaaaggatacactgactcttgttttgtttttggatgttgatgatatagattaactcgtgctggttctgttattcttgcacttcatgatgcgagcgatgtgttccttgaaattgggaaaatgtctaaatattgcggagcggaaagtctcgcgagcatttcgtttgttcttttcgcgctgtcttgggtcgttctacgtctcatttactatcctttttggatcctgtggagcacgaggtttgtttaatatccactttagcgtttgttcttgaatgttttttccttgatgtatatatattgtggggttttgatttgcagctatcaaatcattatgactgtggacaaagaaaagcatcctaatggaccaatcttgtactatatgttcaacacacttttgtatttcttgcttgttcttcacatattctggtgggttttgatttaccggatgcttgtgaaacaagtgcaagatcgaggcaagcttagcgaagatgttagatccggtacgcaataaaaactcttattacaatattttgagacaaaaacactctattaataatgttcatgtctttttgcagattctgaaagcgatgatgaacacgaggattaatcgcatgttgggaatattagtagtgcacacgctctatatctcatgaatctgaaccacacggagactaggaatttcaacatcaagtaggatgcattgcagtatttgaacagttggttcatcatcttccagaggatcgtaaccggatcaaaccgttttgaatgaatcggtttctcaatctgaatttttgagtttattgttttctctaaagtttgagcaaattcaagattttgatcaaactgctccacgttctattgttttttcttctataatttttaatttacgcttttgcaataacacaattccttgtatcattatactaatgtcatctcaaaattagctcccttcaacatctatgcaacagactaacaactaaatgaattttcttggggttttttttggttcattgcataatttgataaaatccaataaaatacttggaaaggataaaagaagaataatttttcataaatgaatgaaaaaaaaatcagcatctttaggcgcacaatagtatcgcacgatagcgacgcacaatagtagcgcacgatagcggcacataatagcgacacgcctatgggatttgtttgaggttttagctttctcgctgtcttggccgagaagactgaaaccaattgcaacaaaaagaaagataaaaaaaaacaaaaaatctcttctttgttcatcatcatcgatcgattctactgcaacaaggtacgtctttttcacttccttctctgaacaaaactctaaattttgttgcttttttttttcctgtgtcgtctcgcgctgcgattcttatacatcttggcttcaagtgatactttgcttcccaactcttgaaatgtataaattttgagactttactggagattttgagttgggattgttttcatgttcttaaagattcgagtttcgatctctatatgattcagtagattgtaattttgaatcggatgtctggaaaagaattgattttatagtctcttaggttactttaagtagtactttgcataagatctgtgatttgatgattgttatcttttgttacattgctggtggagtataataagatgagcaagaaccaacagaagtttgcgtttgatttaggttatttagcaactagtcctgttttggtgtgtttctaatctcactcactgggtctctcttatgtggaatataagatatttgatcctacgactgttagtgctttcatgctgggtttataatatggatacaactgaattcctggcattacattttttgttcagaaccaatgaactgtttgtttaggtgtcattgttatctaagtgcttgcatccttcttctgatgtgtgtgtgtcttgatacaggtctgtgagattttgataaaagctaagatatg

SEQ ID NO: 33359 - DNA, 3000 bp, Unknown; identical to SEQ ID NO: 2590
  misc_feature (1)..( 3000): 2750-1469P.txt file - cDNA_ID_3068796; gDNA_ID_1620562; Annot_ID_160641

SEQ ID NO: 33360 - DNA, 3000 bp, Unknown; identical to SEQ ID NO: 2596
  misc_feature (1)..( 3000): 2750-1469P.txt file - cDNA_ID_3068800; gDNA_ID_1620562; Annot_ID_160638

SEQ ID NO: 33361 - DNA, 3000 bp, Unknown
  misc_feature (1)..( 3000): 2750-1469P.txt file - cDNA_ID_3068808; gDNA_ID_1620562; Annot_ID_160634
cctatgtcaaaagcaagaggaaaatttgaagagtccttctccacaggccatgatcgaggaaactgaagcgcatgagaaatgggaactgttggcggaaatagaagaaaaatatttgaaacagaagtcaaagctccattggatgcaagtcggtgacaagaataacaaaacattccatcgagcggtaatggcgagagtagcgcataactcaattcgtgagattcaaaggcaagatggcagtgtaacaaaaaaaggagaagaaataaaagaagaagcagaacttttttccgtgagtttttgcagttggttccaaatgactttgagggagctacattggaggaacttcaagttttgttaccatttaggtgtacagcagaggatcgaagtagactgatggaaccagtcacaggggaagagattaagactgttctgttttttatgtcgagtgataagtccccaggcccggatggttttacaactgagttctataaagctacttgggagattataggtgctgaatttatagtggcggtgaagtctttttttgaaaaaggattcttaccaaaaggggtaaactctaccatacttgctctcatccctaagaagttcgagaccaaggaaatgaaagattatagacctatatcttgctgcaatgtcatctacaaagtcatatcaaagttgattgcaaagaggttgaaagaaattcttccacagtttattgcggggaaccaatcagctttcgtcaaggatcgtcttctaatccagaacttattactagcgactgaaattgttaaagactaccataaagagtcagtatcagatcgttgcgccataaagatcgatatctccaaggcgtttgattccgttcaatggtctttcttggagaacgttctccactcgttgaatttttcgcaagagtttattcattggattatgctctgcatcactactgcatctttttcagtccaggtcaatggagaattggttggtttctttaacagttcaaggggtctgcgtcaaggatgttctctttccccttatctctttgtcatagcaatggatgtactatctaaaatgttagatagagctgcaggttttaagaagtttgggtatcatcctcgatgtcagactattggcttaacccatctcacttttgctgacgatctcatggtgctttcagatggaaaggttcgctcagttgagggaattgtgagtgtttttgatgagtttgcaaagaaatcaggacttaaaataagcatggagaagtcaaccatctacttagctgggagtgcaaatatgtacagacgagagatagaggagcgatttaaatttgcagtgggaagtcttccagttcgatatctcgggttaccattagtcacaaagcgtttctcttctgctgactacagaccgcttgtagaacaaataaaaagaaagattggaacttggacggctcgatatctctcatatgcgggtcgcctaaacttgatcagttctgtcatttggagtatttgcaatttttggattgcagctttcaggcttcctcgagaatgtataagagagatagacaagctatgttcagcgtttctctggtctggcccagagctgaactctaaaagagcaaaggttaactgggaagcaatatgtaaaccaaagcgagaaggagggcttggtctacgatcgctgaaagaggcaaatgacgttagctgtctaaagttaatttggagatgggtctcacgtggagactccttgtgggtaaaatggatagagacctatcttctcaaaaccaagtctttctggtcgctcaacatgcaatataacggttcttggatgtagcgaaaactcctcaagtaccgagacacagcaaaacaattctgcaaagttgatattcgaaatggtggtcgaacgtcgttttggtttgataactggtccaatatgggtccattgattgatattgcaggtgatagggggcaaatcgatcttggaataagtaagcacaaaacagtagcagaagcttgggaaggttgcaggccaagacgacacagatccacacatcttaatgccattgaaacaacactcttacaacaaagaaatcgcagaacagaggaggaagacattgtcctttggaaagggaagaatgacgtttataagccaacgttcttgaccaaagaaacctggaaccatacacgttccatatccatggaagtgttttggtataaaggtgtctggtttgttcactccacaccaaaatactctttttgtgtttggttagcagttcaaaaccggctctcaacaggggatataatgaaccagtggaacggaggacaatcagctacttgtgtgctatgtaacaatgcattagaaactcgggatcacttatttttctcctgcgattttgcttcagaaatctggagtaacttagcaacggaaatctatggagacagatattccacgagttggcaagacctgatacaagccatttccggctgttggaggactcggcttgatggtttctttgcgtgatatatttttcaagtctcggttcacacaatttggcgtgaaaggaagggaaggaaacatgaagagaaaccacactcagcagctcttttaaccaaatggatagacaagcaaacccggaatcaactatcttcgatcagagcaagtggggataagagatatgacatgagcttgcaagtctggtttgcgatgagacaaggagccacaaattcttgattttgttctagtttgtttcaaaattattcaaaaaacgttgcactcgatgtaaaaacgttattttcttttgaatctaatttaacattattttcaaaaaaaaaatatatatattcgtttttagaagagaatatttggccactgtgtaatttatcttgtattttgattagatttatgttcaagaaaaaaaaacaaaatttgacatatctattgatttttttttctttttgttctcttatcctcttcgcgcttccacacgtcgtcaaattaccaatg

SEQ ID NO: 33362 - DNA, 3003 bp, Unknown
  misc_feature (1)..( 3003): 2750-1469P.txt file - cDNA_ID_3068812; gDNA_ID_1620562; Annot_ID_160633
aagttcgaaaaatgtcacaaagaaccctcattatacagaaaacaagaaggcgagaacattcttgttgtagccgtatatgtggatgaccttcttgtcacaggctctaacttagacatcattctcaactttaaaaagggaatggttggaaagttcgagatgagtgacttaggtaaactcacatattatcttggtatagaggttctacaaagtaaagatgggattacgctgaaacaagaaagatatgcaaagaagatcttagaggaagctggaatgagtaagtgtaacacagtcaatacaccaatgatagctagtttggagctgtctaaagcacaagatgagaagaggattgatgagactgattacagaagaaatattggttgtcttcgttacttactccacacccgtccggatctctcttacaatgttggcatactgagtagatacttgcaggaaccgagagaatcacatggagctgcactcaagcaaatcctaaggtaccttcaaggaacaacttcacatggactttacttcaagaaaggagaaaatgcaggattgatcggctatagtgacagcagtcacaacgtggacttagatgatggtaaaagcaccggaggtcatattttctatcttaatgattgtcccatcacatggtgttcacagaagcaacaagtggttacgctatcttcttgtgaagctgaatttatggcagccactgaggcagctaaacaggctatttggctccaagaacttctggctgaagtcattggtactgagtgtgagaaggtaacaattcgagttgataacaagtctgctatagctctcacaaagaacccggtgttccacgggagaagtaaacacatccaccggagataccatttcattcgggagtgcgttgaaaatggacaaattgaagtagaacacgttcccggagtaagacaaaaagctgatatactaacaaaggctcttgggaagattaagttcttagagatgagagagcttattggagtacaaggagtgtcaaaagaagatttcaagcttaaaagggagattgttggagtaagcttgaaataacttaataaataagttattaaatattacaaaggattatgttaaatctctaggagttatctagatatttaaattaggagttatctaatgttaatcctagtatgattaggtctaattattctctatatatatgagtcccaaggtgtggttgaccatatgagttttagagagattaagacttagagattgtttaggttttaagttattttcctaaactataaagagagttattcttaaatctttgagttcttaatcttctttgaaaactagaacctaaatacttgaaatataactcttctttatgtaacgaaacttgatcataaaacttacaaagcaaggaatacgaatacatggcaaacaagtactttttagagaaatatcagttttataattaggacataaccaagacaacaatgaacaagttaagaaccaaaaaccaaaaaccaaaaacaaaaaaaagtttgcatgtatagcttaatcattaccttgccggatttgagtcaaacttggaacataataaaagaataatggttttaatccgactctaaacaccacttccctaacttcgttgtcctctccaacgacgtatatcatgttgtttttgccgtttattacaaaattttgctcatacacaaggactttgttctcctcatcgaccaagaattttatgccatatttaatctcaggcttcaaatccaccgttaaaaacttgatccacgacaacactttggcctcaccaatcttatttgtcacccatatctgtgtcttcgatgtaagggaaggttgtaataacacggaaagtttctcttctttaacaactgatagagatgtattacgaaaatacggaatctgatacggaagacatagacgttcaaatctttctgtcgtataatcaaaacagatcaagaataggtcgcacggtttatcatttccatctgtagcaaaccagtaagtcttacccttcaaagaaacgttttcaatgtacaaagaggagtccacagtgacatcaagaatcctccatgaatttgagttaatctcataaatttcgaactcttggccaccataaatcccgtggctcaatattttgtagctattattgtcggattttttgtcttggtaggatccaagagcatagttgcagatgtagcccatccttctgtgttgaatccacttggttttaccagtacacgggttccataccacgagcctagtattaattttctccacgttgacgcataacaataagccagaagtttgacataatggagagttcctgaacatacctaaactagaatgatggtcgattaggttaagttcaccagtgacctctataggtgaaactctttggagattgatgctaatcgaagaaaaaccaaaattcttccacatgagaatcagagattgccttggggctttatggcagtgtttgcttttgaatctcttatcgttgtataaatggttccatagtttgcaagtagatcgtaatcgtttcaaagatgtagccggaacgcggcagagtatctccactaacaaatcctctggaagttctggcatcatcattgttatctccggaggaagaaactgccggtggtggctttgattgttgtttagggttttatgttgctttgttgttttctagggtattatgtttaatttatgctgactctttaatatatagacgaaaaaataaagtttttgatatccaagtaaaacaataaaaggtaaagtaaaacaaagctggtttgattgatgatcaagtaaaaaaataaagaaaaacggaaaccctgtttctgagacagagtcttcgtttccacaaccctagaacaaaaaaagtatcccatttgtcatttgtcaattgtcattagcaagaacaggaagaagatagagaacagagctcttcgatcttttttcctccaaggaagaagtagaaagatg

SEQ ID NO: 33363 - DNA, 3000 bp, Unknown; identical to SEQ ID NO: 2606
  misc_feature (1)..( 3000): 2750-1469P.txt file - cDNA_ID_3068830; gDNA_ID_1620564; Annot_ID_160676

SEQ ID NO: 33364 - DNA, 3003 bp, Unknown
  misc_feature (1)..( 3003): 2750-1469P.txt file - cDNA_ID_3068834; gDNA_ID_1620564; Annot_ID_160674
taatttgcctcatcaggccaaacaaatattcaatatatagtggatcatgctcattatttcagtgtgtatttatgacgatcatacatatatgttccgagaatgagtacgacttcaaatattcatcacataagtaaaatgaaagatgattttttttttaatccaaaactgattatgtaaacttagtattaagatgatttgatgtcaaaatctttatcacatgatgtaacttatcaaagattgaatagctaagctagtccttgcttatcaagaatcaatactataatgaaaattcatgtatgcaaacagggcaatagaaaaatcaccagcttaaattcgacaaaagcaatgcgggtttggtggtaaaagtctccaagcaacctcagatggtgaacctaaaacgaaatgaaaagatggtgtaaaatgagaaaacacaacatctttataagtgtataaacaatcagcgacagtcaaaaaccaaatctatacctccccacaaactgttttaaagaaattttccaactccatcttagtgacctgcaattaaaaaccaaaaaataaaattggtaaaatttaaatttcaccaatgtctaacaaatgacataataaagctacctccttgtcaatgttggtacaataaacagtctttccacacttctctagctcgtccttggactgaaggaagaaaacaacgttatgcatataccacattattgataagaacaagattgattcaaaattatctagtcaagcctagctaagattggtttagacatgattatctcaacttacttgtggaaggaaagacgggttaacaggcgcaatagctgttttggacataaaaaccctaataggatgagaaccaaacatagtaccggattttcgtaaagcagacctagctccctctgagacatcacttcactgattaataaaaaaacagcaagaacatctcaactcataagaaaattggcgcataattgagtacctgcatcggtgaactcaatgaaggcgaaacgaagaatggacttatagtcaccgcacatacggcaatcaacaacctttaacccaaaaaaaaatggcaagaaaacttatgagaaatgagtttgcataaaatcaaaacgaagatcattaagtaagtacctggccacaagaaagaaagagacttgcaagctgctcctcagtaacctacaaaaagaacaagagggtttttgttatgtatatatgattagattctttatgaaaacgtgttttcttgagacaatatttctctgttttgtacttggttatcgatgtctgagacatatacagttctcttgatcatatcttcattctgaaccaagtttgtttttttggttatccatggcctccctttgccaaagttccttctctgtgttaattgacaagacttagagagcaagcacaaagaagaattacaatcatatttttcaataagcaaattgaaaagctgatcctaacatgacaatctatcaccatctaaacctcgaaatggcgaaaaatgtgtgttatgttaacaaattgattaaattcctcaacaccaagacatctaaaatgaaaaatatatgcaaaaagagtcataaccatttagagcagatatttcatgaacacataacatagttcacagaaaatagtatagatgaaatatataccattgtagcaaactggccaataagaaaaatagtttgctttggaaaatggttagtaaaccagaatctatttccccaaaactcagagtggtgggtttgagccagaaaagaagggacaaattccttagccatcggattcaaatgacttatctcactcttgagattcacttcactggttctttggatcaattcgtttgttagaacagaggatttggatttaggtgtctgatcatcagaacatgatggttttgtctctactaatgaagtagtgttgttgtctatattctgattattagaagagtccaccttcacaccaacattttccgcgacagccatgatcaaaccaaaagatcaatgaatctttagatgttggtaataaaatataaaaaaacaactcatgcactggagaaaggttagaggatttaaggagatgattaaaatagaggaaaaattattatgctctttatagctaaaacaattagattttctagtcaagatttttatttcatttttttttgacattagtcaagaaaataagcaaatacaataaattataattatttaaattttctttgtgtcagcacaatttctgcatttttttcttactacatataaagttattattacattaataggattctgtttatttttttaattatctctatcttatttatctagttttggtaagagagaaaaaaaaaatcgaaccggttaatcaattcaataccggtcggccaagtgtctctcagaatttgaccccaattcgatccgatattctgaaaacgacaacgttagcatttcgccatttagaacaggaaatagtttccgtgcaaaagcttcggtggctcttctcccaccgccgtatgttcttccagcgctccggaccgccgtctggtctgactttaatttgagatctattccgatccctaacagctacttctggtatactatcgttctctctctctaacacctctgcgtatttggatcgtattgactagagtcttcccattatacttgcatcgttctctcttccatggtttcgaacttgtttaagcttatagtcttcaataccttctaactatctaaaaggtttcgtgtttcaatttgcttctggtgcgatttgctcagtgttttctttctctaccggaatcagctctagacaaattgtttgctatgttattgtattcactgggattttggatagtcccagtgaaaatctttcaatcttgttcgtgttacattttctgatttatgagaggaataaaagtctaccactttaggtaataacttatctcttttgattcttgtatcacagcaagtttcaacttggaaagaaacaatg

SEQ ID NO: 33365 - DNA, 3003 bp, Unknown
  misc_feature (1)..( 3003): 2750-1469P.txt file - cDNA_ID_3068848; gDNA_ID_1620565; Annot_ID_160696
tccaaaaggctagggattctaaagggtatagcttcagctcttaaatacttacacacagaagctacacaagttgttctacacagagatatcaaagcttctaatgtaatgttagacacagacttcacaggaaagttaggagattttggtatggctaggtttcatgaccatggagcaaatccaacaacaacaggagctgttggaacagtaggatacatgggacctgagctaacatcaatgggagcttcaactaaaaccgatgtatacgcatttggtgcattgatccttgaagtaacttgtgggagaagacctgtagaacctaatctgccgattgagaaacagcttctggtgaaatgggtttgtgattgctggaaaaggaaagatttaatcagtgctcgagatcccaaactgagtggagaattgatacctcaaatcgagatggtattgaaattagggttgctttgcacgaatcttgtgccggaatcgagacctgacatggtaaaagttgtgcagtaccttgacagacaggtttcgttgccggatttctcaccagattcaccgggaattgggattgttactccggttttggtcggaggaagctccaccgtgatctctaacatttcttctccggtgactgagtttattactcactcgattcaatacggaattggacgatgagatgtaaaatttgaagcttgaagatgaacgttgttaacaaaaagttgatatggccgagttggtccaaggcgccagattaaggttctggtccgaaagggcgtgggttcaaatcccactgtcaacattctctctttttttttttttaaacgtttgcaatattttactaatgtatatattaatttatgaacatacccctttgtgtaattaatttataactatacccttgttaattctctgatttacaatattgaaagtcttctgggaattttgggagacaacatactccaatttcagtttcttctggaagaaaatcttaattttgctacaatggtgaaccatggaaagaaggaagcctggattatggctctggacaaggtgaatttcctttctctgcttctgggtattgatcatcaaacatgagttctggaatttaaaggttttgagcgattctttagctacgaaatgtgtgaagaaggaataacttcagttcagaacaaccaaccaggctctatgtttcaattagatacagctcaaaggttttcatctaatctggatgttctcatgtggtcttctaaagtcaacaagaagctctgggtttatggctttggccaagcttcctttctaatggattgttttagctgatctatagttcggggatgcaaatgggttacggtttctttctaaggacatgtcttcttattctgcttatcttactggtaattatagcgctcatggttcttggagtaggatatctattcagaaaaaagacaagacatatgtagatgtaatagaggctttcatgcaaaaaagaagtagtagaggcatgagaggaggttcttcctggtggtaaagacacgtgtttctaaatggaattgctttagctcttaggtagttatacactgaaatatcaaggcttctcatgttttgtaaaatgctgagttaaaggcaaagtgagtaggttttgtgtgaccatgggtccaacctagataccgttgtctctgtgcgaactttaggtcaaatcgcatggagcttgcaacaatggctgtttgcacagtaactgacatgtatgcctgtatgcttgagcaaacttttggaaaggaaactgtgtaagctgggatgctagctgatagactgtttgaaaatgttggaaacagataagatctgagttcagcttagaaaatagggtcgctttgctcaaatcaaatggtgtgccagaactgaaagcctccatggaagaagtggtgcaatatcttgaagttggaacctggtcctattctctgctgattgttggaatcttccttcattagcagttatccagaaaatgttcaaagctaccacaaggagcaggtatctgaccattaatctcttatctgatttatcactatacagtaatggattttcaccaagttaaaatttcctgctgccacaaaaaactgcctagctacctctgcggaatttaggttgtctaagcaaactaaactttcttctatctaattttgtcccgctggtggtgaggctactatgacataaccaaacaatgaaagaatatgctctatgcgattccctctgtctattatcttctctccaatcttagtttcagtgatttgaattgttgttcatgtgacgatgtattctcctgcacctgtagagctgaattagcaagtcctaaagggttaggttagtaactatatatttttgtcaattttcatattcaccatttaaagaaaattcgtagttttcatgaatatgacaggctttcctaggccttttccctttggtcgggctcataattgtgttgatattattacaaaacttggattttttattcattctacgtctgaagggtcaagggcatgtttaaaatatgtttaaaataatatttatttgtctgcgtccttctaaagatggcttcaaaattcaaatagaagaaaaatccaatgcaagtaggtgtgctatctagtcctacacacattttaaggaatttataaatgttagtcatacgcattattattgttccagggtacctccatgcaacagttgcgttgtctatctaataaattgagatcatataagttaaaatattgtgtcagaatattttgaaaatcacgttgaagctttatggttatctttttaatataatcgtgttagtggagtacagtttgtaaagcaaaggtgattctcttgattaaataaacatctattagaaagtttgataggcttgaatcactgatacagaagcttacatcctctttttgtccattttttctccagcttgcgaggttatgattcatcatcagatccagactctctgattcatcatctgcaatg

SEQ ID NO: 33366 - DNA, 3003 bp, Unknown
  misc_feature (1)..( 3003): 2750-1469P.txt file - cDNA_ID_3068871; gDNA_ID_1620566; Annot_ID_160716
acggacgacgatgttcgatatatgatcaacgaaggagattttgatcgagacggtgcgttgaatcagatggagttttgtgtgctcatgtttagacttagtcctgaattgatggaagcgtcacggtgtgttgtgacggaggtgatcgaggaagagttttaccggcattgatagagaaaccttcttatgcgttagagactttgactgaattgtttacacaaaaaccaaaatataatttaataatttattaatgttatttttattctctctttgatttcccattattgttgaggtggtccataggattgttggattaatactgaattactgatatgcaaaatttgtcgagagtagcgaaggaaaatcttaactgattctattcttcttttattcaaactttttagtttaggcttcgtcatgtaaggatcgatagataagaatcattaaccaaaaaattattaaaaataaatataaatcttcagagtgaaaaagaatataagtgtcaaaaacattttggcgatttttgttttgaaaaaaaaaaaaccccactaaaacattaaaccaaactaaacttaagaaccaagatgtttttataccattaccaaaactttaacctaaatattgaaccaaactaaacctaaattggctgctcagttaaatcttacgacctgtttgattagcattttagaaagctatgagttgctggcaaacaaaaaaacccaactccaagtctaatatacatcataaataagatttaggctgaccatggacttggagttgtgtttttttttgttattggatagaaatagcattaataaaggaaaagcaaaaaaaaagaagagatttattttatttactggatggtaagctacaaaatctttataacaaacgtcttaacatatcattcatcaaagtccacatttaattattagaactcttgagtgtagtgtcatctttcaaccacctgatcatatttctacttttcattagttaatttctttataaagcaaatatggttgcacattgcgagtgattcatcatttaggctaatgcgtgtagccatgcagttcctgagatcctgcgaaaaagaccaaatcatgcatgtacgtatcttaagcgacactttggtcaataaagctataaaaagccgattactttgtttacacgaaataccagcagaattaggggtgaattgatcatcataaaaaaaatggggtgtaaaagcgaagcatccttgaaacgcaagccaactttggcatttttatcattatattttctttttatcttgaactgtttattggacatcatatattatatttttatatttttttgattaaattgttttattgtcttacaagtgaaacttttaaaagttactaaatcgaagactatgtgattggtccaagcctcctcttttggctgaaaattggaagcgactgtggattataatcatatttcacatagacttaagtaccaatgaacttaactcgtcgcaactcgcaacttgaaaccagcagaaactacaaaatgcagaattaacagaataacatgataacgatattaatccttctatctatgtcgacgttttcctagtagttagaaatgaaatactcgagtgctgacaccatgattatgcaaatgaagaaaaaataataatgcattatcggatgacacgtcaaaatcacgtcctaatttatctcgtttcataactatagtatagtatattatctatcgtcaaacaacgtatagttgtaattttatactagtgttattattattgaaaaattagatgcatggtcgtagttttatactttgatgtagaaaattaaaagtcaaaaaagtaacacaaaaaataataatgacgagagcgatgatgcaagagcttgaaatcagaatataaattggatcaagagccgtcgagaactacatccaatggctagattgtcatcttcggagatcggacggacaagacttgttgaccctaccctcggtcaatttaacacctacttggttgtcttcatcgagctctcggaccatattcgttgacttattcaatatttctcaactttaatccttcttcctaaatatcttatcgatagattcttatatatgaggaggttgagtgatttgtatggtacaaaatgttgttctgttctaaaacgattcaaagaatgagttagctaatttgaagtaaatttgtactgttctaaaacgattcaaagaattatttgtttttaatactgaaatatatatagtcttccatttatattacaaatatatttgtatgctctttcatttatagttattctcgttatctgaaacaggttagtcactaacattagtgttaagattgactaattgtttaatcatgtaatatttgaatagattaaacaccataattcatgttttgaaaaagacatcttctagagaaaacaagtaagcagagaaagctctgttttatgtaaaaattaaaaacaaattttgagagaaaacgaacatgatgatgatgagcgtgacagcaacatatcatcattattatgttattttaaaaattaatccaaagttttaattttcccgcaccaaccccacttttcttttgtatccgtccaataaccagaccaagtacccaacggcgtcgttttactttgaccacgtctaccccctatattatccaaacatttcaaatcgccccactagtttgttttttcctaaactgttacgaaacatcacattataattgagtggttaaatgttaaaatataagctctgggtgaaatttaagttgactaaatattcaaggggtttaagcaagagtttatggaaagaagaagaaaaaaaaagtaatggaaaaaggataaagagcacagatcatcttctacatctctataaatacgctttctacattttcggatcgttgaacaacatctctctctctctctctctctctctctaaacccattaaagtaatttagctcctcatagattctcgagaagaacacttccatg

SEQ ID NO: 33367 - DNA, 3003 bp, Unknown
  misc_feature (1)..( 3003): 2750-1469P.txt file - cDNA_ID_3068877; gDNA_ID_1620566; Annot_ID_160706
atttttgtttctttggttgtttcatttttctttttcttttggagaaatccatctttcataacttcaatccttagatttacctaaattccaacaagtcaaaccaaaaccataaatcaaccaaatctttatttgatgttaccatgtaactaaattctaaaataccagtctttattaaagaaacgtataatccttcttcttcctaaaaggggttcattaatcatacaactccttcatgtttaatgcagaaaccactcaacactcattcatattacataacccaaagaaattcatcaacattgtcatagctaaagaaagaacacacattcaacactcctctgaacattccgctaacacccctacttgctttgtgtaccttattaattccaaaaacatgaagaagataatcaagagacaggtagaccatataagcttacagatatcgttgatgtgagttttatattacctagaagagaagagggtgatatattacttagatcccacgaatcatcactcatctgtgacagaaatacaggaacaaaaaaggaataagacattgtcatttggtcagatcatagatatatctactggaataacactttattcacaacacacatttcactgttcgaagatacacagagagggatcacttaaaatatcatgcagattatacattgctagtcgtgatgcagtatggtggagataacaaatgtaacctatagataatagcctttttaccttatcagtgtacattcagatctttttacaaattcactaggtagctccgatcttgtaacgtataccaaatgctccagaactaacaccagtgactatcttacagaagaagcaatctacgaaactcagtaactttatttgacaagttttcatctgaacttgtcataaaagtaagaaggtagtgcctacatctcagttagatttgatatctaaacattacccaagagtatagataaaaaaaattttggcatgttaaccagattcttcctacatattcccattctttcctaaattttcctctgttaacattgtaacctttcctagtctggaccaaagcaaacaacaacaaaaagtataattgaagcttcctttttagaactactgcactatttgattttcaatgtttcatacaacaacaagtatacagtcaccaacttacgaaatgaggggttatagaagacataatttcttatctgccttttcccaagtcaagaatcataatacttggatgctaatgatacttaatgttgcctcaaactaaaccgaacagaggaaaaataaatcaaacaaactcacttagaaaagtttatcttcaagggtcaaaagaaactttcctctggactagagtacttttaatctaaagtctaaacgcaatcaatgggtagtgtaaacaatgcaagaaatagaacgatgtcggcgcttctttgtcccatgtgtaggggaacaataatcttctaacatatattacagcaaattagccataaccaccaaaaattatgatatatactatacaactaacttcagtaaatagaaacagtttcggcagatgaagaagatatatacaaattcatagaacgaatacactaaagctaggaaatcatctatgtacatgaccatcatcctcaattttcgggtaagcaaggcaatgaacatggacagcatttctcactaaatcgacaaaatcatcttagttcagctataaaaggatctcattttcctgtgctaccatctatggcaatctttttcacaacatattcacgtgatcacaaaattcacaacactcactacactactgaatctaaatctgacacatcaacagaaacatccatgaaaaaaataacaacgaaagcagcttatctaatcaatcactgaatcacatagagatagagataattgatccctgacctttgatgtgttcatgatgagcagaagcagaagcagcaacaacatctccatcatcatctccaccagacttgacagtaacaataggcacaggtccatcacgatcatcaggatatctaaccacaacaacaggacaaacacagtgatgaacacagtaatcactaacagagccaagcttgccatcacttcctctttttttctcagcaccaaaacctctacttcccataatcacagcactaagaccaagcctctcaatctcaagacataatctctctctcatatcatgatctttcactatatggatcttataaggaaaccctaactccttcaacggtttagctagatccgcaacttttgttgaagtaaaagcatcaaaatcctcttgactaggttgaggttgagcgtttggatcttcaatttgagttttcagagggagaggtccccaatcggcaccgaagaggacggaggttggagaaacgtggagaagaacaacggcgtctccgggacggatgtagtgatctacagcccaacgaacggcgaaagagctttcttcggagagatcaactgcgactccgattttacgacgagctccggcggttggtgttggagttgcggcggaggagggagtagatgaggagtggtgatggtgagagtgacgtggagatggagggtgatggatcttgatgtttggaagctgtggatgatcggaatctgctggattcatgatttttttcagatgttgtttttgttcgtcggaaagtgggagtgagggaggtttctcttaacggagaagaaagaagcgttgtttttgtttttttaatagaacattagactgcatgccgttatttatatacaaagacgacaagcattctaatatagatgtagttaatagaaggagtgatccaacggtcaggatcaaatctgagcgccatagttttgaagaagacgattcactagatctccggcgtcggtgatttcctccacttccttttctggcagctagaagacgaaacctcactcaaattctgatctctttgtataattcgatcgagttattcgtatgattcgtatagatcggtgactcagatg

SEQ ID NO: 33368 - DNA, 3003 bp, Unknown
  misc_feature (1)..( 3003): 2750-1469P.txt file - cDNA_ID_3068890; gDNA_ID_1620567; Annot_ID_160736
atttctgctctaaaaatggtgtagatcctcttgctcaagtagccaaagaagcatgataaagtcatttggtaaatggtaacatgtttatgatcattatgcttaaattctctgtgtttcaagaaaatgcaattgtgttaacttgattttttctatattaacttcggtatataccgaataaaaggctccaaaaaatcgattttaaagatcaaatgttttattttattttattaatttatttgttagataaataaaggtagctacacagagcagtaatgttaaaaaaaattcaaatattttgagaatcccaaggaggacaaagatcaaacattccagtctttttgttcagtttgcaaggtccttcttcacgtatcttccattcgcatcttttgcatccaaacattgcagattcttggtctctttcttgtatgtatatacggaaataacgaaacactagtctccaagcaaaagtgcaaatgaatttagtatctccagaaacactgggtgtaaattcaaatgatcacgatccaccagctagcatacgtcggagtccaaaatcaacgtcttttgatgcacaatggtatgccattggccaataacctgaaagagcgttatgtatcaccactgttgtatttgggttctcaacacttggtggtgaagccatggggttttgagcgagggacattgttacacttgcacacataacgataatgagagctacaagttctgctagagcacccatgttgtttttgttttttgttttccttgcaatatgaaagtatattgaatatggactctttccacttagtactttattgtatttataataccaaactttattgattatgtttccctaacaagcttctttgttttgttgactcagttacataggttatatgttttgaataatatgagtcaaagtaaaacttaattaggtataaaaggaaatctcatcttggtaaaaagacagctatatcttattatataaagtatggatttcaaagttgctaactcatataattgttacacatgtcaagtcaaacgatcagatgtttacatgtgtcattcaaaatttaacttttttattctctaaaaaaaattgaaaattttaaaaagtaaacaaatttacatatactaatttatacgtctatatatttataaacaattaacatttattcaacaaaaggaaaattaacaaatttgtctttaactcatctaatcataagtgaaaaatataacattttgagaaaaatagcttagcttataggatttaacttttcaattattttcatttattaattttaactcatttaatattaatttgcatgatgtaaaattaacttacgagattacggcatatacaaaaaatatattttcaacaatgtttggtttctaaatatttttgtggattgttttttttaattaattattagccctatgcgtttgggtattcgggtcgggtatttcgggttcgggttttcgggtttagaagtttaggacccgttcgggtaatttaagattttgggtcgggttcggtttgggttcgggtttgggttcgagtttatttatatattgaaatatgaaattttgtgtgcaaatttattaaattacttgaaaatttcaaaaattcccaaaacaacacgagtagttttgcttgaatatatctaaaaatacacaaaaatcactaaaatatccaaaaaaatcctaatattttttatatataagtataaatataactaatatatacttatatttgagatatgtttggatacctattcgggttcgggttcaaatttttcgggttttgaagtttagacccgttcgagtatttgaaaatttcgggtacacccgcctaaataggcgggcctagtaatatatgtagtcaataatctatttataacttaggtatataaggaaagctatatatttctcaccattaaagtcacatattaattttggtaaatataaagctatatatagtcaataaaaattatatattgaaggaaatctcatcacgattatataattggtcttgagtcagttaaataaccgtacctcttaactaacagtattttcatctaaacatgaaatactaatttttatttttattagaaaaatagaagtagacatacatgctaattatttttaaagcgattgagaattccaaggaagacaaacatcaaacatattactgttcttgttcaatttgcaaggtccatctttgcgtatcttccattcgcatcttctacatccaaactcggcgaattctctgtctctactctgtttgtagatatcgaaccaatgcaactccttatcccatataaaaccgcaaaaaaacaaagttcctccaaaaacactcggtctaaattcaaatgaccaagttccatttaccgccatattccggtctccaagatcatcattttttgatttacaatggtatctcaatggcagatgacccccaagatcattgtatatcaccactgttgttcttgggttgtcgaaaccggatgttggagttggagggatgctatccttttggcctcgagatattgttacactaacacacatagtcactaagaaagccacaagttctactagagatcccatttttttttttttgttgcaatatgaaattattgtatatggatgaatgactctttcactcgatatatactgtgttaccagtttattacatttccgtaacatgttttttgttcttcatatgtggtcaaataaaaacttaaatgtcatggttgatgtatatgtagtcaactatggtgttaagcccaataagctttataaaagcccaataacattttcaaaagcccgagaaaacccgtgaaactacgtccgatccgaagatcgatcacgcgactctgttatttagaacgacgatcgcattatttttctcctaataaacaaaacgagcccgccagatttctctgagacagtgattcagttttggttttggaacctaattctctctcaagagattcagctaagatg

SEQ ID NO: 33369 - DNA, 3000 bp, Unknown; identical to SEQ ID NO: 2625
  misc_feature (1)..( 3000): 2750-1469P.txt file - cDNA_ID_3068895; gDNA_ID_1620567; Annot_ID_160760

SEQ ID NO: 33370 - DNA, 3003 bp, Unknown
  misc_feature (1)..( 3003): 2750-1469P.txt file - cDNA_ID_3068925; gDNA_ID_1620567; Annot_ID_160754
caaaaatatccttgtgtttacttatttttacaataatgccattggctttagttataaagtttatatgtatttgtctaaaatagcatgatatatttacaaaaatcatgtaattctttaaaatacatacagaatatatatacacgatatatatgtttctctgaaataatgtgtttctcagaaatagcacgaaatatttataaaaagcatgcaattctcttatagatcgcgaagtttaaaaaaacatatagaattgttacaatattacatgggtttttattggataacatgacaaatatttatttatttcatgagtttttattggatagcatgacaaatattaatatatcagtgttaataacatgttttgttcttaaaatacatgcattttaaaatcagacatttgttttaaaatcaaatctaatctcttatatcacaacgacattgacggaaaattcaggtaaaaagagaaaataaagaatgagagatagagagatttctatggaaaaagaaagagagaacatgtaggtgaacaaaataaagagatatgatgatatattttatgagaggtggtgaagattattttaggagagggagagagaaatagaaaaagaaaatgacatggtgaatctgaagaagatgaattgtgttaaagatgaagagagaaagagaactccatggctaaagtctcgtaaagaagatgaaaaagaaacaaaagaaggaagaagaaagagaaaggctaaaatagactaaatattgccaaaatttctgtagccgacaaatactatttggtccaaggttattttgtgtattcttttgaagtcaaaagttatttcttacacatactcaactataaaggggataaagtatagtgtgaattgttgacggcagaagagagaaaggtacatatttatatctcaatgaaaagataataaacgtgttaatagagacagtaaggagcgttagtgtaacaagtcagattcatggggccacggtatcatttaggaaatggaccgattcaatttaatgttgtctttaagtgcgatgtgaagagctccctaccaatcggacacctcccatgccttatgatttctctataactattgattttattcggaaatactataaatgttacacttcaatctctgtatatagttaatggaatggaattggaagaataaaaagcatcacatcaaattccagactctgatttgcataccctaataaaacatgtactaatgtaacacaatcatattgggatttagacttaatttaggaatgagaaagcaaaaaagtgtgagacaaaacgaggttgttgacgaatttgactacgatgagaccccaaaaaaaaaaaaagatgttgaccaactttttaagactgtatggttctgaatattcagatattttgggggttaaaatcgaaagatttgtatagttaagggactagataaaaatatttaagtgcgaggaggcagttgagggaaccacttctgttgaagtctgtcattttcatatatttgtaaactgggccagatagatttatagtgatcaaaatgggaccaattgatttttcaaattaggacaatatatgtcgtctctgtatttgtcattgtctattccaattctgttctggtcttgattttttcttataattttgtacataaattagcaaaacttagttttgtttccaagggaaaaaaccaaaaaaatatatcttacaaacaaaataagggtgcaaaacgtataagaaaataaaagaatgggatcaaagtggaataaaagaatattagggcgtcggtgacgtgaagcttcgctgctgggagaaaaaagctcacatgcgtattatctcagtctcagctatatttagaacaacaacacatgtctgaacacattacagttcctatatctgtttcgaattcaaatctcctgtccttttttcatatataataattcatcataaatatttattgatttgattctatctcttatatatattttcgatctctcctgaaaagagaaaaaagttggaaacttcgacgaatgtgtttataaatctttttattttctatctgtcttgatttagttttatcttttttggaatcggtctgaagttggacaaaagaatccgccattttctcctcggtctctctgctcttctcttcagtatcggatctgggtctccttcgctttcgtttcaaggtaacacaaaaaaaacttcaaattcttttctcttttattcacaccattttcgctttctttttcctttttcttctttaatctttgtgactgttctatatcaatcttcatttaacatttgcattctcatcacttatcagtattttctgatatccaatttctgggttttcgaattcgattcgataagaatatttatttcatttttttttttaatgtagtagtatatgttttttccccaaagtcacggcattggaaaaaaggaaaaacacagctgttccttgcttcaagcccgagattaagcaaaaataattactatttctttcttttaaaaaaatattcgaatcaacgcactatataaaattacctacttttgacagtatctgaattaaacatcaaccaaacttcaaactctctcctctgtaatccattctttttgtattcccaaccacgtgattttttgattcggtaattatccatattctacactacgattattaagcattaaaatttatcgattggtgaaaaaattaaacttcgtgattttggcttttgcagattattttgggagacgaggaggcgttagctgtaattcattgtatacttgctttggctattaaagccgtcacacaaaaaaagtaaaagcaacacacacacataaatagacacacttttttacgtatatgtgtgtcttctttcgtctctgttgggaatagatcttgtcctaagagatcacttcgagtctgatctaaagtgagaaactttggttcttgttttggtttttggaatcttgtctaatctggggagataatg

SEQ ID NO: 33371 - DNA, 3003 bp, Unknown
  misc_feature (1)..( 3003): 2750-1469P.txt file - cDNA_ID_3068929; gDNA_ID_1620567; Annot_ID_160753
tagaacttacgtgactcttacgtttccattatcctcgattccttataaatacttacgcggaccaacattctctccatagatcatccaattgatttctaaattacaaacggcttctctagctagctcttttttctaaaactttcacaaagaacgatctcttaatttgtggctgacatagcttggttcttaataaagaagttgtggaaatgggaagcctcaagtacttaggagttgctttctttgttttagttgtttttgacgtctgtttagcagctagatcaccaaaagctcttggtagagggtccggttcaggttctggatatggttcaggctctgggggaggtaacggtggtgggggaggtggtggtggcggagggggaggcggcggaggaggtggtggtggagatggatcaggttcagggagtggttacgggtcagggtatgggtccggtagtggttatggaggaggaaacaacggtggtggcggtggaggtgggggcagaggtggtggaggaggaggcggaaatggaggttccggaaacgggtcaggttatggaagcggctctggatatggaagtggtgctggtagaggtggtggtgggggaggcggcggtggaggaggaggaggtggtggtggaggtagccgcggaaatggatccggctatggaagtggatatggtgaagggtatggaagcggatacggtggtggagataattacggtgactcaccctaaatcattcttattgcttattgtttcatgattctgaacttatgataataatgtgttcgatgttttgtcgttacatatatatacatgcttgtatatagtagatatcactcttcttttgctattgaagagagatgatgtggacctgtggtttcactttctatattaggaatcacaagtattggcatatgtattaccatgcatatcatttccgattcttatatatatcgttactattcgtatgtttatgtaccttgtttatcccacttattgattccttccactggcactaggaaatgttttggagacgtacgtccaataaaattggaacaacaacaaatttgagtatgcctcgagtgaaaagaaaacatgcacgaactgaaaaatgataaaacgaaaaaaagaaaaaaacttgttataggactaaagcataaaacttaaagggtttgtactttgttgtacttatagcattgtggcaaccgaattcaaaatcctcataagcatcggtgtcgttgaaacaaaaaaaaaagatataactttgacgtagaagacgggctcatcggcccaatacaaatattcgtagaccacgtatcggcccttaaccactttaaggatttgccgactcaactggcaaacagaatttgactggtctgctcttcgtcaccaaaaaaagtcttccacgtgtttcttttacacgtacagagtttctccttgtataagattttaagatttatctgggcacgaaactcgaaatatactttttaaggtctatgtacacattcgtttttaaaaaggttcatgatgggtaaaactataaagggtaatattagaaactaactatgaaatggaaaagaattgagagaatgacattgtgtcagaaaagttaggtaaataacattttctgaaaaagagaaaatacaaaaatatccttgtgtttacttatttttacaataatgccattggctttagttataaagtttatatgtatttgtctaaaatagcatgatatatttacaaaaatcatgtaattctttaaaatacatacagaatatatatacacgatatatatgtttctctgaaataatgtgtttctcagaaatagcacgaaatatttataaaaagcatgcaattctcttatagatcgcgaagtttaaaaaaacatatagaattgttacaatattacatgggtttttattggataacatgacaaatatttatttatttcatgagtttttattggatagcatgacaaatattaatatatcagtgttaataacatgttttgttcttaaaatacatgcattttaaaatcagacatttgttttaaaatcaaatctaatctcttatatcacaacgacattgacggaaaattcaggtaaaaagagaaaataaagaatgagagatagagagatttctatggaaaaagaaagagagaacatgtaggtgaacaaaataaagagatatgatgatatattttatgagaggtggtgaagattattttaggagagggagagagaaatagaaaaagaaaatgacatggtgaatctgaagaagatgaattgtgttaaagatgaagagagaaagagaactccatggctaaagtctcgtaaagaagatgaaaaagaaacaaaagaaggaagaagaaagagaaaggctaaaatagactaaatattgccaaaatttctgtagccgacaaatactatttggtccaaggttattttgtgtattcttttgaagtcaaaagttatttcttacacatactcaactataaaggggataaagtatagtgtgaattgttgacggcagaagagagaaaggtacatatttatatctcaatgaaaagataataaacgtgttaatagagacagtaaggagcgttagtgtaacaagtcagattcatggggccacggtatcatttaggaaatggaccgattcaatttaatgttgtctttaagtgcgatgtgaagagctccctaccaatcggacacctcccatgccttatgatttctctataactattgattttattcggaaatactataaatgttacacttcaatctctgtatatagttaatggaatggaattggaagaataaaaagcatcacatcaaattccagactctgatttgcataccctaataaaacatgtactaatgtaacacaatcatattgggatttagacttaatttaggaatgagaaagcaaaaaagtgtgagacaaaacgaggttgttgacgaatttgactacgatgagaccccaaaaaaaaaaaaagatg

SEQ ID NO: 33372 - DNA, 3000 bp, Unknown; identical to SEQ ID NO: 2629
  misc_feature (1)..( 3000): 2750-1469P.txt file - cDNA_ID_3068938; gDNA_ID_1620567; Annot_ID_160741

SEQ ID NO: 33373 - DNA, 3000 bp, Unknown; identical to SEQ ID NO: 2631
  misc_feature (1)..( 3000): 2750-1469P.txt file - cDNA_ID_3068942; gDNA_ID_1620567; Annot_ID_160733

SEQ ID NO: 33374 - DNA, 3003 bp, Unknown
  misc_feature (1)..( 3003): 2750-1469P.txt file - cDNA_ID_3068946; gDNA_ID_1620567; Annot_ID_160732
gacacgtggcgtcttctggtttttccggttagcggaccggaaattatctcaaattaatttgaaccgaacatttttgtgaggtcgtcgatgcaatttgaggatcatgctctgactgttactacaaatctacaatattgttcgactaaatgggaaagattacattttgtcattttctattcgattatttcaacatacccaaagaagaataaagagtagttcattttgttttgaaataaattttgttggccattataggaaaacaatggcaacagaatcacgttattcttgataatattgttagccattgaagaataacaatggcaacagtatcatgttttacacgtcattgataattaaagaatttcttgccaattttggcactacacaccaagaaaacattttttctataaccttatcccaatcacattattaaaatcacttaagatctctactagatttgacctgactagatctgaccgttcgtgagaaagctacttaaaataaaataaagaaagaatgacgtacgtagaccaaactactgttatttcttgaatccatttacatggcgtttctatacttctatcttatcgacctaacttaattgcttcgaatggtagtcacattcctttggccggccagttgctggagcctggaagtagctattcacagtattagcttgtttgtgttttttttttatcaaaccgataatctcattaactcaaattctatcaaaagaggaaggattacatccaaactagaagaaattacaaccaacataaaaacaattatacgaagtaattaagacaaccaaacgatgactaaactagagataaatagacgataacaatcataaacatagaccataaaaaattgcaagacaacaatctcaaaatcttttagatctttgtcttcttggtgtgcatgcaatatatatttatattttttgaaaagaaaatggtgtggaaaatattgcaatcgttcgtacgtatatttttacaaaatattaaaaccaagcccatgcaaaacacatatacaccaaagtcaactttctttttcaaaagtcaccgaaccagaggttataaaactttcactcaagaagaggaaccagaactcggaggagcagaggaggaagaagaaaaaggttcttgatctgcgcatgacagcttctcgtgaggaccagcttcttctcgtccaacacctatcagatcaagataatacaaataatgagaaacaatgttgttcatctcatcgttatcgaatccgctgttgcagatttgatcgccgtaaagaacgtttatggtggctccaaaccccggagttcgttttgcagcagtgtcattctttgttggcttccattttccgacgaaaacatcgtgcgccgacggtaaatgcttcttcggtggcgtcatccaccgccaaatcgccgcttgaaacgctaacgtagcattgttctcgagatactctggatgactcagtagatccactttcaaagcctccccggtttgaccataattgtaattcctaaaccagaccaatgataatgaaatttaaaccgagaaactttaaattagaattaaccggaactgtttaatctaaacaacgtaccagtaaaccggtaaagctcctcgaccgtggtacgagacaccaggagtacaaggatatgtcaatttgtagtaatcatcgcaataaagctgatcaggactcatctccttgttgtaacacaatccccaagctaatggtccgcctgttgcaaccccgtacccgcctttaaaccgaataatcgtaacggttattagtgatttcaattcccggttaataataaataaaccggtttggatcgctctaaaattaaacttacatgaggttttgctcccaacgtggccaagaaacgcagcgacttccttcatcccttgaagtttctcaccagcagtaccgaaaccaagaggctggtactcggcagccgcagtaatgaatgatcggtaatcccaaaagccgacggcgtgagccactggactgttacgcttagagaatagattctcgaattgatatgtctcaaaaaaatcggagattgtatggttgcaacaatactcggaccatcctttgcattcccatcctttgtcgcataattttttacctttcacaatcttcaccagaggctttctcgttgaactcgaaggctcggaatcttcagcgttgacaagggttccggtttgaaacacaaccaatgcaaccgtgagaagcaatagggagaatagcggtttcgaaaccatggttgatttttttttgtctttttcttcgtctatcaatgtgaccattgtatgtataactttatatacaaacatatatgtatagagtagtgtcgtgttcgttttaggaggaattaagttttcggaatttggtggtaggagaagagttgcttttcgtgagtttttttttgcttggttttgaagtttcttagagtggaagttacatgttaagaaaattggtcgaagcatgtacacgtagaactgtaaatgttttaaacttcatttttctaacaaaatggttaatctattttaccaaaataaaataaaaatggttaatctattgcaacacctttacaattagatttttttttggtttaggggacggattataactaatgattgggaaacaagtttgagatagaaattggaaatcgtttattggagcggttttgttgctgctagaatactttggaactaatttaaccatatattttttcttttccaggctatgaatgtcaatatatttagatattgaaaatgtttggccaatcttgaccttgacaaaaaggaataaaaacaaagaatcaaatatttgggacgtcacttcgaatgagttcatgttatccgcagttgcatcagattgctcaagtcatttcaataacttaaccattatttttatattttttgtcaaccaataatttaaacattaattaacccaaaaaataaatacttggaactaataagtggtaagtaaatg

SEQ ID NO: 33375 - DNA, 3003 bp, Unknown
  misc_feature (1)..( 3003): 2750-1469P.txt file - cDNA_ID_3068965; gDNA_ID_1620568; Annot_ID_160795
ttttctttttttcagtgtaagttattttatttttactttcattagttaaatgcaatcaaagtgttatataactataacgaaaattaaaaacacattagatattttaatctattttatatgaaaaaatgtagaactacacttgtaatgattcaaacaactacttagattaaatgacattaaatatttaaagataaattaaatccatatataatttagatttttagctttattaataacaacaaaaacaaaacaaaatcgtgtattgtaaccctcagtcgaattctctatatctagtgagggctttgacttatgattagaatccaaagagaaattaatacagaagaagacgaagttataatgaaaattgaggagcagcttttttggttagtcacgtcatgtgaagaggaagaagatgaaggagaaggagaagaagaagaagaagatcattaattagggagagggtcacaatgcagtacgagacagttcactgaatctgtctatctatgtaaaccccacaaactctcacgcatatcatagcttctgatgaatacaaacaagcctcgatcccattaaccacagacttgtccgtctcttcttcttcttcttcttcacactcatctttataattaacacacacatatgttatatactcatctgtggatgtgcctatactataaagacatgtcacacgtggtgggttatctatgtaactacgtttttgagtgcaatatgtatctatttacacgatactttactgttttcttttaatggatagcattagaatgacttgatggtctaaccattaacattagaatgacttgatggtctaaccattaacattagaataacttgagtccatcataacttggtttaatagttttttttggttgtgatgttacgccacaagcacaaattctgggacctttatattgtgtgtataaatgatatttgaatacagaaattaatatttgtagagattcatcaatgatatatttgcttttgttttttgttcatcattaaatcaaagatcttcgtttaataaaacttgtgtttcatatttttaaataatttataatccagatatattgtactatatacacccacacatgtataatatgaatgtgaatgttgaattatagattgaaagtgagtgaactgaaaggacgagagaggcctaagacagtttgtttgttttcgtgaacatggagcttctctttaccatgtgctctcgatctttttattattaatcttacttttatttacttttttcacattttgtttttatacggttttttatatgagaatggcactgaagatggagcaagaagttcacatgcaaacataaaatattacacataaaaaaattgaaaagctacattctaggcatatgcgtgattttccaaggatttttgtttcgtataaataatattagcagtcaaagtagctagatttgcttctataaatatactttcaaatttcacccctttactttcagatttgtcaatttacgccccgaaatggtgcccttgatagcaaacaattatacagtactactatgagaacgagaatatatctttaaaaattcgaaaagctccaatattttcggtcattagttcataacttcatcatattcataacaattaccgcgaatagcccatccaattattataaaaattttgactatgtaaaagcgttaatcaaaagaataaacgtcatatcaaacgtaagacaaatgtgaacacatatgacaattattaataggcctacacttgaaaaaatgagattactattcacaaacattaccttgatttaagggtcaaattgaaattaaaaaaaaaacaagtgatgctgaatataaaattaaggcaagatctagacgcaatttagtagaatatgcgtacacaatagataattacgtacgcctgtgtatatacgattaattccctctcaataatagttcatcattattatgtaaaatataattataaaaatatatatggcagacagaaaaataaagaaagcaagaggggtagacaaatgttcatccgttttcgtcgagacatgaaatttgtgggatcaaagcaatcctgtaaggaaagggaattaatcaatgtatattactctctttttgtttgtttctcaattagatgaatacatttttcatttatataataactaagacctaaactcttgagtccattactccatttcccctttgtttttttccaacacttcgaaacacagatgtgctagattatatatgatcacctaatgcatgatttatatataatatatgaaaaagtaatataaaatagccagaaatttaatcttgttatgaaaaattgaaaatgattcgagtaaacacctagatggtcattttagactgatatagtaatatctcaatgtatcatggtatttttttcgatggacgaatctgtctacatacaatgcacgtatacatggatgttagaaaccgcaacctctagaactatatgacacacgaattgcagaacttctaaaagttttactgcagtaaaatatcaatcattaaaccaaaaagtctcctataaaagaaatttgattattgattatatgattttgagtgaaactttcttagcagttagcagtaccttttcttttttcgtaggctaaacttaccaaaataaaaactacatcggttcatgtcaagtcttgtaatatatagctaatctagtactagctataggctacagcaaacaaaaatgtttttattatttgtcacgagaaaacaataaaatgtgttatcaaactaaataaaaaccatatattatactaatcacaaattaaacgggaatcttttatttaattaatagtatactctctcacacagacagacatctctggatttatatataaatacagttcatcttctttaatccacaaactcacacacacacacacacactctgttttcttcgtccattctattaccagaaaacagagtttgatagagagaaaagaatg

SEQ ID NO: 33376 - DNA, 3003 bp, Unknown
  misc_feature (1)..( 3003): 2750-1469P.txt file - cDNA_ID_3068969; gDNA_ID_1620568; Annot_ID_160791
atacctgatcgcgggatgaatgatgattcgtgattggttgaattacttctcccacatcctctatgtcagccccaatcgatgatgatttcagaacacaagcggagaaggaagagattgggggcagtgaaagcgaagagcacctaggaaggttttgatctcgacctaggaggaactctaacatgaggaagaaaccccaatcaaagaatccatgtaccagacaaagagatgagagacgatcaacttttgatcaaagacgaaaagagacttctcagatttttcagagtacgacacggtgggcttcgacttctcgtttccattgacgacggcggagatggcgacagagagagagacgattgagaggagagatcaaaggattctcgtttccattgacgacgatggtggaggaagaaagcaatcatcaaagacaaagaagcttctcagattacgaatgaagaagacggagaatttcagacgacgacgacgcaaggtgggctcacggtggtgggcttttttttatgggccccttctttgctaccaaatccaaccaggtatttctttattcattctttttcttctttttcttttctctaaaaaaatgtttttggtaaaactataattaaatagtttaaatctttcactaaaacatttcaataaataaaacttagtataaaatcatattaatttcattattactttttaaaaatgagtttaagtgttaaaattttaaaaacgtcggaaactaactgcgcctacgcatcccgtccttaattggtccgtaagtcttgcggtgttcgaagttcggcaatgttttcacgtaatatagatttgacacttaaactcattttaaaaataataattatgattttcactaaagaaaaagttttatgcttgaagctctcgtcggtcgctagagctgaatttgatttgagggagatggaaagagacaaggttaatgattttgtggttaatggcaagattaacaagttaattaagttattatcaaatagaggttcgtagcgatggaggaagagagacagataagcttttaagtagacaagattctgatgcataaagatgtacaacttgttcttggaagatatgctatgagactcttttagtgatgtcctcatatttctttgccttaatccctttttctaaaccgtcaaaagattcatggtttggaaacttgcaatagcctctggttggttggttggttgtttcaaacgttacactcacaaatataacacaatttaaaaactaaacaacggtcaagaaaagagggtttattttaagagtccattcaacagatcactagcactgaactttgtttaaatattcttttaaatctatgtggacctccctgttttaggatcccatatagtaactttacgagagcataacgtagacgaaccaacactaaccacaagtataagagcattgttcgattcaattacgcctatttggtaccagagatgttaaagtgcaacatggaaacatgattgaatttttctcaagctaagaaggtctaaacaaatgctaaaagaaaacgaaaccaacaaaactgtagagtgtagaaaaaaacatagggtacacatgttataaaccaaaactattggggtatatacttaaataaataaaagtacacgatagggaacatttgtaatacacagaacttaggggtgcatacaaaaataaaattgaaaaaacagagcatagatcagtgatccggactctgttttggaagatctctaaaaagcttaggatcatcatcggcatcgcgcagatagaaaccatcatcgaaattctgcgaatagctcacagcatcgtagtgaaacgtaactaacgttttcgatttattattctccaatccgcaacttctaaccaataataatcttctcatcaaatcccttaacttcggactaggtcttgtcttgttgttgtggttactgattcgagcgtactctgtttcttctgtatggatgagacaagataacggcgaactcaagcatcgaccggtggagtacgattgtctacggttgtcggcgagaactctatccatttcttgcaaaaataaaagagagattgttttattgattgagtgagaaatatggggtttataatcgacgaaagagttagagctaacaataaatgaattaccaagcaaagttggaaaataatgtagattttggctggttatggttaagcggtccaatcataattctcgttttttctttggcagctcataatttctcatttatgggaagcattcatttattgaaacttggaagttttcactagtcattagtcaacattttttggttgtaatgtacctacctatcttcatttggtagtaaaattgtggtacaatgtcaatgtgaagttattagttttaactcctgtttggtttcatcaaatgatataaatttcattgtttcttttgtttttaaaagaagcgtaaagttaaaacatatttggtttagtgaacaagggatcagacttgccagattacgtggtcgtagtatttggggaacaacacacagagctacttcactatcacactatatcttgaacgtgtcgtgtttgttcttgggatgctctcttcgaacaagttatttattatgtatccgtgactcgtgaacttgtgaggcccattacttcataacagttttcggtaaaagaaaaaggacgaaaaagaagagttaaaaaacgctagaaggaggggtcgaacctccgaccttgtggttaacagccacacgctctaaccaactgagctattccagcttttgttaactatttcaaaaacaataaatatattcgtaaacagatgttttaatttcaatttgacttgacaagattaccctttggcacatcgattaacatatcatcgactttggaacctcacaacataatcgcatgtagtcacacttagtcaaatccaaacccaaaaaatctcaaagaaaataagaaaaaataaaaataaaaatgaagagaataagaataatg

SEQ ID NO: 33377 - DNA, 3000 bp, Unknown
  misc_feature (1)..( 3000): 2750-1469P.txt file - cDNA_ID_3068981; gDNA_ID_1620570; Annot_ID_160831
agtaatcgctctgttgctggtaccgcctatctcacgcgtagtgtaaccctgcggtgccgctgcaatatgtgctaactgctatacttcctgctacacctacgctccgtgctgcaccgccggctgtaccactgccattgccatccgctgcagcttaggacaaattggcctgagatgtcctctctccctgcagtggtagcactccctcgtctcagctcgctgcgtgcaatccgccaccttgtggtcaaggctcccacaagaaaaacatcctgcacgaccaccctgtccagctctggaaggatgatcccacttcctcttctgcccctgcgcaggcttgccgcccttgctaggtgccacctgctgctgagtcttcttcagttgtaccgctggactcactcccaccacctgcctctgaaggttctcctctacctcagcagccgtctccaccagtgtcgccttcatggcgtactgcgacactctacaccgcaccctcaaatccggtcaaagtcccctcaagaaccttctaatttgggtctggtcatcctccatgcccccacccgcatacaccaagagtcggttaaactcccggtcatactcccgaaccgaccgctcaccctgtgtcagctcaagaaaacgcgcctccatacggtcgagcgcctcctgcggaaagtacttggcattaaactcagccacgaaatctgcccaagacatatccgcctgcctcctcctggcagtcccactccgccaccacaaatgtgcatccccctctagaaaatgcactgctagatccacccgatactccgccgggcatctgctcgaaccgaagttccgctcaacccgcgacctctaactgtcggtctcctcaggactagtaccaccagaaaaatacccggtgccaatcctttgcaagtgctccatcatcctcaaataagatggaacctcctcagcaaccgcagccctctgctgcacccctgccactcgtggcgccactggaacctgcactggtaccacacctggtaaccgctccaacaactgtctcagtaggcccgccaaaccaacctctggaacctgggctcctctggttgcggcacccatcactcttgggccctcagcaccaacgacatgcacaccggcaccgacaccagctccaccagcccccactccggctgcaccagctatatcggcaccaagaccgttcctaaccccaggctccacaaacccatgctgcgaacccacactctgctcaactgtggcactgtggccattactctcgccggtaccctcgaggactcgtctcctaccgcgaccacgaccacgaccacgaactccagctcctctacccatctgcgctactcaagaacaaatggctaagaaactaaaacaaacgaatatatcacaaacaacttaccgtggaatctcatttaaggctcggagaagatgaagctaggactccaacaacacacaattgactaaacactccataatcaatcctcaatatgctaacaccctagctcatcccacatcaatcatcaggaaaataattcatcaattaatttttctacacatcctagaaccgtaatcgctctgataccaaattgaaacaacccgaccccatttttttttttttttataaatataattaaatattcccaaaaatatctaattaaaccaaccaataacataaaaattaaaccgtaagtcaaaaatatcattttatgaataaataaataattcgaccaacaaaaccaagaataactgacaatcctaaccggtttccaataaccaaaaacaccaaaaataaaacaaacgagttcctagatcatcctctcttccttgccatgattccacgatcatactttatctttacctgcatcaacaacacaatgagatgcgtaagtattatcataaatacttagtgaggcgatcctcccatctacgagctatacacacaagcaaataaaaaggtataatcacgaatacaatacaaacaaaccagtcattgaacaattcacccaaaacacattcaccacacctacataccatcacacaaaacaaatcatacaacccaatcgctcagataagctcatggtcacacactcaccttaacaaattgatcgtaacaataattaaatccaggagagactctccttgcgtctgaaacattccagaaacgtcctacaacaagtccacaaccaaaagcaaccttgaagcaaactgaacaggaaaaaccagaaacaagcagtctcaaagacgaaaccctaaaatacaaaataaccgtttactattcaatcgctccggtgaaatcttatccgcagacgtcacaaagctgcccacaaaatctcgtgccgatcggaaaacagacgagaccacgatcttagtttcaatctccgctggtcccaattcgcgtctgagaaaacgtgtctcacgaaactgcgaataactcaaccaatattaatacaaatccagttctgtaaactggagaataacgataaacgacttgggaataactctaccaaatttcgttaccttttaccacgatttgataagacgaaactggtttctcccaaaccctaacgattctgctccttctccctttctctctttttctcctttataaaacgaaaagtggctaactaaagccctaatttcgagttttcttcttttataggcacactctagggtttccaattaacccaaccaattaaaccggatgatttaaaaacaaaccctaaccgattttctggttcacgggcgttacagtaagcaactgtctacataacaaggcatgaatgaccttacccgaagtcgcaaccctactaaccggcaaatggaatagagatccaaagcaagactgaagaataatatctaattcctctgtcccatcaaaaaccttcctgataaaggatagaatatcttgtctagagtataagtttagccttcccctcggatattgatcggtggcgaagagtctatttggaaattttgaatcccactaagaagatg

SEQ ID NO: 33378 - DNA, 3000 bp, Unknown; identical to SEQ ID NO: 2656
  misc_feature (1)..( 3000): 2750-1469P.txt file - cDNA_ID_3069038; gDNA_ID_1620572; Annot_ID_160882

SEQ ID NO: 33379 - DNA, 3003 bp, Unknown
  misc_feature (1)..( 3003): 2750-1469P.txt file - cDNA_ID_3069042; gDNA_ID_1620572; Annot_ID_160881
cggtgatgatgactccggtgacgattttccggcgatggtggcttcggatacgattttccggcgataatggctttaaaagtagtggtggttgtggtggttgtggaagaaaagaagaaagaagagagaagatgttcatgcagaagaaagaagaagaagaggatataattgtatttattacatataatatacacaatatcaccttatggtttttgaagtgttagtttccaaattattaaatttttttaggttatacttgcaaatttcccttataatatttacaaatggcaaaaaaatgattggaatgactcagaactctatcaaaaacgtttacttagatttaaactagctagtagtataaagaagaccactctatttgtttatttcctagtaaagtaacgaattatttcttcttgagattctcccacaattgtgtgccaacatcaaacaaaacaatacaaaagtttataaaggcatgactaaaaatgttatgaagttttgaccattgtatttcacatcatgaagttttcttgttaagcttgttttagttaagtatttcatgtattatttctcaccacgatacatctaatctgacgtactgaatttcaaaacttttgatttgtagcattttatctaataaattacaagttaattctacaaaaattgaaacccattccatcgaatgcgtggtttaagtcccaaatttttatcttctagatttttaaaatttttaattttaaacaaaattaaaataaaaaacgattttacaagagaaagtttttgccttttcgagaagaaccgcaaccttcccacaatctagaaatcaatctccacttctcaacaatggaacaaaaatcttttatatctctcgaattcaacaatggaacaaaaagctttccttaaaacaaaatttttttatgtcaaaccatacgagcacaaaagacagataagtcttttgttattctatatttgatttgagccagaaggaatatctttgccaaaacgaccaaaggcaaagcccattttgtgattgccaagagcaacttatcagtaaaaggttaaaacatagtcaaattaaaccggtaagtgttggactttggaatccaagataattaccaagagaaccaaggattccaccaaataaaaatatatctattgttgtagtttagtatacaaataaatattttattaaaataatactaaattagtaactaatttcatttatcaccaaagtgattacaatagaataatctataactttttgagtgcatctataaaaaatgtcacttaagtaatagccacaatccattagtataaattttcgtttgttgaaaaacgaaggccactagggtgaaagatgattatgctaaggtatattcacatcaaaatatatggtggttctatcattttcattgtagttgtgttcgtatataggttaggttagttaaaaactatttaaactttgtcatgaatattcctatataaaagtgcatatttgaccataccaaacccatacatacctaaccggctaaaccccatttgctctaacaaaaggtctacggtgacaacaccacacgcacgcatatgcaataatagtattaactattaagtatatgaaatacatatgaatatatgcttcttctttttttgttaactagggaaaatctagaaatctagaccaatgcctaaactaattttcgaaatacagaaatcgaattttctttccactagaaacgtttacgggtggctaatctgtgactgtgagacatatacatttctcatgatatgttgatattaagtgaggttgaggctgtgtcaaaaaaaaaagaaaaaaaaaagtgaggttgaggttttgaatctaagcaaagaaagatcatacacaaactccattgagatgcaaatttatctctcctaatccacttagatcatcctcaaggacgtatacataatgtattatgaattagatatttcaccttcgtgtccactacacttcattggtaacaaatactctctctgaatttgaggttttgagttttgcacatctattaagaaaaagtaaattttatatttttagttattattttgttagtttaataatattattattatttatctcattcttttattggtcacaaactaaattaatgatgatacttttacagaacattaatcttaatggaataaattaaaaattcaaaacattaaatttcttggaacagatggagtatatcattaggactaatgattgcagatagtgtgtaatccaactatatcatttggactaataattgcaactagtgttttaagaagaataagttctagctagtaattataaatgacgtttatcgagatatcttggataatggaattaaacttttaagcgtcttccttgtatccaatgaatttttataattttatcaaattaaacatgccagttttaatgctattgtcatcttgttgttataaaaatatcacactccaaaaagattgtaagaatccttaaatatcaaaattaaccaataaaaataactaccatcatggttgacagaaaaaaaatttaactaccactcggttcacaacaagcatatgatttactgcaaaagctcaccataatatatatgaatcgtttccgtgactttttccaaaacaatataaagacggtcgtaaaactttatcatctgcgtaaattgttgtaacaaagtttttttaattgtttctatttatgtgattttctaattttagatctattatatttatcaaaactttagggttttatatgtttatttttgggttttttgagttatgagtccatgagtttgctcaatttgagcttaatactgaaaacacggttctgtagaatcgaaaaaacaaattcggataaaggatatatcacataatatttgtttcgtttttcgttgttttgtcgacggatcatggaaaggaaatgacaagttttatggataagagtgattttgcaccttattaaataggaagtcgctaaccatg

SEQ ID NO: 33380 - DNA, 3000 bp, Unknown; identical to SEQ ID NO: 2660
  misc_feature (1)..( 3000): 2750-1469P.txt file - cDNA_ID_3069056; gDNA_ID_1620572; Annot_ID_160870

SEQ ID NO: 33381 - DNA, 3000 bp, Unknown; identical to SEQ ID NO: 2659
  misc_feature (1)..( 3000): 2750-1469P.txt file - cDNA_ID_3069062; gDNA_ID_1620572; Annot_ID_160868

SEQ ID NO: 33382 - DNA, 3003 bp, Unknown
  misc_feature (1)..( 3003): 2750-1469P.txt file - cDNA_ID_3069070; gDNA_ID_1620573; Annot_ID_160916
aaatcaggttggcttcaatgagaatgcttctctggtctaccaaacgggatatggatacaaccctcaaatgccatatgggccatattcccctgcagcaagtcccttgccttctgagggacagttgtattctccacaacagtttccgttttcaggggcatcaccgtattaccagcaggtagttcctcctagcatgcaatatattacttctccaactcagcccgagctcaccagccttgtcggtgttgaccaacaaggtgataacatcggaccacgccaatcctaccatcctcatcccattggaccgtttaatggaaaccagccaaaccttggttttcctgaatggcagcaaggttttgacgggggaatatggtcggattggtccaagccttctgatatgcacaggcattcttcttctatttctccggctttatctcctcagccactcggctcatatggatcatatggccagaacatacccatggttggttcacttttcttatctactcttatccgacatatggatagctttcttctattcatggttacatattggattatatgttaaaagtagattgttctttaatttgtcaggggtcacagcgacagagatcattttacggttttggatctggttcgaactcttataacagaggttatatgcatagtggtggtcgtggccagggttctaactatggaagtagactaatttctaatgtgggtatgggaaaccaaggctggattggggttgacaacagtcgagggcgtggaagggttagtgatccatctttgggtggtgcttataatggtacttttgatatcctcaatgagcaaaatcgaggaccaagggcttcaaagcccaagactcaggtcttagaggagcttgattctgctgctgattctaagaaaaataacaaaggcagtgcaaaggagcacgaggaatccaacaacgcagactttgtcaccgactacactaacgccaagttgttcatcatcaagtcttacagtgaagacaatgttcacaaaagcatcaaatacaatgtatgggctagcacccctaatggcaacaaaaagcttgacgctgcttatcgtgaggccaaggatgagaaagaaccgtgtccactttttcttctgttctcggtacgagtctaatccttgatcaagtgaaaaaaaattagtttttcttctttttgcagattgcttacgggtttgtaaattcaggtaaatgcgagctctcaattctgtggtgtagcagagatggttggacctgttgattttgagaagagcgttgattactggcaacaagataaatggagtggacagttcccagtgaagtggcacattatcaaagatgttccaaacagccagttccgccacattatattggaaaacaatgacaataagcctgtgactaatagtcgagacacccaagaagtaagtagcaatttgtgcctatcaagctttcttgtccataagatacctcttttaagccacaccataaccacaaccaaaaactacaggtaaaactggaacagggcatcgagatgctgaagatcttcaagaactacgacgctgacacgtcaatcttggatgatttcgggttttatgaagagcgggagaaaattatacaagaccggaaggcaagaagacagccaagcttgccatctgcaggagtagtagcaggagaaaatgaacataaacctgcttctgctgcattacccacagacttcatgaagaacatgtccaagagttttgcgcaagttgtccgcttggacgaaggcagcaaagaagcagtcaaggccagttcatctccagatgcaattacaacagcagcagtctcttctggtcaatccaactagtaagtaaaagacatcaattagcaaagactatgttttcaaattccataatatgatcttttgtttgttctaagaaggtatttcaaatgaaattttacgtctgaccgggtctggtttttgtgtaaagtaagcctctttcctccgcccttttctgcttcaggggtatttagccaaaatttgattcatttccctcttttcaatgttctataataccctcactcttctgagttgatagaagaagaagatgaagaagataatgtatgaaagacaatataatgtttctcttgtaaagttggcctcatttatctttgcaggcagtttttcaaaataaaaatgcagattacacacatcaatcaaattcaaagctctcagctttccacatatccaaagtttgtttctttgtgtgttttttctacacatatcttagtttttgagagtccgattgtgaacgtgacaagaaagtcaatcaatgacttatccatatgaatgaattgtcatcaaaagggacactgaattgtgtggttcatactcatagcatgtcaatatattcgtgaccctttttacaagcaagacagattcagatttgtgagatgttatgattcactaacaataatgtggctaagggatcagttgtaattgatattatccatttgtgagaaacaaataaaatagtttcatataaatctaaggactgtctatgtcagtccttagtctattttgccatatttctagatctaatcgggttgcattattacgtagatagatatgatctacttactgatgatttttttttttgaaaccttaatgtataaaaaaatggtttaaaagtactaaccattgttggtccacaaaaataaagggaagaaaggagggccaaatcgtaacattaataaaaaaggggccaaactgtaacaacaaaaaaacaaaaagggccacaaagaaaaaagagagaaaataagaagagtcccggacaggaccgagcttgaggattcgttgttgcctttatgactcagccaacaagaaccagactaatcctagtcctagtcctagtccacgcgcgaatatacaaacgtcttaaagccatttgatagaaccgatttccaagggttttgctcagaaaaaacacagagagagattttggaattcgatg

SEQ ID NO: 33383 - DNA, 3003 bp, Unknown
  misc_feature (1)..( 3003): 2750-1469P.txt file - cDNA_ID_3069086; gDNA_ID_2936568; Annot_ID_194683
aggtttaagtttctttcttctgtttaacactcattattttcatttttgagctgtaagtacttttcttttcgtcaattaggcttaaactttttatctatgatttttttctaagtattgcaaaggcatcatcaaacttaagaaaaaataaatccatatacttccgtgtatatttcaacgtatgattcgattacttaactttaacagaaggtgtgcagtgaggaaatcatgaaagaaatatcaaatagtactagaattgatttttggtttgcaagaaaaataaaatgaagaagtaagaatataaatgtaggtgatggttttggcgtgcctgcttttgagggcaaaggcatgactccattgagttgataaaagtagtttattttctttctttttctttagttgaacttaaaaaagtcgttgatctattattttcccacatcatctcaaccgctcaccataatgagagaatctcaatgtcacacaaacacataatcgaacctctaacttttgtatacataacaaactttattattcttttatcgagggaatctcgttttcatcatccctatgttcataatatatctcctctaccatatacatatgcttgatagacgtcatatatgccatacatgttaaagtagttgtgtatatattaaagtagagaatatggacattgcatatatgtatggcaatgtatagataatcgatatacgtaaaatacgtgaaagcaatgcatcagaaaagttggttgagcaaagaattggatacggctcgagatggcatcacatgtattggaaaaagtggagcaatgtgtcattataatccaaaaccctcaataatgtgtgtccaattctttactacttccataagcttacttaatatccaatttgtttttatattcttacattaggaataatggattcctctctcgagtttagatttcagaatgcagctctttaaacaaacaattttgcggatttgaagtattatcaaatgtcttagaaaaaacattaatttaaacctcttctaacaaaccaatgtaacttgacaacaaccaattagtataaaggagcaaaatatattattacaagaattagaagcaacggtggtattcaacgatggaatttatacgcgtattaatataaataaatgaaagattttggtgggggaagggaagttgatatatagatcaatggagctcattgtcaacattcaaacatctcattacttctatcggaaacacacttaacaaagactttaatttccactccttctcgcacctcattgttacaaaacttctcatttttatttattttgtctactccatattccacgatatttttgaccgttgcacttgaattcatgcaccagcatgtggacccacctaatctatctgataaagttataattgagtagagcagcaaaaactcatacgaattttcaagtctttacacgttacgtggatccaaggcaatttgtagatcgagacggagccgtaattatcgaggactcatataaacaatattattaacgtataacgtagtataaaataaaagaaacatctccattatatgggttactcactcatgtaccttcacctaatccttctgacctatccccacgttaacgtttcattttggaatcagatgccacccacaactaatctctctttccatgtttgatatgaatcgtatttatcctctgtcgatagctccaatttgactaagttgtcatatttaaattaattaactagtgtgttaattagctgccaagattgattaacatataaaatctttgggtgaagataaggaatcaacctcaccctcccacccactacacatatgaacagaaaacaagtgaaatcgataggtctttctcttttctcaatataaatatggatattaattatacaataaccataatggaaattaaaaaaaaaaggaaatgtgagaccatgagaagacgtgaattcactgtcaacttttaagagaatgcatgaaaatgtgtagagagaaaaaaggggtcggcaaaagaaaatgaatggctcttcctctccaattccattacaccacatttctccgtggatttatgtcaatatctttgaaaattttgtgtgttttgagtatagatgtgatataacaaaagaaaatgtcagaattgtaatgaacagaaaaataaatggtacccgaaaaaccaagaaaaaaaattaataagaaaaatgttgacaggaaggtagatgtgcggttgtattatttgcaatgtccctctcttgctctataattacacaaacttgtccaattcatcacacttccccaaccaaacttgtttgcttcatataaattattttataaaaagtatataatgtatgcaggcagagacatgtgtgtgtctgtgtaggctactagctacctctctttttcataaattatatcgattgattccgtgggattatgacctatgtgagactgtgacatttgaggtttttttggccctctgtgttatgtactcatcatagaatgcgacatttttttatttatatatatatgattaatgatcaatgccaatttgggaactctagtaagtatgcttttagtggtccacccccatttctagtcttatcttttcgataatttcgtttctcatttattccattctcaacaatcttgcctgataataccaaccaatcaagtcagctccattttttaaaaatcttagaataaaatctaaacaacaacacacagtgatagagaacattcggctatggaattagaagttgcctgcatgtttattatctgtctatctgatatggatccttgaaacaggcccatttcgagatattagaggcccaaaacgaaaataagaaataagcccatgatacgatgtgtgtaattaattaacacaaaattgaatatcattaagttaatacttttatcagaacaaaggcgaagggttttagatatcttatccgcttgacgagtagagttttcgaaaccagcgagattaatg

SEQ ID NO: 33384 - DNA, 3003 bp, Unknown; identical to SEQ ID NO: 33383
  misc_feature (1)..( 3003): 2750-1469P.txt file - cDNA_ID_3069086; gDNA_ID_1620573; Annot_ID_160896

SEQ ID NO: 33385 - DNA, 3003 bp, Unknown; identical to SEQ ID NO: 33383
  misc_feature (1)..( 3003): 2750-1469P.txt file - cDNA_ID_3069086; gDNA_ID_2936568; Annot_ID_143732

SEQ ID NO: 33386 - DNA, 3000 bp, Unknown; identical to SEQ ID NO: 2670
  misc_feature (1)..( 3000): 2750-1469P.txt file - cDNA_ID_3069096; gDNA_ID_1620574; Annot_ID_160931

SEQ ID NO: 33387 - DNA, 3003 bp, Unknown
  misc_feature (1)..( 3003): 2750-1469P.txt file - cDNA_ID_3069112; gDNA_ID_1620575; Annot_ID_160966
tgtcactgatccacttgacgacgacgcgaaggctcggatcttgagcagccacagttacatcctagaccaagattctcctcgactctgcgagctcgtacacgggtttcttgaggatggtcctgaagagtcattctacgactctgaccccgacctgtctgagacttcttcagctgaacattctggtgaagctagtgtggagatcgtgagaatggcggtgagcttctccgattccgatccttaccggaatctattgctagctcacgttttgagagccgtggaggtatattccggttttaggtcaaggaacaaaactgttttccgggataaggtagcttcgtttctgcgagagcttggtcacgacgccgcggtttgtgtatcaaaatggacctcttcatccaaactcatcgctgggagttaccatttcattgacgtcgttcacaagccgtcagataatgatcagaaggccgtccgttacttggttgatctagactttgcttcggagttcgagatcgcaaggccaacgcgcgaatacacgcgtgggctgcagctgctgcctaacgttttcgtaggaaatgaagagaatctaaggacgatcgtgagagagtcatgcgacgcggcgaagcgatcaatgaagagccgtggcttgtctcttccaccgtggcggagaagctcttacttacagcataagtggtttggtccgtacaaaagaaaggtgggatctagtttgggagtgaagccgttgaatagtgacgccgttagttgccgatctttagggtttgatgacggcgccgtcaatactcgtttgttcatcagggcatgatccatatgcatgtggtatgaagtagactagtataaagtgtaggcgaatagctggagactacacttctttttattcaatctgactgactatgtatgttctcgtttaatattaaaaaaaaagatttgttctaaatcagtaacttaaagactaatagaggtcaaactattaatcagtatcttatcattaattagaccaaaatgtaaaatacttaaatgtatcaatcaacctggattatgtggcattcatttgcaatgaaatctcgctagtaatgttgatgtgtgatataaaaaagaatatgcaaatgaaccataacagtgtcagttgacagttaatatgtgaagaaagaaaaaaaaaatatgagtttagatcatcaagatcggaggctagaaaaaaaaaaagatgggaggctagagactcatatgtcaagctttacttcttatactttttaattaaacttccaaaacatcaaggtcctttcattttcaatttgacttctaactttattccaaattttgaccgagactataggaagtcaaatatgagtttgtgagttaagtttgagctctcacaaccgctgggataatctcaaaggtgaatatcttaggtataattattttcatccgagtgcttactcacatgaatttgtgtctaaaggttttgctcggattttacatattttccgctacatcatatttcaccgtcggataatcctaaaaataatttggagaccataaagatttttgagatagcttccaatgcaatgagaatcaaacgatcacttttgactaagactttaggaggtgatatgtgagtttgtaagtcagggctctcaaagctgaatatcttaatatatgtttcaattatggcaactgtccaaatgagcgaaatgaaactttcatcccaatgtagtactcatagaacttagttaatatacgttttgcttgcgttaaattttcttaagtaatgagaatttgccgtttatctagaaattacctaaacgccgatggtttttggttcattcggttgggtttctgaatctctcagtcgaatatcccctcaaatgtactaacttgtatagtttatgtatcccattgaacgggaccttaactgctttatgtatcataaaccctgaatattgtgcatttcaaaatatatttctgaaattatttagttttggctaatcgtttccactctataagactataactactgttgatacgagattctcatcagattgttcatgtttgatcaatcagtcatctagttttgtgaatcgcttttttttttttttccttttcatataattttgtaaatattctcttatatatatttttttcaactttttctatttaaaattaataattattcaaaaaatatcatgtaagttacaaaaatgtatccagattctttttgtagtgataaatattaaaatcaacagtttgttaattttaaaataacttttgattttagttttaattattgttttttaaacaaactatctacaccagtaaaatacctttttaacacaccaaataatatgagattacattccaaaagtatacaatgttttgagtcttgactaaaaaagtataaaaaaaagaaaaatctctgtttccttactctattcttaaaattagttaatcaatgcaatttttgggccattgggctttagaaatattgaagtattccattatactctttcgctgaccggtcaaaaagctttaacgctcgaaggccgccgcgtcttccaaggcattgaacgtccctcctccacgccttctaggttctttcgcctccacgtaaaacgtcacccctgacgtcacatcctctagaacaccacgtgtttgtcttaaacacgacgagtaattacacatttggtcaaactcaaaccaacaaaacactttttaaacaaggctaaattggtcaaacgcatggcaacgaatctcaggcgttttttcgttttctttattattgacttatttttatttttattttattttgcttctttgaaatcttccccggcaaggcaaagcaaacgagtggacgtttttgaagattcgttaatttttctctctctctttataatataagaagtcgcctactacgtagaaccaaaagagagacaaaaatacactttcattgctgtcttaactctaacggagttaactaacgtcgacattatg

SEQ ID NO: 33388 - DNA, 3003 bp, Unknown
  misc_feature (1)..( 3003): 2750-1469P.txt file - cDNA_ID_3069116; gDNA_ID_1620575; Annot_ID_160965
gaatcatcatgtataaaacgtgaagctaaacttattagtttaggcgatgaagttgatatatctcaagtctttcactgcaacggtttattgttattcatcagcatcaccaaagacaagactaggctagtggtttggaacccgtatgattggggacatacccgtacgatcgaacccacacataactgccacatattcaataggtataatatatgtatgctctcggatacaacaagagctagcagctaatcccacaaaatcttgaggtttgttacttactggatgagggttatggatgagttcataatctacgattttaactctgattcatggagggttcttgatgtcactccagattggacgataagttatatgaaccttggcgtgtctctcaagggaaatgcatactggtttgctactgagagatattccgaaacagacgattatttcttagtctgttttgatttcacaagagagacatttgggcctcttttgactcttccgtttgtgtttgttaaatctgaagatgttatgtgtgtatctaatgttagagaagagcagcttgcggttttatatcagccgtgggataaataaaagatggagatctggattacgtctacgattgagcccaacgcggtgtcgtggaacagcaaggtgttcttatcagtgagtataagaaaactcattggccctccgtttcagttttgtttggggagtttcttcattgacgaggagaagaaagtcgctgtggtttttgataaagactacaaagataagcgcaacatagcttacatcattggagactttggagtcgatggatcctttaaagaagggatctcggagaatcagcctacgcaatgtgttacccacttatgtgctcttatgttccaacttccaagtctagtgcaatttaattagtcgaccatctacttcttgcatatttttgctcgtttttttttcctacctaaccatctagttcaaacattatcttttgctaaagttgggaagtgtggtggaaatgtcttctccttttttttcttgtaatgagtcttgtacggtggtggttatatcgatctacgtcggttgtgttcccctcggtgatctcgacctcagcgtaggtggcgatcaatgttggaaatgaaaattcctcctctggattatcagtctatcttttattggtatattgccatatatgtcttcatatggtattctgctatctttcaatgaacatcacaaaaatagtgatgcttaatgtcttcatatgattcccctaaagttagtgcttttgtgttttgtgtgacatatgggattgtcatatatatttcgaatctttttcgtttgttacacaattaattgccttaaaaaattcaaactattaattaaaaagaaaaatcagataattaaaattcagtggcaactattgtaaataagtaccaactccaagatttatttcacaaaatggctgcaaaatgtatatgtagatatttagcttaaggaggagtctaaatttaactttagaatttttttagaatataatgtatattagagtaaaaacatttagaatatacatataaggattaaattatattgtgtattattttttactgcataaaattgatttgtaattttgagaaatataagataaatttgcaaaaattaacgaattggaagattgttttgcaaaaaatccaaatattttgatataaattatttgatctattgttaccatatatttttgaaccatttaatccgtatttttccttgaaatgtgtttgatatggtttattttgcataaacaacttgatttgtgaatttcattttcctatttgaaatctctttactatataactagccttgttgggcgcgatccacatatgtattatatgatacttttgctcattagttaaaaaaaacaaaatgaatagttattagtcaaaacccaatgtagagatattgccgacgtagtcaacacatatgaatatgatatgatcctgcaaaaaattttaacgacgttagaacctaaagaacatatgtgttctggaaccacctttctgtcacttaactctgtcatcacctttcgaataaatgatttaaggagttctctagaagactagaatcttccgtaacctaaaactcaacctcatgtagaaagactcacaaatccaattcctctattctcctgcgaaaaacggtttctttatatctctcacgatttgatttcctcttcgctttttttaattgaattgagattgatggatgataattttaatttcaagatttttttgttaatcttgtaatggaaaatattaaaaataattgcttcaatattgcaaagctttgatattttagaaaacaattttatttaataaaagtgatatatatatatatatatatgttatagtatattaaaagtaaattagatttaaaagaaagtgagtgtataagagacaaaacacgaaaaaaaaaatatgattgaggatgacaaatggattataatttcatatatatacataatgaattcaagcttgtaacttatgaaaatttagggggataattaatactcaattctagatttatttatttgcaacgtatccatctatacctagagaatttttaataatttgtaagcaaaaaatcttgaaagaccacaaatggatttgaatttgttctggatttgtactgtgataatccattttgctttgcttgattagtttttactttttaccattggtaataatttgggatcatgtttagttgtttactagataaccaattttgttgggcctgatccaacaattttgccgattataaagtaaataagtgaatagttaagcccaatataaatttacgagtgacggatcatctgtgttctcgaaccatctttttaacgaactctctagaaccctttttctttttcacccaaaacccaacctcgtataaatctcaccaatccatttcttctcttcttctttgcgttttttgtttggaactgaatcgaaaaagatg

SEQ ID NO: 33389 - DNA, 3003 bp, Unknown
  misc_feature (1)..( 3003): 2750-1469P.txt file - cDNA_ID_3069124; gDNA_ID_1620575; Annot_ID_160962
tttattaatatttttacatctagatttggggtttgagttttaaaaaataagattaatgatgcaaagcttatcgaatgtccaaaataccacatgtagagctgtttgtaatggtttgagcgttgtagagaaagcatgtcatacatacataattatgtccatcacaaggatgtcatacatacataattattccttgaaatctgaatattgtggaatgagttgcagcgtggaatcgttgttcgtaagaactgttcatcgtaatcacatatgcgtagttaagtatcattataataattaataagaatagattacatatataattcaaaaaaaatcattaaagtagaatgatataattgtgaagaaaaaaaagtataaaataaaattttagttgaatgaaactatgtttgaattttatttttttaaaaatctttgattgattgaattcaattttcgaacccaaaataacatatcgtttaacacactttgatatcttgaattttaatttatataactcttattttctttctttagttatttttcccttattctttttccagtttatctaaacaaaaggtaattaatttcaaaattcgataaaccctactatttgacatcttctacgaacgggcacaccggagaatcagcttctcgttccgtacgatgtcggcgacactccgacgcctcattcttctcacctccacaaatcgctcccgtaatctatctccgccgtttctttccaccgccgtgaaccacctatctctatcattctcttccgtctcatcttcaccggaatcacacacttccccttcccggatccgaacccgaacaccactcgaaactcaattcgaaacatggattcagaatctaaaaccaggattcacaaactccgacgttgtgatagcgttacgagctcaatccgatccagatctagctctcgacatattccgatggacagctcaacaacgaggctacaaacacaatcacgaagcttaccacactatgatcaaacaagcaatcaccggaaaacgaaacaacttcgtcgaaacgttaatcgaagaagtaatcgccggagcttgtgaaatgagtgttcctctctacaattgcatcatcagattctgttgtggtcgtaagtttctcttcaatagagctttcgatgtttataacaaaatgcttcgatcagatgattcaaagcctgaccttgaaacttatactttgctactaagttcattgcttaagagattcaacaaattgaatgtgtgttatgtgtatctacacgccgttagatcgttaacgaagcagatgaaatcgaatggtgtgattccggatacgtttgtgttgaatatgattatcaaagcttatgcaaagtgtcttgaggttgatgaagctataagagtgtttaaagagatggctttatatggctctgagcctaatgcttatacttatagttacttagttaaaggggtttgtgagaaaggtagagttggacagggtttagggttttataaggagatgcaagtcaaaggaatggttccgaatgggagttgttatatggttttgatttgtagtttgtctatggagaggagattggatgaagctgttgaggttgtgtatgatatgttggcgaattcgttgtctccggatatgttgacgtataatacggtgttgacggagttgtgtaggggaggtagagggagtgaagctcttgagatggttgaggaatggaagaaacgggatccggtgatgggtgaaaggaattacagaacgttgatggatgaggtttattttttgaataagggatgattgattgggttctgtttatctgaaaggcgatcaatcggctaagcttaagggctacaagatggggggggtttgttgcaaagtctgtgttctgcactctagttagtgaaccccaaatctcagtaatgatctgaatcataagggttatcaagttttgagcttcaagattctgtgttcttgagatacataacaggttgaagcatagtgtgattggaagactgaagatctcaagccatgatagcttagagatattctgtaattgcaatttgattcaaggattcaaaatcatgttgtctttgtatcatgttctgtgtaaatgaggtcttatgacaatcaaggatatcaattgttactgacactacttgcaaaccaaaagctgttcagcatgattcttaacgcccttttgtgtattattactgttgatgcacaactataacatttgctgttacaggatctacattttcagacaggtcacaagattcttatgttagctcaatatctcatacgagcattggttacagtttattctattttaatgctctagatatatctctttgtggttttattgattctgactggattctgcatctttataggggattctcttgttttttgggaagtcaaagaaacagtccattatttctcgcagttcttctgaaacaaaatacaaagcaatgactcatggacaatgctgcaattatttctactacacattgctaagaatcatgtttcccataaaagaatttgaacacattgttcttgaatgcattagttctgatttcatgaaaactttacatgtttgttctaaaaactccattttggttggaaggtttaaaaattgatttgtaacatatatcgtttctggaagcttataagttattagaagatgataatggtcatagttacgttttctagtttgttcaatgactctggagtacacatttgttcattcaatgaaactgaaacaaaggtacaaagtacaatgtgaatgactccgtgatctgccgcttaaaacacgttagttttttcttcttgggacaccgcttgaaaacacgttaattaggtgaatctgtggatacacatatgggcttaatggcccctatatataatacgatgataggcccattacatttagttgtcttccacaacaaaagagtaccctgaaacagatctttcgtataatcagtgacgtagagatcgaagacgatg

SEQ ID NO: 33390 - DNA, 3000 bp, Unknown; identical to SEQ ID NO: 2685
  misc_feature (1)..( 3000): 2750-1469P.txt file - cDNA_ID_3069140; gDNA_ID_1620575; Annot_ID_160944

SEQ ID NO: 33391 - DNA, 3000 bp, Unknown
  misc_feature (1)..( 3000): 2750-1469P.txt file - cDNA_ID_3069143; gDNA_ID_1620575; Annot_ID_160943
ctgagaggtgaagggccaaatatctatttgtcaaacattgagggaataaaataaactttaaatcatctttcagggcaatttcttaattatgtaagagttatgatcgggtttcgagttagggttcaatctcgggttttagatcaacccgattcacaacaccgcattgaaattggagttctctcgaagttccgtggcgtcaaaaatggcgttgggtgatcggaaatccccagaacaaacaaatcaggcgttatctcctccgacgcctattgtgcaggaaaatggaactccgacgaagcgtgtgttgatcacttcccttttagcaggtttcgcaatgcttcttctcactttcgggatttattattacgtttagttgatcgcaagaactaggatactctataatgagttccatcttagaacaattttgagatttttggttgcacatatcatcggaaagtagccaaagttcatcggaaagaagcaattagattctcgttgttgtatcggttactagaagttcgattctaggttttattgctccattaattagaagaattcataacttttggtgtatagataattcagttcaccagctttgattggctattcaattgcttaattattgcatagaacatgtaagaaatgtttgcatcacagtgactgagaagatgtttcatgtgcaggagtaattggtggaggagctggtttagtgtctaaacaccggatagctcatcccaatattcctactgtttacgctgctaattttgctattgtcgccggttgctattgcggtacctgctcttttccatctgtgttatcaagattgaaactgagtgtttccattttctctaagaaggtggactctcatgtaatgtgaatattatgtgattgttgcaatgttttggttttggtaggagctcgtgaatctgtgagaataactcgaagatcagaacacgatgatttaatgaactcagctattggaggactttttagtggtgctttgcttggaagacttcaaggttcgttatcttgaattcttttctggcagtatctattctactccatgtccctgaagatttggctgtaatactctcagtctcaagtagtctgaccatgagagtgtgctattttctgttacaataagagatcaaatcataataactctgccatatttaaatcaattggaagaaactttcatgatagtctctttagggttattaagctcggaactgacatattatcggtgtttacaggaggtcctaagggtgcgattcgctactctctagtttttgctgctgtaggcacagcatttgattatgctacccttaaaggaaaaccaatgttagagagctaccgtaacatggagtcattcaagttacctgaatggtctcctattaaagtcctcgacgaagaagccttagcaaagaagaaagctcatgaagagaagatattccctgaaagagtcctcggcaaattgaacaaagaatagtcttaaccaacttaagattatttctcttttgcccccataaatttcttaagttggaattttgtttatcggtgatgtttcgtgaaagactgaaagtaattccagaccttgtagatgagacttgaggaggattttggttttttgttgtttcctcaaggtaaaaattttcttgagacataagaaaacatctttgtatgctgacctacccataaagcgtatatattcatggttaattatgggcttacctaaaagttcgaaaattttgtctatagatgacttttggcttaccattgttaaactgatataacgtacatttctgaatttgagctctgattatgatacaactaactagtatgaaccgctaactacgcataatggtcaatatatttggttattataattcttctgttttaattagtcttacacctatatgcaaatttttatatttttctttgattacatcaataatccggattaagtcctagtaattcgttggataaaccaattcatcgctagatgatccgatcatgttacaaaaaattcgggtcaaaggccaaaaagcacaaataacctgccccaagtttgatagagaaatcaaatgcggagttttttagtgtttacgtcatgaggccctaggtccaaagttctttttggtattaatcttataccattttcgtttctaagagatggttacagaatgatacaagtagcggaaaaaaccgaaaaaactacaatgcgaaagaaaaagaacaaggaatagacgccaactcgaacaaaagaaacgacgagatggataagaaccacaacacagaaaaacaattgtagaacgcaaacataaattcaaaattgatgcatatgtccaaaattatttctagaaatgactacatttgcaatgaatggatttcttctagactatacttgttgtttagttaacgttctagactatacaaattgatttatatatatttaaaatcgtgtgatataggttgaatcgtccgacatagttggtgtatagtggtttagaagtagatactaaaatgtgtgagttgttatgaaattatacactaatagtgatgcgtaatagaatgagcaacaacaacaaaaaaatctcaacaacaacaacaatacatgtggaggagaagaaaaagtcttcgctcttcaaaaaaaaacaattgcaaaaaaaataaagtcacgtgattaaaccgagaagacagggaagacacgtgcttggctacattacaaaaacagagcacaccacaacaaacaacaacactagccaggctttttttaacattcgtctttgacaattgtccatcatcaatggcattaaatggcaaaaccgtaatttcgaactccaccaaggggcaaacttaaaagtcgatgtctttcttcttcacctcggacccatcggagagaagatactactagaagagattcattcacagtgttgaaattaaaaaaccgaaactttctcgtttcttcttcttcttctccaattttcaaaattcgaaaagatg

SEQ ID NO: 33392 - DNA, 1490 bp, Unknown; identical to SEQ ID NO: 2674
  misc_feature (1)..( 1490): 2750-1469P.txt file - cDNA_ID_3069156; gDNA_ID_1620575; Annot_ID_160936

SEQ ID NO: 33393 - DNA, 3003 bp, Unknown; identical to SEQ ID NO: 27633
  misc_feature (1)..( 3003): 2750-1469P.txt file - cDNA_ID_3069167; gDNA_ID_1620576; Annot_ID_160997

SEQ ID NO: 33394 - DNA, 3003 bp, Unknown; identical to SEQ ID NO: 18639
  misc_feature (1)..( 3003): 2750-1469P.txt file - cDNA_ID_3069169; gDNA_ID_1620576; Annot_ID_160995

SEQ ID NO: 33395 - DNA, 3000 bp, Unknown
  misc_feature (1)..( 3000): 2750-1469P.txt file - cDNA_ID_3069177; gDNA_ID_1620577; Annot_ID_161024
tgattgacccaatgaaacatgatgcggtttggtgcttggggaatgcatacacttcatacgcgcgtttgactcctgacgacactcaagctagattaaactttggcttagcttatctgttcttcggaatagctgtagctcaggttattttctttccattcagaatcattgttgatctggatcactctcttgtgttgtggtttctcgatgtgtgatgttgattttaaatatatttttcatctttgaagcaaccggataatcaagtctaccataaatcactcgaaatggcggacaaggtacttatagcggtttatgcatgaatggctttatatgtttctcaaaccaatatgttttattccattagaaacatgtcactcactgatcaacaaaacaaagtagctgataaataagcaaattaagttcatgtgcttttagttttgttctctagctggatttgttacctttctactaagttaaggcatatcatgaagggaacattgcatctcaaaatgtccattactcatagaaactcaaactcaaagttttgttgtttatttaatttcataggctccacaactacacacggggtttcataaaaaccgcttactctcactattgggtggcgttgaaactttagcaataccgagcccaaaggtacgttcattctcattatgggcatttcaattttcaatattttgatgaatacattcaaaaaattagataatataagaagatatatgagtttgaaaccatgtttatttttcttatgtacttttttccaaacaggtagtgaagaataagaaaagtagtgatgagaagtatattgttatgggatgggtgattctagccattggcgttgttgcttgtattagttttcgaaagctaaggtgaatgagcttgttgtgagaatatccacacagaagatatgggcaaaggagaaaaaggtttcaagcgtaagacccctagagcctagggtctctctcttatgtttgatgttttttaagagctttttgtgagtttaaaacaaaagtggtaccatacaattccaagttataaaaacattttttatacttcttttttttggtaaaataaataaatcatagattgtcactgaaaaacaataattatttcatgttgtctcataatccagtttttaataaacagggtaaatgcatgtcacccaatataagtgacaaaaaatcagttgatagaaattttttctgttggatttgaaaaacatgattatgaatgatatatatactaccaccatatatctaaataattccgtataataacaaattaaacatagagtaattaaaatacacctttaagatgaaggatgggaataaaaaataagagtattcctgcaatcacaaacacaggagcttgttcttcggctttatgttgaattttttcagcgttcatgttcaacaacactaaccccacaagtcctatcaatattagcataatccatcccttgcttatagttatagtactattactttgttctatttcactattaggttcagacgaagtttcgccactaaaagtgcctattaacttccataatccagctccacccacaataacaccgaacacgaattttaccattttctctttgtgtagttttattttttaaaagatattgattgatttttttaaaagttttttttgatactaaatgagagacatttgcttttatagttttttttgggtctatatatcatagattcacatatatattttggttttctgaattaagtaagattgaaaaacaaaattatggtcactcaaatgttgttaggttttctatttaataatctatgatttcattatttgaataaggccctgttcgtttccagagacgctgcgacagagtccggcgactggaaaaaaggctttatttctctttctcatccctttcatctctcctgcatcttctctttatcttgtcgctgcgactgcaatttcatgattttggagtcgctgaaaataacagcgacccccactaaagctttattaaaatcagcgactatcgccggtgtcttcccccttggattaatgagtcgctcgcttctttaaaaaagtgtcgctggagagatctcgcgactaccaaaagaacagggcctaacctaaatgtttttacaaggattcttatgcataagttgaaataaatagaaatatgtaactaaattactgtaagaggaaaaggctataatgtgatacattataagtttataacccatagtaaatgtttcttcttttgtatattttcagtcaaaaatatgaatttcagtatatcaagtttattcggttcgatcgcatcaaatttgagagtacaatttggttaattcggtattagaattctatcggtcaggttcttataaaacttggttcgtttcggtttaatttaaacatcaaacttgattcttgtgcccccaagtccaattacaatacttatatgattatattctggtccgataaatccattgggcttattaatgggctttaactctctaaaacacattttggcgcgtgtaacatcgcaacacatcaaacgtaggtgcgtgtacctcacatgaaaacacacgagaaccacatacgtacgcgtccccaccaagagtttcgagttttaacaaaatgtcgtttatacccttatacttacccggcaaatttatcgcatgttgccgccaaactttatcacttccctcgcttccaaggctaaatctcagtgggtattgacgataatacccttcatcttcctcaacaagcttttttctttggataaaaattcccgaacaagcttctcgaaaccaaacaaatttcaaacatttttaatatttccctcctctattttccctcttcacgtcaaaaattcaaaaaccccaaaaccctataatctcctatataaatattcagccctagatcttataattcatcaatcaaacaatctcttcaatcaaatctcttcttcaatcaaatcttcaaatcccttcaaagatg

SEQ ID NO: 33396 - DNA, 3000 bp, Unknown
  misc_feature (1)..( 3000): 2750-1469P.txt file - cDNA_ID_3069181; gDNA_ID_1620577; Annot_ID_161023
tgttcaacaacactaaccccacaagtcctatcaatattagcataatccatcccttgcttatagttatagtactattactttgttctatttcactattaggttcagacgaagtttcgccactaaaagtgcctattaacttccataatccagctccacccacaataacaccgaacacgaattttaccattttctctttgtgtagttttattttttaaaagatattgattgatttttttaaaagttttttttgatactaaatgagagacatttgcttttatagttttttttgggtctatatatcatagattcacatatatattttggttttctgaattaagtaagattgaaaaacaaaattatggtcactcaaatgttgttaggttttctatttaataatctatgatttcattatttgaataaggccctgttcgtttccagagacgctgcgacagagtccggcgactggaaaaaaggctttatttctctttctcatccctttcatctctcctgcatcttctctttatcttgtcgctgcgactgcaatttcatgattttggagtcgctgaaaataacagcgacccccactaaagctttattaaaatcagcgactatcgccggtgtcttcccccttggattaatgagtcgctcgcttctttaaaaaagtgtcgctggagagatctcgcgactaccaaaagaacagggcctaacctaaatgtttttacaaggattcttatgcataagttgaaataaatagaaatatgtaactaaattactgtaagaggaaaaggctataatgtgatacattataagtttataacccatagtaaatgtttcttcttttgtatattttcagtcaaaaatatgaatttcagtatatcaagtttattcggttcgatcgcatcaaatttgagagtacaatttggttaattcggtattagaattctatcggtcaggttcttataaaacttggttcgtttcggtttaatttaaacatcaaacttgattcttgtgcccccaagtccaattacaatacttatatgattatattctggtccgataaatccattgggcttattaatgggctttaactctctaaaacacattttggcgcgtgtaacatcgcaacacatcaaacgtaggtgcgtgtacctcacatgaaaacacacgagaaccacatacgtacgcgtccccaccaagagtttcgagttttaacaaaatgtcgtttatacccttatacttacccggcaaatttatcgcatgttgccgccaaactttatcacttccctcgcttccaaggctaaatctcagtgggtattgacgataatacccttcatcttcctcaacaagcttttttctttggataaaaattcccgaacaagcttctcgaaaccaaacaaatttcaaacatttttaatatttccctcctctattttccctcttcacgtcaaaaattcaaaaaccccaaaaccctataatctcctatataaatattcagccctagatcttataattcatcaatcaaacaatctcttcaatcaaatctcttcttcaatcaaatcttcaaatcccttcaaagatgccttcaatgccagaagagccgctcctaacaccaaccccagacagattctgtatgttcccaattcactacccacagatctgggaaatgtacaaaaaagccgaagcatcattctggaccgccgaagaagtagatctatcacaagacaaccgcgactgggaaaacagtctcaacgacggtgaacgtcacttcatcaaacacgtcctcgctttcttcgctgcatctgacggaatcgtactagagaatctcgcttctcgcttcatgtccgatgttcaagtctctgaggcgcgtgctttctacggtttccagatcgcgattgaaaacatccactcggagatgtatagtctccttctcgatacttatatcaaagataacaaagagagagatcatctctttcgtgccattgaaacaatcccttgcgtcgccaagaaagctcaatgggctatgaaatggatcgacggttctcagactttcgccgaacgaatcatcgctttcgcttgcgtcgaaggtaccttatatttactattttaccctttattttttgtgggtcttccttattgttacttgaattgacgattatgtcctttgtgttgaaggtatcttcttctccggaagcttttgttcaatcttctggctgaagaaacgaggactcatgcctggattaacattctcaaacgaattgatctcacgtgacgaaggtttacactgtgatttcgcttgtctactctacacgctactcaaaacaaagcttagcgaagaacgcgtgaaatcaatcgtctgcgacgcggtcgaaatcgagagagagtttgtgtgcgacgcgcttccgtgcgcgttggttgggatgaaccgtgatttgatgagtcagtatattgagtttgttgcggataggcttttgggtgcgcttgggtacgggaaggtgtacggtgttactaatccgttcgattggatggaacttatttcacttcaagggaaaacgaatttcttcgagaaacgtgttggtgattaccaaaaggcttccgttatgtctagcgttaatggtaacggcgcgtttgataaccatgtcttctctctcgacgaagatttttaaagagcgtttgttttgatgctataattacgattctactcttgtattattaccgtgtattatccttggtttttgaattaatgaataattagttgcttttatcctctctttcttcagcttaatctccatgaattagggcttattcgattaatgaatccaatgataaagtttcaaaaagcgaccaagacaaaggatattaaaaattaatatgaaaagcgacaaggaataaaattggacagaagaaattaaggttaagggcacttccgtcattttcatattatttgtggcattcccaatttcccactttgtggctccaaagagttttttttttggggcaatg

SEQ ID NO: 33397 - DNA, 3000 bp, Unknown; identical to SEQ ID NO: 2694
  misc_feature (1)..( 3000): 2750-1469P.txt file - cDNA_ID_3069193; gDNA_ID_1620577; Annot_ID_161014

SEQ ID NO: 33398 - DNA, 3000 bp, Unknown
  misc_feature (1)..( 3000): 2750-1469P.txt file - cDNA_ID_3069204; gDNA_ID_1620577; Annot_ID_161008
tgtgcctattacacctgtcactcgccagtagtgtaaatctgttcgtaggggttcatatagcaaaaagttcacttttttttttggtttttttttgttaaatatagtttcaatgggcttttgataattaggattttatgttcttaaaatgtgctttgtatgctttctaattgtgcgtctaatccaaggtttcaactctgtaaacatatcataaaaatcctttgttttgctctgagattttactattgttggaagattctatagattttcaaattttcttgttcctctctttgaaatttacatggaagtcagatttggaccaaagtgatttgttgctcgtcttttaaagtcttctggtcaaaacgccgacaaggctttgcttttgactaataaagaaacatacttttccacaattttcttgtctttttatcttatttccttactcgtcagggattccctgtaacgcggcaatcctgacgaaagacatatcagaaactttgatagaatcacatagcagcaatctcttagctggattttaccagcttcactttgagattaggtcatttacccttttaagggtttctctcctactttcttgattctcttcattcccaagactcaaaacctagcaaacttggacatttggattgagtgtctctagtccgggtaagatttgtgtgttgtggtaactttatctgacggtttaggagcttaggttgcttagatgagttccaagtttttatttttcttttgcttattgttcttcttgttcctttggtccaagttcttgatttggacagtaactgaaaatttcctaattgattcctttaagtttgactgtgctcttattactagtcttctctaaatatttttgttctttgcttcgacaatttcattgatgctttgaatttgagaatctctctgtcctcttattattataggtctcatttgggtggattctttctggtgaaatctttcttgtgagagttttgtattgggagaaagagataatcaaatgccggaggaagatttggtagaactgaaattccggttatatgacggttcagatgttggcccgtttcagtactctccaaccgccacagtgtcaatgcttaaggagagaattgtctctgaatggcctaaaggttagcaccgagcacaatcttttggtttgtttttcggctaatccgtgaaaaagaagtaaaaatgcgatagaagtgctctttaatgctttagatttggctttagaacgtttgcttcagccatttttttttttcttcagtttcttcacttgtggcttgatagacaaagttcagacataagtcataggatctgattgacttactaatcatttgtcttaaagtaggaacagaagaaggaagttaaactattgatcttttaaaaggttactcgatcttgtgatctatgttttaacagtttctccacttgtggtataggcttttgaattggtctgattgtattactaatcacttgtcttatactacaaatcatgtctttagagactatagggacgaatactgttctggttctttttagtagaatttcttgatcttactcttcagtcttgtgcattcaacaaaaaattgaatttgtctcattttgtttcctattgtatcttattgactaatcgaatttgggggttttgaatgtgtgtagacaagaagattgttccaaaatcagctagtgacatcaagttgataaatgctggtaagattttggagaatggtaaaactgttgcacagtgtaaagctccatttgatgatctccctaaatccgtcattacaatgcatgttgtcgtgcaactgtctccaacaaaagcaagaccaggtcttgttctttcttatctccgtaaatcttgtttgtggaatgaattctttagcctaatatcttgttttttctttctcttacagagaaaaaaatcgaaaaggaagaagccccacagagaagcttttgctcatgtaccataatgtgagaacaacaacaagtcccaagtcaaaaaatctgaaagagttaagttttgattctctgtggtatttgctaaaagaccatataaacataaactaccgcttcatattcgacattttcttcacaagttcaaagaaaccttcatctatggcgttataaagctagtctattagagttgtttctcttgagctgtgatggaaaaactcttgtttggagcatcctttataaagataagagttttgttaccgcgaactaattcaagtatctctgtaacatatcttgtatggttttgtcaatctttagtacattttagacctggtttttttctctatcaggatccgcccaaaactgtatccaaacatctttatccagtccattacctacagtgaaaacgagtactaaacgtttgcagtttggttcttgagtggcaaacactttgatatgttactatatggtccatacctttctcatcattttccacttccacaaagccaatgttttggggatgtaggtagatacaaacctccaaaagaaacagagagcatgagatctcaataaatgtcctttcacctaacttatcactgtctcccacttaattctctcatttataaccttcactttcacttagtgtctctccactatcttgtcttgtttcgcctttaattctattcctctcctctggctctcatttataatcttcactccaaatgcacctttctttgtactcccatcactttctcttcgatatggtatttactttaatccgattcgaatattgtaactatgaaaaacaaaatgaatagtaaaaatatccgtttcgtatccaagcctatttttaaaagacacgtttgtataactctctctatatatagaaaggaaccacgaagctctttcaagagagttctattcttgtctgaaaactagttccctatatttcttctttcttcacacacatattctccaattcttacataaatatcaaataaaccaaacttgaaacttgttgtgcttaagatg

SEQ ID NO: 33399 - DNA, 3003 bp, Unknown
  misc_feature (1)..( 3003): 2750-1469P.txt file - cDNA_ID_3069235; gDNA_ID_1620577; Annot_ID_161033
aagagcttcaaatgtatccaagcaaaaccaacttctcaaacaaagatagttcacttgttaatccaattcagttaacagaacaaaagaaaaaaaatgaaaatctttgctttgcatcatcaacaacaacaactaaccaatttcaaaactcttatgcctcccaacaaaccaaacataagcaacaaatatcttatagtaagatctttagcttcacatgtaacaacaatcaaccacaatttccaaagtaaaccaacttctcagataaacatagctcacttgttaacaaaactatataaaagtttaaatcttttggtttccactcacatcaacaacaactaaccaatttcaaaactcttaatcctaccaacaaaccaaccataagcaataatcgatgatgcatttgcctggacaaagtatgctaaactctatacttaagaagctgtaaccaaaccctaattagtcaccagaaactgctaccaacttcagaagattgctctgaaccaaaacttgttctcaaaacgaatgctaaattaggttaaaaggtataaagaacctgcaagcaattctcatctcatctttccaaccacactccaccaatctatctctcacaagctccattagattctccttctctccactctccaccaactatgacgatttcaaatttccaaaaacctttcaatcaaaagtccacaacagtaactgaaatcgatttcgcattacaaaatctgaaaccttgacgttgatgatttctcgaagcgtgaccttgtctttctcgaaaccatccgccacatcgtcttcatctggtgtcggaggccgattcaccgaatgtttcctgatcagaaaaaagcgagaaatcgaaagatgaaattgaagagtaacgattcagaagaagggaataagattgtctaatacatacatgtgtttgaatcgatagattcgtttcaagaacacgaatcaattgtgatggatgaacttttttccagagtcttcttcagcaaacccagaactgtatcgcacgacgaaggagaaagcacacaacgagtcgagatcattaaatttcaatattataaactacgtgccgtttgttaaaatttgccgaaacaaacaggctgttttgtttaagtccactggatagaaactacgtgccgttttaaatggactctacaagtagggaaaaaaccttaaaaaaatccccatcgattttctattttgccgtttaatacccaattatttttggttggaaaaaaatacacaaagtagttaaactgtgtgatttaatactcaaaaaataacatattattattgtcatactcacaatttcataacaaaagttaaatttcaattatacccgtattgttgaattaactattaatttgtaaatgacatgacaatcatttttattttttcaataaaaagatttatattttgttttactttttcttatttatattctatgaataaaatgacatggtaactactttatttataaatttcaaaataaaaaattatagaaaatctggagaaaaatagaatttttagtaaaattagtatacattaatatgattctcatttttaaaaattagtatatattattgataactgttttatgatcttttaaggtacgcattcaagaaacaatcacaaaaaagagttatcgattctttctcacctcctctagcattctcacatcctcctagccttcttctttgtttccaccatcttctccgtttccaccatcttcatttcctcagcctttttcttgtcttccaccattgtctcatggatctacttacctctcagtctcataatagatcaaaaccatgtattctcatagagagttatcacaaatggcgctgtatgggatgatcttctcgtttgttattgccttcaactcgtggagcaacactttaaacctaagcatcattataatacatatgataatgattttcttcaagtatagttgaaaatgatttatgaagttcaaagtacataatttggcttgaattttacattttaagttagaaattttatggttattagttttaagttagcaaatcagagttctgactgatatggcgtaaacaatataattttatatttatgtcgcaaaatagtaagtataagatttgtttttaaggagaaaggggtagatagatatgtagataatataatacttttatatattaagtatgttttaataaaaaacatttaaaagattataaataccaattagagtagaacaaatatgaaaatattaattaaaaacaaatttgaactaatccactatcaaatttcaaagttattgactaaactttgaactaatccatatatgataaaccacttatgtcatgtgggaaaataataatatttggcaactaatggttcagaaaaaaatattttctcgcataacaaataattcacttaaacgtcaatttcctaaattttgagtttttaaatcaccagagtgttaggtgaataagaatacttaaaaatgttgtgctatgaaataatcaatcaaacaaataatccaaatttttagaattttttcgtcgaatagtgtataagtgtacgaaatttgcaaaaacccaaatgttattttcaagaatagtaagctcttatgttaaacttaaatgttttcattgtgagaacgaacgtcttttaaacataccatttaatagtaatatgtactaatgttattgaaaacttactttctgctaatattggaagcccattaaactaaggcccatgaaagaaaacacccacaccgacgtcgtataggaaagatgtagtcatgtgaagaaaaaaaattaacggtcaacgggaaaaggaaaacgatggcgcgtcaaatgctaaaccattaaactacggttgtggacggcaaacgcttgtcgtctccgaaacgcaaccgcagagaacccaaatttatatcattctatatcttctcttcttcaccggcgtacaatagcactcaactcttaacttacgcacctctcttctctcatg

SEQ ID NO: 33400 - DNA, 3003 bp, Unknown
  misc_feature (1)..( 3003): 2750-1469P.txt file - cDNA_ID_3069268; gDNA_ID_1620578; Annot_ID_161066
attaaaagagaaacgaaaaaagtatgtacaattaacgaggatttgaacggcggaaaatttttgtcgctaatccctcgcttatatacaacagattttgaagatagacatatcatatcattgcagtcttatgtccgttgcaaaattgtgatgactaaaaattggtaaccaatgttatagtctcttttatttcttactgactccatcaaaatcttgcttgtaaactttggacactatttcgaaaagcaaaaacgtattaattttggaattattaaaacattaatagaatatttaatatgtataaatcaatagaatacattaaactaataaataaataatacaaaatatgaattttaaccatacaaaaaatctcaactataattttaaaacccctctaatagctaaaactgtaaaacatatactgagttggtctctgatattgctcataaccgaccgacctaacctaaccacacacgggatacgctcgatgttcccattctccacggtactccaacactggcatacaatacaaaacattgaaggagacagtaatgccacgtgcacggctctgcaccataaaatttaacgcctctgatttaaaacaccacacattgacaaattgacataaccaaagctacatagagaaaaaacaccaaaaatcaaaattccatcaaaggggcttttaaaattttggacaagaacaaaaaaaaaagaaaaatggcaacgagaggagctgttgctgctgctgcatccacaatatggaagcaccgaagaaacccttctcttcgatcattatctcgccatttcaatcccaatttcaatcatagaatcatcccaacaggtacaatttcattacaattctgttctaagatagatacatgaaacataagagttgtgtcaaaagttcatatcaatttagggtttaaagtcaattgtggtgtatatgatttttccttgtagggtttaaatatcaagttagggcgatacaaggaacaagtactgatcctgtcattacaccattaaagaacagagaggaaccaaagccacaaaactggaaaatcaaaatgctttatgatggagattgtcctctctgtatgcgtgaggtctaagttagacctctgtttcttgtttatgtttgttcataaagtgtttttgatactgaatttttgtctttttattggtgaatgaaggttaatatgcttatggaaaggaatgaaaaacatggaactataaagtttgtcgacataagttcaaatgattattccccggaagataatcaagggcttgattacaaaacagtaaatttactgtcttttaatttggttcaattttgtttcatcttctgtttgatgttcgaactttcggatttgatcgagatctttattaggtgatggggcagattcatgccattcagtctgatggtaacgttgttaagggtgtggaggtaagcttattagcatcattgttttacactaaccatttcatatttatcattttggtgtaacgttttcaggcatttaggagattgtatgaagaagttgggcttggatgggtttacactatcaccaaatttgaaccagtaagcttttctctctttatctcctagtgatctcttccattgtgttaagttccgtattcatggataacacgcgattacttgcagatagggaagttagcagatgttgtgtatgatgtatgggctaaataccgacttcaagtcacaggtatataaaatgacctgaaaaatgttgtacaagcttacttgattatttgtgcgtctcaaaaactagatctctttgttgattagggaggccatctatagaagctattcttgaagcaagaaagaaagataaggtagggaacaaaggttatcgattttctgtcgtagtaacctttgctcggtaaaaccaatcaatgatatgattgtgtttgcaggtagagacatgtggtgaaagcaagaactgcaagatatgaattttctttatactctttgaattgttacaaaataccaaaaccagtttggagttacaaattttctttatgtgagtgtgagaatttgtatatatatgatacacagccccattacattagccaaatcatcctgatgatacattatacacatgaataatttcagcaaattttgaaactgttaagagttttatatttggtaatgattttgtaaaggttagcttactaatgttattgaaatatttgtttgaataatgaaaatgaaattcaacattgtagatttgttcccagtcaccaaagaagaaaaaaggttgtatgtgaaaaaaaaactttaagaatcaatagaatatgagatcaatttgttcatttgttgaaaacaccaaaaaaatgcactgcgtctcacatattctctctctggggcatttaatcaaacaccttccatgcaccaaatcgcacacatttcttcggaggagatttcactacaaagccctctctaatgccaccgtaagcacaacagcttcatgtttcaaaactctcagttctagccaacaggaccaaatccatctctacgttgatacacttctccaatggaaccaggtctctctctatctctcgacccttttgctagataaacatgttggaactttggaattattcgtgggcattatttgtttgaaaagattcgtgaatttctaatcaaattgaaagctttagaatccaattttgggtttaatggttggtttaagcttgttgcccaccaagtatttgttataagtccttactgggtcaaagcatgataagtcgaatgcttttacctgcacaatgaaaaaaattcaatcttgttgtcccttttttggcgcacttcactttaacatctgagtgtttggtttgttatatattcctacctcaaactcaaactgatgttactcaattgaaatcactggtgaatgtctatgttaccagtgggtttaaagtatgtttttgcttgggaattctatgtgagtttgagtaggccttgtgatttatgtgcagaaaatg

SEQ ID NO: 33401 - DNA, 3003 bp, Unknown
  misc_feature (1)..( 3003): 2750-1469P.txt file - cDNA_ID_3069276; gDNA_ID_1620578; Annot_ID_161062
ttgggagccaggtgtggcaaaagatctggcccagacctgactaatgactatctttccttccttctccagctttgaagtagtaaaggcaaatgtaaggatcacccattagtgtggcaggccgttatttatccaccacgagaacagttataagcattggctaaattcatgtttcgcaaatcattgaaaagaacgaaaaatggatatcggaagaaaagggataacaaaatagatttacaatttttttttctcatttcattctatttacatttttatttgattttttttaaaaggtttttactaattatcctaagggtaaatcatattacttcttatatcataaataatatttatttgatatttccttgaagttttaaatattttggctttgaaataatatatagtactggaaattagaaaataaatagaaagtggcaagtagaaagcagataaaagagggaatgatatacattacgatccaataacatattgttaatgctaaacttttggaaggtatgtttttctatttaaaatttttaatgtattttgattatactatttagcagctgctagattttgcgaaattaattattgtcatctaaagatttttgtctataattattttttctccaacctaagaaactttatgaagtatatataaattcacttttatagcatttaaagaatactgatatatttctatcataatcaaattttagtaacttgatcaagaataatatgaaaatatattttgttgaacgagatacctttggctctcatcttaaagttcgataggatagaaaagtataaacggaaatctaaaagattgagacccacctaatctaattctactattttttctaaagcgtagtgcccctcctatatggcgccttcaagatacataaataatatatgactacaaataacaacggtaacgagtccattcaaaaaaatcaaaaagattctcctgtgaggaaatggcttctttttcgtttccatggcagttctatccgaaattctctttatctcttcttcgggcttaacctccacaaaatatattgatgcgctatgccaacatgtggaaaacggtaccttctgcatgcacatgttgagagcctatcctcccgcggttactgccaccgatttggtactaatctttaagacacatctattaaatttctcatgtttctgttttaaccttaagaaaaaaaggtactgtattacgttttctcttctttctttgatatcacaccaaaagtttacatgcaaaagtttcagttgagttcttaaacttatgatttgatttatcattacacaattattctttcgctcttttggaattaaaaaaatattgtttagattgttaattcacctttgcaaagttgatcatttttctgcaagcacttggacacttgtaggcaaaagttttgcaagatgtaacataaactttttattttgcaattgtagttatctttataatttattttcagttcattaacatcaaatttgtatgattttgtttagtaaaccatcaataactgtattttctaatctatagttttccctggctaacatcgtgatcaacctcggcatatcctacgccaacaacacgggggcttttgccgccgaagcggctaagaaagagccaacgttgaaggtgcagttcaagtcattccagcatgaatatgacggtattcagttgtatctaagaatggcaaggggggagctcaaggaatctccaatgagtgcaaactatgacatttttcgttgtacggatatcactatgtacctgaaggatgtggtcggaggaaacagagacaacacctctaaaacgttcatggatatgacattgcaaatggagaacattatcgatgttgcccttggagccaccgtagctcttggcgggtgaatatgaatcgtggcgttgtcaaaagctggcttaggtttttaatttgtagtttgcatttcctcaaagattgtaatgatttaatcctctgcaataaaaatcaatatattttcaaggtactctaagttttgttgtaaaagaagtacaagacaaaggttgatatgtattaggtggtttttttcattaagcgaaattaatgattttaagagttagctcaatcacaagcgaaaatctatgagccttcaagaattaattaccaaagtgcaggtttagtcaacaaaccgaaaagcaaatatggctcaaattcatgagaactatgtgaatttggttgagcagaaggacaacggtgaaaacaaagttgctcattaagcttcaagaagcagaatgtcaaaaacagttgcttatgtatgttaagtcttttgatatttgacatatacgactaaggcatatgcattatatatctatttgtataataatcaatttgaacccgaattcgaaatgtaaaacaatcccaacttattactttcatttgtcaacctttggtttcggtggcttgactccaccgttaagcccttcaccgtgccatggtgcgtcgggttaatcctatcactcacttgttctcctccctttggtataatccttttccgtggtgccgccggtaattgagcattttgcttcttggagctaacgcccttgagcatatatcacagtagtcttataaacttttcgttaataaaaatctaaagagttaccaaaaagtaaaaaaaaacttgaccaaaataaaataaaaaactagtcaacaaattgtatagactgtactaagatgaaaaataaggaaagaataatctcaacaaaccagtcagatttcctagatttcagcacataatgaaaatgaaagaatataattaataccagtcagatttgtttttgttttttactaaagatggtgataaatttcatgacttccaagaaaagttcccttgcacataaatatgactggtataaacaataaccacaaacatcaaaaagcaaatccaaaagttgaatcctaatttaacttataggttgagagaaacaaaacgttctcccacgaagaaatg

SEQ ID NO: 33402 - DNA, 3003 bp, Unknown
  misc_feature (1)..( 3003): 2750-1469P.txt file - cDNA_ID_3069292; gDNA_ID_1620579; Annot_ID_161095
ttatgaacttatgatatgagttaatggcatcatttttttttttttttttttaacacgaacttcatttttattacttaggaaacgtagtctgaaaacagagcatttgagatacacaatgggataaagctatgaactatgtatgaagacagagcatgtttctggtttttcgctaaaatatcagcaggttgatttgttgatctgtgtgaccacgtgaacttgattgcgtcaaacttatttctccaaactttgatttcatggatccaattgatagcatcaaatcttgagcctcttccattcagaacattgactaggagcttgcagtcgccttcaagtattacttttctaaagcctcttatccataattgttgcatggtaagaattaggctttgacattctgcttcaaaggctgaggaaacggtcgcacctgtcgcttgagcagcccctttgaacacgccgttatcatctctaattatccaagctgccgtagagccacgaactcgattcacaaagctgccatcgtaattacacttaatccatcccatatgtggtttttgccactgactctgaaactgcctagttgtgccattagtcgtactcggagtgggaacttgcgcacataagccatttgtgatccattcttccgcttcatttgtagcatctctgatatctctccaccaatcgttctgttttcgttggaacactagcttattacggcttttccatattctccaaaggatcgagataggtagctgcccttgcattgtatgttgtcctgcatttttatgaaattcataaatctctttaatttttgtttcataatgcacctggggatttgatagactcggaaggggaatgttcgaagctctccatatttggcgagcgtgtggacacgtaaagaacaaatgatccgtagtttctctcgttatgacacatctacgacaaaaactatctgtgacgattcttcggctttcaagttcagagttggtagaatggcatcatttcttattttcttgataatgacacaaagttttcttgtctacaacatcattttaagaaaattaaacgtttttcaccaaagccgcgggaataaaatcatgaagaatggttagaacgtggtatttaaagatgagaccagaccaaagcaagtcaatacaaagtcaaatagaactcgatcggaaacgattatcaaattttggatttctttttttggggcaaattttggtgttttgaactgtatttttaattgtttgttatgatttcatatacaaattagttttagatagaataatgaaaatatttaagtgaatactatgttgtaaagtgtaaataatagacttttataagccttttaacgaaaaaagaatgtaaaaaataaaatatagacttttgtttatgaaattacaacctctttgataatgatataacatatgtgaaaatgcaatgtttttcttgattcgtttggtcaaaaaggaaaaatcaagtgtgaattagtttctgatgaggttcaatagttttttttgtattatcttaaaatttattcacaataaatatagtagtaggcgataaagaaagtgcaatgtttttcctttgactacatttaagttatagattattttatgatgagcaaaatcctcaatcttatatctaattggtttttctgaaaatatccaccacaactcaaacttcttctttgtttgcagctgcaatgtcaaccggtattaatatagaagagtgacagagaatgtatgattctctatctgcaaaatggttttgaattgggactgtgccggtcgatgattccgctcatcatctagtcgcgggttttgaaatgggactctttataattgatatccaactgtataaaaatcttgaacatccttaatttgaaacataaaaaatatgacattaactatctgattaattttcacttaagggatggttagttaagttacattggattaaaaatggtattagtagaccaattagaacatgtatgccattttttgtttacaaaaacctttttaagtggtatttataagacttgctcaatttcattcaaaagaacatgaaatggatggactagttttaatggcaataacccacacaattactcatatttggttcaacaaacttctatttcggttcacttattaattttccatctatatatgaatcatataatatgattaatttacacaagttcacacggccacgtaaaatgtaactgtcttcaagttgtgcacataaagagggtagtttcgaagataacgggtcaacgaaagggtaaaagagtaaattgcatagaacgcggccaaattaaaagcccccaattgggataaaagtcatcgccgtctcttaggtgtcaaatctcaactgtctaaaaacattaaaagcttcgttggggtagttgcatcttccctctctaatacaaaacttattttatccagttttagtttcgatttttcatttgttaacatgttttcatttttcttttaatgttaatagcctttttatttggaaaatgaaaacaatttcacaatttaattctaaattaccatttctaaaaaatagaaataatataaataataatattgaataatacatggactaaaaaattatagtactgtcctaaacaaaattgcttgactagattgaacagaaaatgtttttgatgtcttactagtttgaacaatttatttgctaacattattctctttgtatatttcttaaaaacccatattttttccttaaatatttcccatttcccctaactacattcaatagctaagtctctctctccctctctctttctctctcactcaaaaatttcccattaaattctcaaattttctccaactttttaggccattctcttttctcctctctctctctctcacacaacacaaacaactcttgagagagagaaacaaatctttcacttgacacttctctccaaatcctcatctcattcttcatcctaaacatttgctcattctcacgatg

SEQ ID NO: 33403 - DNA, 3000 bp, Unknown; identical to SEQ ID NO: 2708
  misc_feature (1)..( 3000): 2750-1469P.txt file - cDNA_ID_3069296; gDNA_ID_1620579; Annot_ID_161107

SEQ ID NO: 33404 - DNA, 3003 bp, Unknown
  misc_feature (1)..( 3003): 2750-1469P.txt file - cDNA_ID_3069312; gDNA_ID_1620579; Annot_ID_161102
gatttctataaaaaatacattccttaatagattaacttaagccatataattataggccggtggtttgcatatctaattatcaacttcctcgtaccagaaggaaccttgtagcttatagagatatcattgtattcgaattgatcatattaaactattttgatatttacttatttttctaaagaaactaatttttgctaaatttattcaatgactagtattatgttttgaataaactttgaactgtatattctaacctgaaaaataagtggaattctacagatcaattaccaaagttttgtctttgtttttgtgatatatcgaaggttttagagccaagttcgtaaaaaaaaaacaatgtcaaaagttaaaatagctcgaatgaattttgtttcatgtaggttttttttcttatgatcggacgtttcatgtagtctcatggagtatgttataaacaaaagaaaaaaaaaaatagtggaagaaaacaaaattaatgaggttgtagtagagtcacgaaatggggtctgcagaaagaaaagaaaagactgcaagttcgaattattccttcttccgtgtgtgtaattatcatttgcttttattattttaaaaaatataaaacatttactatgtattttcttacatgtaaaccatttactatttttctccacgaatatttcttatgtaaatttatataaatgtatgtataaatacatacactacgttagtggtactaaacggaccacaaagaaagtggccatcaagcttaagcagctgcaataagctgacacataaagaaatctgtctatacatatccaataaaatctaattcaataaatatgtacaaatggtcacaaaaatagtaaagggtgtaatcatgcaaagtcgtggtctagtcgttttctctattaattaagcccaatttcgaagtatacaattaggagcaattgggaaagtagtacattttaatgatgatgctaatttgcagttgtaacactttatcacaaactagacaatccacattcaccggcggaaactaacctagactagtttccaacatcaaaagtccaatttttgtttcgtttaaatagatggcgcaaacgtacaactaagattagatttaagtatttaactctacaactaggttgagccaaatgacgacaatgacaatgccgacgactgttgatatacacaactaacgtttatctgattagatgagttcgtgaacggctacacatccattagcttctatttaaaccatttgttatgaaacaatgtttgacaactcaaatgaaaaagatgaacaatatttctataccaagtaccaagtgaaactttttgtgtttacatcaggtatgtaatcattttccgtgttcctttgttaaaaaccgtccatccttgattcttctgataatggtaaaactatccgtttgttaaattgttttattgtatttttatctattgtaaaaaactaattaaattttaaatttgctatgcataaacaatactgtatatacattttttataataagattagagaattatagtaccatcttgtaacaatgatgtaataagagacgaaaaaaaaataactaactgatcattaccatccataaataaatagttgctgccataaaccaaacacattgtgcttatcaaaaagaagaaatttgtacttaatgaaacattcattattagcaaagtgtaaaaccaaagaaaaacaaactttatttctcattttattagtaaaagtgaagaagagtaaagaaaaagagagactgagatgaggctgagagcctgagtctgcgggtggagagagagagaaagaaagcctctttacacgtgatttttaaaagagaccaaaaccccaaaagcaaacctcttttgcatgcgtccttaaaagacataaatttctctcaaaattttctacatcacaaaatcaatctttttctcttcttcttcgtcttcatcatcatcatcatcatcttcctctttctcttcctactgagatattttctccacattgagaggaaagctatcttctctagcgtcactcttcttcttcattggtcggtgagtgttttattttttttactgtatttctttttaatatagcggacgggtcattttctctccgtagcaataaattcacttatataaaataaaattttcattcttcttggagatattgatatttccactgctcttttcgatgtttattccttcactttgttcacttgctcttagtttttatctttcactctctctctctcacaccaaagttcacagcaaaataaaattaaaataaaaaagcttcgatttttcgattaaaatctttgtaattatctgtttgggttttctccgggatctcattttccggtttcaaatagagacaaaagattaaagctttctccggttttgtcttctgggtattcccaatttcccccatttcacttaaagctttaatctctgttccttgtttttgtctgtgattcttcttaatgaaaacaaaaactgtaaaaataaaaaaaaaacttctggtgattggttccttttattcttggtctttacagtgttttcttctaatttcatggtttcttgtctctctcttttttatcgagaaaaaaactacatctatctctgtaacactgtatgtatatacttcagactctgttttaatctctgtttttttttacctctctggtttctgaaactttgtaatagaagaaactagaacaacaacattttttacttcactgtttcaaagttttgatttttattattaaatttaacccaaaacaccatcatcatggttttgttttctggattttctccatttaatgcaatctgacattttcttataattattttttgtttgtacttatttttctttcatcctcatgattttgcaggtagaataaggccaaggaagggatcagttttaagttttgtttcattctttttgtagtggagaaaaagagtttttgaaaatccaaacaacaaaaaatg

SEQ ID NO: 33405 - DNA, 3000 bp, Unknown
  misc_feature (1)..( 3000): 2750-1469P.txt file - cDNA_ID_3069333; gDNA_ID_1620579; Annot_ID_161087
tcaagtgcttcaagcgctgtagttcctccataattatgtcatcaacacaaaaaagagaataaaataatttcaacacttgcagatttggtaaagttgttgctattccaacaagactctcaagtacattagtgaactccagattcaagtagattagtttcctcaacttcttcagaccaactggtagcgattttatccctgtgagtgataaattgagatattgcagggagcctaggttagaaatttcttccggcaattcaataagactccagtttgtagaaagatccaagaccacaagttttggcataaacagaaagaatccaactgaaatatccaccaacttgttatatgggagtaatagggttgaaaggttggggcagttgggactgcaagctatcttctcaacctgagtactaattaaagacatctgtctcacaatctcccaactgatgtcatttggtatcagacgtacatgagcaccagatttcacacaaattgtttcttgctgatttccgaagtcagaatttatccaaagagccatctcacgtatcacatcatgcattttaactttgtctgtgagttcacattcaatcaacaaatgtgcacgaactaacaagccaattatatcataaccttggttagtacctccatcttcatatctgttcggatttatatatccttcgcaaatccaatattctatcaacttatccttctctatttcaaaatcttcaggaaacagagaacaatataggaagcacaatttgatttcaccattctttaagctatcataactgaacttcaaaatgggaagaattctttcttccatacctggaaacttgtggccaggcgaattcagaacattaatcgcatgacgccattcttgtacagtctctttacataccatggctttgccaatgacattgagtgcaagtggcaagccatggcattttgcagcaactattcttgcaagtgcgggaatatcttgatggctccttaatatgatatctccaacagtgagtcgaaacaattcccacgcttcatctggtgacaaacagtcaacttttatctgcttgtcagctttcatgtgcttgcaaacttcctttgaacgtgtggtgaaaactatcttcgatccattttctcgacttggaggtggaactcctatcttaattagatctacttcgctccagagatcatccaacaacaacacaaatttctttctcttaaggttattgtttatgagagaggctttcttactttctgtttctctttcccattccttgtcaggacgtaatctccccagaatctgatcttgaatgccctccaactgaaagtctttagataccacaacccatatcactacatcaaattcactctccagttcaacaaatttgttgttgagactttctaagagggtggtttttcctattccccccataccataaagacccaaggttcttatttcatcgtctatgaggctttcccatgctattccaaccattgtatccaaaccaactgtggtttgtatatgcttcttctctgccttaggtatgattttctgcgccaccacttcaaaattctttttagatagaagttctttaacttcttccaaattcttcattacctttccaccataattgtagcttgatatgcaatcctcagaacaatatccaaatagacacaatcttccagtttcgattgacatagcctcaagcagatccttgaattcggattcaacaatttgtacccttgaaagccatccgttgactagagcaagccgttgcaaacctttatcttcttctatggaaactcttgctaacagatcatctcgcccattcttaagttcttccatagttttctgcagagcatcgagatttgactccatcaagtgaatgtagttgctatcgcttaaaaagcagccacatgcagcagtgaagattttattccagggtaatagtgaaagccagtccaccattttgcacaaactttaagaaagaaacccccgagattactgccaaggcgatgcaagaaacaacacgatcgaagagggtgaatggggggagagaaagaggtatacaaccgtactgtatcaagaaattaaaagtcaagacaacaatttctattagtttattgagagtggcagcttccaagaaactgcaatcgtcaccaataattgtttaaatgagatcaaccagtttattaaatgtagtgatagtcaataaaagtcagaagtttgatatccacaaagtgaaatatactactaagcgataaaataagaagagcaaaattctctctttcgaaatcttctcttccttccggtagtctaattacacgtaacaaattcaggacatagaggctagagcacacacaaagtaacacacatggcagacattagtcaaatgcgacattcagaacacataaaactgtctacagatattctcaccaagtacaagtaggaaccaagcgtacctgcagacatcagaagaaaatgtcgcattttgaagaaaaaagtctgtttaaacttagatgtcactgcactagtgcctaactgctgcatcacactagacggagagggatgaggatggattccaaaggtaagtaaacagattcctacttctccggcgatgcagtaaacggattcgaaaggcatgtagcagagtgcagcaatccggagatcttcgttcgctcgattttgatatacaaattctgataaatctaaaaatcgagcaatcaaacacgaaatcgatttctgacgaaacgattaagcgacctagggcaaaactggaatttccataaactaatatcacattccgacataccggttaacccagaaaataatccggttcaacctagttgtttatctccctaatacgcagcgtttcgacgtccgattgaagagtaactaacgccgaacaaagaagaaaaaacacaacccctaattttggtctctcaactcttcctccttcttcaacttctaaaaagctttagcaaactccttcagccatg

SEQ ID NO: 33406 - DNA, 3000 bp, Unknown; identical to SEQ ID NO: 2712
  misc_feature (1)..( 3000): 2750-1469P.txt file - cDNA_ID_3069341; gDNA_ID_1620580; Annot_ID_161130

SEQ ID NO: 33407 - DNA, 3000 bp, Unknown; identical to SEQ ID NO: 2715
  misc_feature (1)..( 3000): 2750-1469P.txt file - cDNA_ID_3069346; gDNA_ID_1620580; Annot_ID_161126

SEQ ID NO: 33408 - DNA, 2372 bp, Unknown
  misc_feature (1)..( 2372): 2750-1469P.txt file - cDNA_ID_3069350; gDNA_ID_1620580; Annot_ID_161120
taaaaaaaaaaacgaaatcgatcgaattcgaaagacgaatccccccaaacccaggtggcacgagatgtgcacgtgcgagaatatacgagagaggctcccgagaaagagattaaagaaaaaaaggaaagtttataaatataaatacctgttgaattttgactttgaagaaggagagagacaaagcagagaggaagaagaggaagaagaagaagaagaagaagaagactttggagaagagagagagagagacgtgggggctatttatggcgataatttctgatgctgtctcgttttcggagtttcctttttttttttttggatttattgctttttattttaatttatgagtttttatgatttaattaatttgtttttgtgtggtcgttgggcttctattttttttaatagaagcgtgtattttgtagataggaatttactcaaaaagcttaatctccccactataataagtaaccttcgttttaattactttttctaaaatttattttaatttaatgttttcgtattttattttaatttaagtgacgtattgatgttgttgcgaatctagtacaacactgctgtctaatttaatgctctctcgttaggttttgaacgtagctggggatttttttttgtttttcaaactatacattaaagtagagtatctcataattggtttatttctgtttctgtatagaatttagtgccattatattatttttatgacatcaactaaccgtcaattaatattgcaaatattttttttatgaattaattatttaagtaatggattttgaagtttttaatttagagaagaatagcagtaaatcagatgtgatatttttatttccagttatgtagtacgcaaattaattaaattttattttcttcatcttttattgtcaaaaaaacaaattaaaggttttatggataatttacttttggaaaaatataaatcttatgtggtaacaaataagtgaattttacaaatgtgtattctttcttttttgttatagtaattcacagtaaaaagtggagttttattctataatacggtttgtaacgcatttccgtgaatatattatgctaatttgttaggaatttaagagatatggcctattcacatgtttagttttgttctatttataaaaaaaaaaaaaatcaaaatttatatttgtactttattttttttcccatggatgttttggctagtaattactatgctacttcaacagtccatccacattatggttctagtaggagtcatatcaaatcttcttacaagtattcctacaccagtattgcttacattggtttgggcttttaggtctagattatcgggggaattgactggcccaattgctaaacatgattgggaatcaatttcgtcccaaacatgttttccttgaacaatcactttgatgacaatgacacacccagacagttatcaatgactgcaattaatcagcaaatggttccataagcccatctgcccatgttggtgaagaagcatcacctcaaatatataattttaagatgagagagcaaacattcctttctgatcgctctgaatattttagcaatttactaaacgtaaagttattttcatagctttaattcaaaatttctgtaactagagctagcaaagaaacaaagacttgtgtttaatattatatttttgaagaagatagtagaatcttctgtctatttgtttaatatttgaaacatcgaataaatggtttcaatgagttgtcctgactcatcagccgacccttaacaatgactacaacaacttcaaattttaaaacatcaagtatcttcaacaacataccctttccgttttatattaaataattggtaaaatccagcttatttataattatgttatttctgtataatacattacagaagagtaaaacaaaaactttaaaacgacacatataataaaaaggaaaaataaataaatagatatgagaaaaaaatacagttggaacttaatatatacacttttatacaacggatactaacgttcaaaaattttattcttcttttggttaaagttttatttattgtttatgacttttccatatcagcttcttttttaatactatatatatatttttaaaatttgtttattttatgcgagcaaaaaaaaaaaaaagtgtgcaaaaataataaaaaagaacaaaataaatagtctacttgtacttctgtctctctctctctctgtttatcaatctcacatcgagacgaaattagagctactcagacttgttctattaaactgttaccttctccagacaaagcgttacctttttttttggtccgtacgaggaaaaatctaggagacagagctatttgttcgaaagatg

SEQ ID NO: 33409 - DNA, 3003 bp, Unknown
  misc_feature (1)..( 3003): 2750-1469P.txt file - cDNA_ID_3069377; gDNA_ID_1620581; Annot_ID_161166
cattagatcacaagattctaacagaggaaccattaatgtgatgaatatatttaaccatatgattacggacccaatcgaccaaactgtcttccatttcaccagtgagatcaacaggtctgcgtccggtaactagctcaagaagcatcactccaaaggagaaaacatctgatcggtctgtcagtttcccgcttgacgcatactctggagccaagtacctgtcgtttgattcacaatttgagattctttagagaaacagattttcggatgagattataaaacaagaatgtttttgatatagaagtaagagctaatgaaatttgcaggaacatttttcatcagctggtttcgcagtctttagtacccgaaagttcccatgatacgagtggagacatgcgtaacattgtcttgagatagcttcgctaacccgaagtctgcaacctgtagatttgagccagtccagttagagaaaaaataataccaacgaatctgaaaacattatgagtttaaaaattataagaacgtaccttagcctcaaaggattcatcaagaagaatgtttgaagctttaatgtctctatgaatgattctcggatgacctaagtcaacaaagtcaagaaaacaaattttgatcacaacctaatcaaaccactcaaaaagattgaattaataatttagatttttgttttgactcacagtcttcatgtaagtaagcaagtcctttagctgatcccaaagcaatcttgagtcttgtaggccagtcaagaaccttgccacttttaccatggagatggaactcaagtgtgtcattaggtaagaactcataaaccaacatcctctgtcctcctgcaatacaatatccaacaagagacacaagaaaccgatgatgaactcggctaatgatgtcaacctcagcctgaaactcgcgctctccttgcccgcttcccgctttcagactcttcaccgcaatctctttcccattgggaagtattcccttgtgaacatatccgaacccgccttgacctaacaatcttgattgggagaagccttgagttgcagcggctagctcgtcgtaggtgaatgtgctcttgttgaaacctagagccactgaagggtgaggtggtggtaccgacggaccatgtggtcctgagtagtttgagctaaagtcgctactgtttccattcataccgcctgagactggcggtggtggtggaggcggcgatggttgccagcttcctggtggtggtggaggcggtgaattcatccagttattattcccgttggatccaggatactgctgagacagattcattacgtgatcgctctggttattgtattgctgctgttggtattgatcacctaagataaaacagagaattgttttcaccttgtatcttggataacaagaaaatgaaagaaaatcatgataatgtttcttgggtaacaatattttggaatattatgaaactcaaaaactgtcatggtttttcaatcatatctcaaatggattgtggaatgtgattagaagtaaggttcttaagaaaatgctagtttattgattagcttggtgcacaagaaaatgttctaaagtagaaactaggttaggcaacggctaggtttgatgggttttgtatttacctttgccggtggcgtagccgtttcctgcataatagggcatttgatgcttcttttttttcttacgacagcaacagacgcagaacaatatcataacaagaaacaacaatccagcaccagccacaattcctacgatagcagccgtgtttggttcattgttgccggaggagttggaaccaccaccgcttgatctaggaggagccagcgctcttggtggggaaggagagttacggtcagagtttctggaaggaggcggaggtgaacgattgttgcttcctccgccattgttttggttgttgttgtcattgttattcccattgttgttattgccattgttgtcatttccattgttgttattaccattgttgttattgccattgttgttgttgtctttgttattcccattgttgttgtcgttgttgttattaccattgttgttgttgttgttgtcattgttgttattaccattgttgccatcattgttattgtttccttgcggagatggtggtgattgtgagtctgaagaaggcggttgaggtgaaccatttgaggaatcatcgggcggaggaggagctggtggtgaaggagaggaggaatcagaaggcggaggagaggattgttgttgattgtcggatgatgacggagatggtggtgtaggggacggcggtgaattctccggggattgcccctccgccataatctctctttcggtgttttctttttgtatatgattttatttgtaaagctctctcctttttttgttttttacgagaaagagatagagagagagatgaacagagagaaaacacaaaaacctctttgtgtgtgttcaaatcctatttttaaaagagatgctttcaaatctttgttgttgctgttgtttctgtattggtattgtcttctttttgtagggtctatatttgggtattaatacagccatgcaaattatgtaccttcaactaaatttgtaaaacaagaaaaagaaaaattacagtctagaatttgattacttggttttaccaaaataaaaataaaaataagcatgctctcgttgagagttgaactcaagacctcccgcttactaaacgggtgctctaaccaactgagctacgagagctgcttgctgatcaaaaccaatgtacatataagtttggtaaagtatagtttaattattagaggaatgattcacttttagtaagaagacaaaataatagtcacaaaagaaattagaagacagatcaggaacagctagaagactcttcagggcacagagaaaacacccaccacatcaccgtcttcttcaacaaaatttaccaccagagatcgcagatatttcttcattctatctctctcttttagatccgattcgatg

SEQ ID NO: 33410 - DNA, 3000 bp, Unknown; identical to SEQ ID NO: 2716
  misc_feature (1)..( 3000): 2750-1469P.txt file - cDNA_ID_3069406; gDNA_ID_1620581; Annot_ID_161139

SEQ ID NO: 33411 - DNA, 3000 bp, Unknown
  misc_feature (1)..( 3000): 2750-1469P.txt file - cDNA_ID_3069419; gDNA_ID_1620582; Annot_ID_161204
tgaataaaaccaggggaaataatagaattacttaggtaaataaaagagcttgaaggtcttttacaaggtccatagatattttatttaaatgagtgggattcaaatgggttcgtttaattgaatgccaaaacgcaacgtatatggttgaaggtaggtgtgtcaaaatgggtcaaaattcattggtcaactcaacccatgaactctaatgagttgaaaattttgactcaaatgagttgatgggtcaaatgagttattgagtcaattagtttgatgaataaaatgagttgggttgtaatgagtaatggtttcaatggtttagctaattgacccatcaaattttgtaaaattgaattaaaacaactaaaatctctaaaccaatgccaatttaagtttaaccaacaaatctaaaccaatttaataaaaccaatatttttccaaatttcttaaatatacaagcgatgaaattaagaataagcaaactcgtaatttttctaccaaaaaaaacataacccgtaattttcccgccaaaaaagtaaaccagtgattttccgcccaaaaacgtaaatccgtaatttttccgccaaacacaaaaacacgtgatttttctgctaaaaacgtaaacccgtaattttcccaccaaaaacgtaaacccgtaattttcccgccaagaaaatttaaacccgtgatttttccgccaaaaacgtaaatccgtaattttccctctaaaaaacgtaaatccgtaattttcttgccaaaaatgtaaacccgtaatttttcctaaaaaaaaacgtaaatccgtaatttttctgccaaaaaaacgtaaatccgtaattttcccgtcaaaaaaaggtaaatccgtaaatttcccgccaaaaaaacgtaaacccgtaatttttctgccaaaaaacgtaaacccgtgatttttacgccaaaaacgtaaacttgtaattttcccgtaaaaaaaacgtaatttgtcatttttccgacaaaagtgtaaacccttaatttttccgccaaaaatataaacccgtaattttccctccaaaaatgtaaacccgtaaaaagtggaatatgtaaatatcgtaagtttgatgataataaattaataatgataattatttattattgttttataataattattaattaaattattacttagatgggttaacccatttaacaactcaacctatcaaataaaatgagttgagtcaacccataacttatttaactctaaactcatttgattatgagttgagttgtgttgggttacccattttgacacccctagttagtacgtaagctttgttgtttacctaatttttaattgtgaccgttggatgagaaaacgatgttcatatgacgtggcacgatcttgccctaagacttcatgctgttaacaaaacaaaatgcagttacggactccaaattttctaaagttttattcatggtcgtggcttagtggatttgagattttttaaaaccaaatacaagtaaaacaataattatcatccctagaaaataatacaaaaaaactatatatggcttaacatcaattataaaaaattgattttatatttaactaactagacagcaattaaataaaattgttactatttctattagtttatatcacttttttaaaaatgatataaatataagttttacatcatttagataattgatgtatctattaatttttggaaacatcactttttaaaatgattcaaactttacatcaaaaaaaattgacgttaattaaaaaattaagcatcaatattaatagtgatgtaaaattttacttgattcaaaataaaaaggtttaatactttcttatatatagtgactttagttttttggtggtctaaaaaagtgtaaagcttaggcactttataataattaatgaaattacataagacttgtagaaaaatcgtagcaaagccaaatctttgttgaaaatcttgttggccacaatgttattgttcacattagacttactaagaaagaagctaaaccttgacgagtggctttttttctttcttccctcatgacctttaattattataaacccatttctcacggcattactttagacacaaaagtgtgtgttacttttctaccatttattttgtcagcttgtttcagttattttttgtattccttttatctaagtacatgcatgcaaccatgattccttcattggccgctttgaattggatagaatcatggtaaagtgacccattgattttgggaatacttttttggatattaacaactatgtagatgggaccccctagatcgatatcgaagttactgaatctaagatcaatgctaaacatgacaatatcctttcacaaaaactactctgcccccaaaaagaagccatttaagagattagaataaggggttttgtttaccattgcaaatccaaaaggaggagctattcggtgactgatatatcaaaaccagagtgatgattttgagtcaaccattgcttcagatcaaagtcgccgacggtgacgattatgagtcaactctgataataatgtaaattttgttttgttttgttttgcttacgttgatgctgatactgagtcagcctcgcctatcggtggtaaatactttgaaggttttttttttacatttcagtgatttttttactgatataactcacgttatataacgacaatttagtaatgccttctttgaggcctcttcctcgctctggtcattgtcacttcaaatccatttctcacgacatttaattggacatacatgtttgtttaagtctcctttagtcttctactcagtttgtcttttcttttgtacgttttaaaagttgtccacataaaaaatatattcatcgtttaccatggaagactttccaagtcaagctccttacatagaattttcttatttaaatagaagtgcataagcaagacatgtctatcacataccaattgaacaaacaaatcgtcttcatttccacaagttatcatg

SEQ ID NO: 33412 - DNA, 3000 bp, Unknown; identical to SEQ ID NO: 2727
  misc_feature (1)..( 3000): 2750-1469P.txt file - cDNA_ID_3069423; gDNA_ID_1620582; Annot_ID_161200

SEQ ID NO: 33413 - DNA, 3003 bp, Unknown
  misc_feature (1)..( 3003): 2750-1469P.txt file - cDNA_ID_3069426; gDNA_ID_1620582; Annot_ID_161187
ctcttacaagcattgatccatcctcggcgattcttttaccatctggagcgaatagtatgtttggacctttttctcttggaccaagcgcccaaattctcttgagcagtttcgaccattcggttttacatttttcgcgatccttttcggtttcagaacttgatgaaacgccagcttcaactaactgtttcttcaattcttcgatgggatccacattctccccgaggcttggcttttgggattctagaatcttaacgctatgactgcctttacctccaattatgtcaccaagtaattcagtgttctcatcaagcagcttggttagagcgtgtggtagtttcatgacatgtactctgataatgcatctgccatttggagttctcttctcgatgtaatccgaagaattcaagcttagagatctcaaactttccaaaagattagatccatcaccttcaatggtctccctgtaggacacgagaggtggagagacttctaggttcacttttgcaaatctctcttttaaatccttaacgcatctttcaagatgaacctctccagcagcagcaagtacatgttctcctctagcagacactgtaatctccacaaatggatctgctcggtttagaagtcttagacctttcatcagagcactcatatctgcaggatccgatggttcaatcgcaactctaagagtgggagacacctgaaactccatgctggctaagggccaacagtttctagtagatgagagtgttgcgctttttgatatatatggtccaagccctcttatggccactacatttccggctttcacctctgttactggtgttaaaccttgccccatcataagatatagggaatgcagttctgcttcctgaatgtacttgtgagacgattcccccttgaggggatcatatagggcggtaattacaaagactctttgcccagcccgaagtaccccgctaaagatcctagcaaatgcaaggaagcactcatctgactcgcttttactgtcatcatcatttaaaccgttcatcctctctctgtgatttccatcttgaggaatcattttcattggaatagcaaacattttcgacacaaacacaacacaaggactgtcactgctagaatcacaagcctcgattgattttctaacaagctctgcttctgccaggacacttgaatcaacatcatcaccaccaataattttcctttctggaaccaagcgtgggattctatatgcctgtgctgcaatggggtctggcagatgtttcacagccatagacaagactgcatcagacagaggaagccaacggctcatcaccgattgaagcacgttttttggatccttgttctgaagttcgcgtggtggaatagacaaattgaaagatttgataactttctcaagaacggctttatccccaccaggatctagtgcagcttcataaacctgccacaaaggctcaagcacaaactgcacaaacattggtttcgccttgcttccagcacttaaattcttcttccctactatcatcttagtcttaggaatataataacgaggaccccataacgatttctgcaacgcagtcgcactagctccaagcttggaggcataaaaattagcaaactccgcaatcccaaaaccccacccgtctaaagcacacacgaatactacattacctttctgaggctgaaaagtaacttcttcatcatcctccaacaactcaagactctcagcagacaactcccctgaaggactagcaagtatagaatcaacatccgacaaatacttctctgacttatacgcactcacaatcccgttaacctcatgaacaatcctaatcaaacgagtatacgcctccataggactcaacctcaactcaaaaatcaacctatcaatcttattaagcaccaaacaaggagtcaacttctctatccaagcttgacgcaacacagcatgcgtttgaatatgaactccctcaacagcatcaaccaaaaccaacgcaccgtcacttaaccgagcagctgttgagacttcactacagaaatccatatgaccaggagaatcaatcaggttcaaagaatagtctttatatttaagagaaatcgaagagctcttcatcgtgattgcacgtctctgttcttcatctagatagtccatgaacctaagcttcccggcaagtctcgggtgaagaacaccgccaccggaagaagcaattaggtgatcggcgagagtcgtcttaccgtggtctacatgtgctagtatacatatgttcctaactttcctaccttcagattcatccatctcttcaatttacaaaacacacagctacctgcagattcaatatatacaaggattacattatcagaatcgatgcgattcaaattagtagagaaaacttcaacaaaacataatccaaatcctaaaaccttgtgtgagagctcacgaatttttgaatcgaatccacagagttgtgcacgtctcgtaagaatcaaagagagataaaaacgagagagatgctctttgaagattccataatattttaaaaagttcgattcaaaaattgagtgatatgtaaaaaaatcaccttaatcagttgatggagctcagacgtttgaagaagaatggtgcgaaacttgcttcggcggcgaaacaacggcggcgcagggtttggcgatttccctctgcaagtttgtctgtataaacatatacaagaagacgtgaacgtttttgattttaattaaaccggaaccctgtaaaccagagagacggtttagtgctctcttttaacaattttaattatagtctcggactcttcaaccggaataaaccggtctaaaacgtttttaatttcaattgtaccgaaaccctctgactcacaaaaagtgtttagtgctctttaaacaattttaatttttaaatcgtcttgggacttttaaaccggaataaatctttcgggtcaaaatttccgaaccctaactttagccccaaattagagagagatg

SEQ ID NO: 33414 - DNA, 3003 bp, Unknown
  misc_feature (1)..( 3003): 2750-1469P.txt file - cDNA_ID_3069439; gDNA_ID_1620583; Annot_ID_161222
ctccactggatccgacattgacaatgacgtcatcactacctgttcgagctccttcctgggtctcttcccggagaattttcgaagagagactccaagaccttcccaaatgcgctaatctaaaccaagtgaaacagcttcacgctcagataatccgacgaaaccttcatgaagatctacacatagcaccgaagctaatctctgctctttctctctgtcgtcaaacgaatttagctgttagggtttttaatcaggttcaagaaccaaatgttcatctttgcaattctctgattagagctcatgcccagaactctcagccttatcaagctttcttcgttttctcagagatgcaaagatttggtctttttgctgataatttcacttacccgtttcttcttaaagcttgttctggtcaatcatggttacctgtggtgaagatgatgcataatcatatagaaaaattggggctttcttctgatatttatgtacccaatgctctcattgattgttattctagatgtggtggtttgggtgttagagatgctatgaagttgtttgagaagatgagtgaaagagatactgtgtcttggaattcgatgcttggtgggttagtgaaagctggggaattgagagatgcacggagactgttcgatgaaatgcctcagagggatttgattagttggaatactatgttggatggttatgctaggtgtagagagatgagtaaagcgtttgagttgtttgagaagatgcctgagagaaatactgtgtcttggtcgacgatggttatgggttatagtaaagctggggatatggaaatggctagagttatgtttgataaaatgccattgcctgctaaaaatgttgtcacttggacgataattattgctgggtatgcggagaaggggcttttgaaggaggctgatagattagttgaccaaatggtggcttcaggattgaaatttgatgctgcggctgtgattagtatcttggctgcttgtactgagtctggtttgctcagtttaggaatgaggattcactccatactgaaaaggtctaatctcggttcgaatgcttatgtgttgaatgcactacttgatatgtatgcaaaatgtggtaacctaaagaaagcgtttgatgtgtttaacgatatacccaagaaggatctcgtgtcttggaacactatgcttcatggtcttggcgttcatggccacggaaaggaagcaatcgagcttttttcgagaatgagaagggaagggattcggcctgataaagtcacgtttattgctgttttgtgttcctgtaatcacgcgggtctcattgatgaaggaatagattacttctactcaatggagaaagtatatgatcttgttccacaagttgaacactatggttgtcttgttgacctattaggtcgagtagggcggttaaaggaagcgataaaggttgtccaaacaatgccaatggagcccaatgttgttatttggggtgctcttcttggagcgtgcaggatgcataacgaggtggatattgctaaggaagttctggataatctggttaaattagacccttgtgatcctggaaactattcgcttctgtcaaatatttatgcagcagcagaggattgggaaggagttgctgacataagatcaaagatgaagagtatgggagtagagaaaccatctggagctagttcggttgaattggaggatgggatacatgaatttacagtgttcgacaaatcacacccaaaatctgatcaaatatatcagatgcttggtagtttaattgaacctccagatcctggtgagctggttgctgttcgataaactgcttagtttatgtccagatcattaggtattatatcgattataggctgtgagcatcagcactgtggcctaggccaaaaatttgtagttcattttccaaaggaacacaaagatggttttatccttgtaacgagttcgagtactgtatatagagcataatttataaatcttgagatcaatttgattttgcaatactaactcccgtctccagacatggggtttctggttcttaatccaataacaggttctgtgaccaaccttgaagatgacagtaacaagagaagactaggcaggaccaaagacattcaaactcccacataacctcattgtgagtaatattgtgacttcgtgaaaattccactgatgatgtattgtcggtgatgtattatcattggacgtcagtgtgatgacgtattgctggtgatgttacctttggatgaaccaactagttatttagaatgatgtttagatggtcaaattagaacaaaactcgtggggtttattttattacaagaatcaatgtcttaatgatgttgagttgatctcttaagtttcctttttgtagtgatattcccattgaaatagtaataaaataatggagaaaagaggaccaccaatagtgcttccttgatttgttccatccacaatagatgactttgatcataccaaaaaaaaagtctaaacccgttataatggtcattcacttgttcttaagacccttttatgaatgatccaaattttactgattcacgtaagaaaaaaaagagagatagaggattagagattatggggatgaagtttatctagttggtggatgtagtaattatacgtgctttttttccacaggagtgggtaagtaactgcagaggcaaaccttgagtggccactagggttacacatcatcaaaaaaaaggtgataaaagatttgtctcttatccaaaatccaaaggcatatggaaatgtttatctttaaatacatcaacaccttaaaggttacggtatatccattgcccattcctctgactaggacgacccctttagaacttaatacattcagcctgtggttcacagttctccactctcttatatttagatgttatttttctgttctaccttctcttcataggaactaaagtgaattgagtcagagaaaaagagaaagagagaaggtaacatg

SEQ ID NO: 33415 - DNA, 3000 bp, Unknown; identical to SEQ ID NO: 2734
  misc_feature (1)..( 3000): 2750-1469P.txt file - cDNA_ID_3069452; gDNA_ID_1620583; Annot_ID_161213

SEQ ID NO: 33416 - DNA, 3000 bp, Unknown; identical to SEQ ID NO: 2731
  misc_feature (1)..( 3000): 2750-1469P.txt file - cDNA_ID_3069456; gDNA_ID_1620583; Annot_ID_161211

SEQ ID NO: 33417 - DNA, 3003 bp, Unknown
  misc_feature (1)..( 3003): 2750-1469P.txt file - cDNA_ID_3069470; gDNA_ID_1620584; Annot_ID_161272
cccaaatatttcacataaataaaaaaagaaaagaaaaacaaaaaatatgattgtatgtttcgcgagactaagtggtggtagttgttgtattcagtttcgtcagaaatagttcgagtctcactcttctagtcaaaaccaaaaagagttgcttgttcattacaggaggaaagaaaaagaagcaaaactagaaaatagtaagaaacaagatttggtaattggtaaaatagcctgaaatcacacttaaaaaatttatttgaaagagaaatatgtgcgtccaaaatattccataaaacgataatgtatgtgtgtacggaattttcttttagccaaatgacaaaaaaaaacccactaaaaaccaataatattcgtgaaaagaaagtaaactatataagagtaaattatacagactacgttattctttttttttttggtaggagactacgttattcttttgttgacaaagaaaaactacattcattacgatattttatatatgtggttcacaaaaaaaaaaaaaagcttatgactatgaaacattatgttttgaggcctctggcgatttattcgaaatgagctgtccatattgtaaggaagactgactagaccttaattcgtgatggatttcaattattagctgaccagagatttaaatgcaaaatatcataatggctggagtcagtagagtgggtgcattgttttgagaataagattcagtcgtactttgctcgtcgtatgaatatgtagcgagtgtcaattgatgttcaaaggtagataagttgtataatctctgaaactaggaatgtgttcagagttttagatccttaactgtaaactaagggaagaacattaaatgtatattcttcttatcaacaataaatatattacggggttaaatgtgaattgtgattagacctaattgttatacattaacgacattgtgatccgataacttttgactagctcgtgcatttctctaaaggcaaggcatataacacttagtttcgtgattttttatagtcatgcagaagtttttaaacatgtatttcaaaacaaacccgaaagctccttggaatttgcattttatgtatttatttagcagttaaccataacgttagtttgcatgttcaatttaaattcaaagaaattaagatgagatatggacggtctgcaataccgtatgttctaacataatattccaataatcaaagtgaataaatcaatctctaccgatgatgaatctttgaactgaaaggagacaagaaaacaatacatcaaatattttcaaccataatgggaagctagtcggtcacacttcacaaagtggcctttatttttgggttgtttcgttgaagggtcccgaatcaatggtagggaatactttctccttatctctttctctctcactccaatatatataatatgatgaatcttcacttccatttaaacatcacacaatcatcacacaatcaccctgaatccctgataataaggaaaaacaaaaaagtttgttttataaacacactttaaacaatgagggagaagtacacaaaggaggaagcagtgaagaattgggagaagaagaagaacaagccttcttcaccaaaaggagttggagagtttctgaaaaagaagaaaggaaggttctacattattggaaaatgtattactatgcttctttgttcacacaagtgatagtcaacacacattttttcatacatatttatgttatcatgtataggtatagatgatgatagaggtataaaaaggagagagagctcaacatatttacatctttaacatttcggtgttcatctctcattttatgtgggtgtgttcttgttgtcgtcgtcgttgttatatatggaaatatatcactcaatattcttcttgtgaactatatatataacggaatactatctcccatagtcccatgtttgtagaattaatattaatgtatgaataataaattcttagagaaaagacaaagacgatgcttttgagtactatatggagatgcatgcacacaaacatgtattatataacaaagaaattggattcagtacttacagttagaattaggttaaggtaaaagaaaaaggtaagggaaacaaatatcagtctcacatgtgttaatgcgcttgggcgtattttgattatgttagctggtcattatcagttagtttaaccattagtcattctacaatctgtagtgtgacgtttaattacctgatgattcaaacatttttcactataaatattatgaagttatcagttaggttatttaccaaacaaaaattcaatgacataacaactaaagtctcattccctttaaaaaatggtaacttttgtaatccatttcgagaagacaacaaacctaaattggctttgtgaagtaagattcagtcgtactttgctctttcaatacttgaacattaatgaaaaattccaagcaaaaggaaataaaaataaatagtttgactcaaatttggtaatgggcttatagtgttattgggtcttcatcttcagcccaaataatcttttactctttcaagtctgaacgtcgtcatcttcgttgtcgccgtcgtcgtttctctcatttctgctctgttgtgctatcgtagcgtcgcgctcctttaaacgcgacggacgcagccttctctgttcatcgtttcgccggaagttttcttcaggtatgatattttgagaccgtcgttgatatttttattcagtttccatagagaaaaaaaaacaattcctgagttctggatcgaggatcgatttcgataatactcgaagaaaagttgggttcttcgtaaagttatttgttgtagctgtgtgtggagttctttacattttcttcgattttgattttagctcttcgtatatgaaactttttgatttttaaaatttctcaaattgggtttttctttgtttctcttttggcacagcggagatttattttcagctggttagtagttttgagtgactactgaggtaacaatg

SEQ ID NO: 33418 - DNA, 3003 bp, Unknown
  misc_feature (1)..( 3003): 2750-1469P.txt file - cDNA_ID_3069488; gDNA_ID_1620584; Annot_ID_161255
ctaggctgatcagtcatttacagaagcaaaatagttcttttgacctcaagtgttatctagtctcctcagcacagtgagatatttttcagattaataattggttaatttctcatccccacaaatgttgtaaagctaaatgactcgaggtaagattcctaacttgtaaacttaagccttgaaaagaataaatccacatgattcgagcatgtttgttcaaaagagtaaaaaaccggtgaccatcaacagatgatgaataaaccggactaaaccataaatattccatcatacatgaaggatcaagtaacatggcatgatacagctttagatgactaattcattgtgtgagagtacaatgcatatgatcccaagttaacctctactagtaactgtgaaaaatggctgttacaaacggggatagaaattacatggcctaggctgaaccagcgggaacagtagctgcattggagctaggctgaaccaaagtggctggagtggcactcaggctcggatcttttgactcgggtgcaacaatgggaactgtagctccgggtagtgacagaggggtttttgcagccgcatctagagcgggtatctgatgctgatttgagttagccaaatcgtttacggcgttgtgaagttgttgtagcctgtaatctgtctcgggccgccgacaaatcttcctcaagggaacgatttcctgctgggataacggaaaagaaatccaaaataggtgagtgaggagggttttgctttatggtctaaaccatgaaatggagctgacgggtaaataaaaccgcaagggatagagagagagagagagagatgatcgtccaacctcggactggtcgtggctgtaacgcaccaagaacctacaacgacaacctctgacatcatgtcttcttctctgtgcgtcaagaacaatggcgtcaaagtaaagagcttgatcttttccttcctgaagatgttataacatagttctagtcagggataaactaacatgacacctatcactaaatgcttagagagcgaagttctaaacctggaaacaaaggacgagatctccagcaagaactgcaacacattctgatgcttcacatgggagagaccgttgtcttacatgctttttgacatttatccattcatcttcttcaacttcgaaacccgcaaatcgaacctgcacttcctgaaatacccaacagaaagattgttgttagcaaaacaaaaaaggggaacaaataagtcaacaagaggttggttaggaattaccggatcaccaatctccaagtttctatgagctaggaaagcttgcacatcatacctgtaagtaagcaagagagttacatatcagagaaaaccagtggaatgtaatgatattgttacaaagtatcataagtcagcaaaaaaaatactgaagattgaatgcaagggaatcaccatgcaccatccctggcagatttggcttcaaattccaagtaagagttgtctgaaccactcctcatgacaccgggaactatgaggaaaagcagtaaacagttacgaaaatggcatctgtgcaatatcagccatactgatctagacttatggagaaaaaactaaaactgaaaaaaccaatgaaacctattccaataaataaccttctcaacctattttactgagagtagaataaataaagcacctaaactaccagaaggggcaggcgtcatgccgggtaaatttccagtcatatgagtggttttaggaactgataatggttgaatcacacttctcatctgatttggtaaatccatacgcggcatggaagatacatttagcttcccaggagctttgtttccccttgctcgtaaagcatatcgcctattttgaaaccagttccagatctgtgatgcattaaaacaacattcccattaacttttaaaagcaaacccaacagactctgtctgataaaacttaagaatcaagaaggaaaaagccagtacttgcttgaactgcacaacaactttccccttccgctcaggtgattcactgagacaacagataacaaaaagtaaccacattttagatgataaagacacaaaatcactttcaggccaaggaattgagcaacaacaagtaaaatacctaaacttatcagcaagagcttcaagaatatgtcgacctggcattgctgtattatgctgtagcaaaattgcttccatctccgttaccttcataacaattgaagattagctataacaaacaagataaaacctcttcaaaagaagtcacaaaaccatagaacaacagatagatagaaaaacttatgtattatcaaatctaaactcttaaacattacttaataaagtaaagccaatggatttcagaacatacatcgaattgtcttcaagtttctactagctaattacaaaaattcaattggacttcaggatctaaaccctatcatgaacccaaaaagaagacctaaatcctaaggaacaaaaccgacacaaaaatcagatttttcagctctgggagctcaaaatccgtgaaagcaacacattacaaagaatcgagataaacctcaggcaggataaatcgaaacgccggaccgccattactgggaggtcgacccatggtatcttcttcgtctcaccgaagaaaaaacaaaaattggcggcagaaagtgaaatcaatcggagcttctctcacttaatattcgaattcacggtgaatctctctagtacggccggtgacccaacgacaacgaaaccggttttactcagacccgactccgtcgcttatataacttttcacctgtgtaatttttttaaacttaacatgtagtaatgggcttttaaaacccattaaaggcccattttcctaaaaccgatacaaaaatcttatccgtatggtcgagtaaatccagcttatccgcctgaaacttatttctcagtatccaaaacgatggcgaagaagacacttcgctgaagcttttttttccaaaaaaatttcttagtgtcgtcaatg

SEQ ID NO: 33419 - DNA, 3000 bp, Unknown; identical to SEQ ID NO: 2743
  misc_feature (1)..( 3000): 2750-1469P.txt file - cDNA_ID_3069522; gDNA_ID_1620585; Annot_ID_161284

SEQ ID NO: 33420 - DNA, 3000 bp, Unknown; identical to SEQ ID NO: 2750
  misc_feature (1)..( 3000): 2750-1469P.txt file - cDNA_ID_3069542; gDNA_ID_1620586; Annot_ID_161310

SEQ ID NO: 33421 - DNA, 3003 bp, Unknown
  misc_feature (1)..( 3003): 2750-1469P.txt file - cDNA_ID_3069556; gDNA_ID_1620587; Annot_ID_161329
attctcactctaccaaaataataaggtaacactttcatagaacgagaacctatgttaccgtcaactcaagtaactattttgagctttttgccacttggatttctcaattacgaacaaaatcaaaccaacaaaaatgattttacagattaatacataataacgcttcagtatcttttttctttgacaacatgcattatctgagtttaaatttggttagtactacatcgataatttacaagtacctatgctaatagtcaaaattcaaattaaaaatctaatatccgaataaatggaaatcacgtatatataaccaattacaaatagtttataaaaattcaacctttcgtgaatgattttgctatgtatagactaaaaccgtgtcaaaccaaatatattagttggcctactgttccaccaatatggatgtcgggacataccataccatccctttctacatttggtatgttttcacatttcttttcatgggaagactaagaactggattacattttatttttaatataaattagatattttatgacctctaagtaatagttgaaacctggattctatcgaggatgatcgatctttcttttctattatattttttgttacaatttttggttttacttcttaaaagaaatgacttacaaaaacagagcatcaaactttcgggtttggcaactctggtttttagcaattaaaacaacaaaattaccgagtgaaagagtctcaaaaccacgaaaagaaatgtctcgcagagtaattgttgcgtattactcggtcaacttgtttcaacaaataacacagaagattcggttcttacgttcttgccattaggtgtaactataacagcttgggttgcaataagacgaaggatggattattggttatcatgtcgaggagactcgaggcaagttgagagtcccatgatgtggcatctcaatcatgatgtgcaccatcgtcacaattaagtcatagctattgggacaacgttgaaacaatttgtctcttgttttcacatatattttacaaagagggaaagtgttatcttatctccaacaattcccaaagagcataaacgggagaggaggggtaatcgattcaaacaggcgattcacatggtgaaagcatgttttgggactgaatccgagaaccatacttgatgataccaagggatcggacttccagaagtggctgcatgttgtttgtgagacatggattaatgtcaagtagcagaggaaaacctcaacattgtggatttaagcaccagaaaactgccaaccctcttcattagtagcgttagctaaacactagtcaatgttagaagctgtccataaggaataccagaaaaagcatatattaccgtctttaagcttgaaataaaaggaaccataaaccatttctccttaggtttaggagttgttgccacatggagagctccctaggctcttcttcattagtggccaaaaacatctccatttctttttttctttttttaagttaactatgaaattttaagattatgtgacgtatcattcgagaagtcatatggtttatgttgactgcattagctaataaaactctacttaagattcatgttagtgatgtggaaattgagtcatcgtgtataaaggcatcccttttccgaatgctatgaaaaaacctaaattgatccaactaaatgggaaaccatgaactgcaactttatattatcgggatattttaggcgaaataataaactaaactcgagaatatgaagttactatgtaattccaaaattgttaaagaagaaactttatatctcaagcatatgacaactaacttctatataagtggctctttggtcgttcttaaagacatgaacatataaacaaattagaaaatgttaaaaatatgttttggtccgattaaagcagccgcgggtccactagcttgttccgactcaaatagttttcgttatcactttcttctctccatttttttcatacgacataaaagtgatatagttacactaaaaagttgttttgtcctacgcatagtgacgtgtaacaatattttaaaactcaatatcacagtaatatatgactgggaaagttacaacttgaggtgtaaaagttgcacacattaacatatctataggctatagcattggtacattttaaaaaactatagcattttttttacaaaagattacattgaattattagtaaatatataatatacataaaaactgattatgttgtaaatcacataataattgtatgattgaagattgaaatgataagcctattatcgaaaataaaattagtcaaggagaaaactttgaaagatatatgaatgagttgttaattgcttgtgcataagtgtgaacatgtaaataaacttttgaatctaggtaggtccatttactttggaattgttacatagaacacttcagacaagttatgtcttaatcactttatcggtcacccataattttgtaaaaaataaaagccacattctaacaaacttttataattccattttacatttatatacaaatcaatattctaccaactttgtgctataaatattcatcacaccacaaccattcaacactctaccaacctcttctaatttctacaatcactctcttaactctttgctaagcacttcttgttaggaaaaatcattccttaatcactctcgaagctttcacaccaatattacttccttactacatctcttcattttaaagatttgttagttactttttttttttgttattgtacgaaataatttgttttctttcagacaatgttcttgtcacacaaagaatacaatcgacttgacttgcaattttttctaaacaacaaatccagcatcgagaaaagtttctatttttggattttccaaatattaacagttatagcttcgtgacttcaagaaatatccatttcaagattatttaacctttttttgtctagcaagtcatcgtattctactttgttgttgcaaatg

SEQ ID NO: 33422 - DNA, 3000 bp, Unknown; identical to SEQ ID NO: 2757
  misc_feature (1)..( 3000): 2750-1469P.txt file - cDNA_ID_3069566; gDNA_ID_1620588; Annot_ID_161352

SEQ ID NO: 33423 - DNA, 3000 bp, Unknown; identical to SEQ ID NO: 2758
  misc_feature (1)..( 3000): 2750-1469P.txt file - cDNA_ID_3069588; gDNA_ID_1620588; Annot_ID_161339

SEQ ID NO: 33424 - DNA, 3003 bp, Unknown
  misc_feature (1)..( 3003): 2750-1469P.txt file - cDNA_ID_3069608; gDNA_ID_1620589; Annot_ID_161375
catcctacctgatataaaaatcagtgttctatcctttaagttgttcatgtattttcattccaagagcagccaatgttgagacagattctcttgctaagcttgccttatccgtttatgctgaaaacattgttagttaatccaagtattggcgtttcaaaaaagaagtgattttggtgcaaatatcttttcacagaatataaaataatttttaatcaattttacatacatgtatccgggacaaaaatatagttagattcattacatttagaaggttttttattttatttttgtagtttagggaccggccaaaagtatttcaacttaaatccaagacccaatgcttagatcacgttccgaccatggaaaccaaatccaaattcctcccaaagcatctttttagtttgagacccacttttggtaatttacgcacgtgctacttcatcaatcatccccattcatcactcatccaacatgtctatctataaatagacggagatatttcgtagaactcaaatcactcaccacataaagtaaaagtctcatctcttcataaaatagctttaaaccaatcaagtagagtttcttctcaagtctttttattttatttttatcaatggcttcttcagcagtgtctctccaatccatctctatgacaactctcaacaatctttcatgtaatcaacaatttcatcgaagctctcttcttggttcctctaaatccttccaaaatcttggtatctcatctaacggttcagatttctcctatccatcaagtttcactgccaagaagaacctcactgcttctcgagctctctcccaaaacgggaatatcgaaaaccctagaccaagtaagttaattgatccttttttgtcttccaaacttgattaaatatatgattacagagactcaaaatcaagaacacaattcacaaactgagtttgttttttcaggcaaagttcaagaactgagtgtgtacgaaatcaacgaattagatcgacacagccccaagattcttaaaaacgcattcagcttaatgttcggtctcggagatctcgtaccattcacaaacaaactctacacaggcgatctcaagaaacgcgtgggcatcacggcaggtctctgcgtcgtcatcgaacacgtcccagagaagaaaggtgaaagattcgaagctacttatagcttctacttcggagactatggccacttgtccgttcaaggaccatacttgacttacgaggattcgttcctcgccatcactggtggtgctggaatctttgaaggtgcctacggacaggtcaagcttcaacagcttgtgtatccgacaaaactgttctacactttttaccttaaagggttggctaatgatttgccgttggagctcaccggaacaccggtaccgccgtctaaggacatagagccggcgccggaagctaaggcactggagcctagcggagttataagtaactataccaactaattcatgaaattaaaatgtttctcgtatcgctgtgtaatgatataaagatttgtagttttgtgctcttatctgtaataaaatcattgaggaataatatctcgagtatgttttaagtcgtttggacgttggtacacgaatatatgaaaagtctttgtaatcttttggtcactctcaatgattttgaattaaaaatagttttagttatagaaatgattttatgtattgcacaagaaaatcaaataaaaagaactattaaataatgaaaatatatatcttaaataaaagagtataacaattgaattcttaaaaatcatacagtatctcaacaaatccaagaaacaacgaaacgaaaaattgatgtatcatttggtcgagttaagatacaaaatgaaaaattacatttttttttgtagccatcatcgacaaaaaaaaatgtcttagtcgcagattaaatgaaataaggacaaatgatggctacaaaaaaatatgtaatttaaaaccgtccctaaaggtaaatctgactcatcttaagagattgtttgatttttgatatataagtcataagtggttgactaatgtcaaataagtgacgccttttgatgacatggagaagtatgcagatgacattgattgatacggatggaatggagaagttaatgatctacatgtcacactcctcatttcaaaaatagttaacggtgattatgagtcttcatcgaatactcattttaaaggagttgctgataaaaaaaaaaagagtggatgttatgggcatgtatttaagggcatgtatttaaacaagaagttaccaatcgtagcctatgactaggattatggcatgcatgattaccatgatgtggatcaggatatagagtagagaatgttaacgcaagagacattgctagatcaagaattaactcatacaaaaatgatgaccggagattgatgatatcaaattaaattaagtaacatagactcacaaacgcatggtggtaatttgaagcctatgcattcaaagaatgttggagtcatggatccgaatagaattgttgatactagtgggaccagtccttccttgagaaaaaggatgcatgaaccatctcgtgattgtagtgctattatgtgtgtacacggcaaattgacacaaccgaaccgaccaagttatatatatgtcactaaaacagtctgaccaacaagagtttgaagacctgcaggctacgtttatatcttttgactattatagtatgttcccattactttgagatctcgtagtactcaataaatattacacggttttaagtcgataaataataaatacataaaattctctagctaacgcttttagacaattcgaaaccgagtggaaactacacaaagcatcttttgacatatacgcacgtgttacttcatcatcgtccaatataaatagactcattactaaactcaacaaccattaaaaccaaagatcaatctcttcttaatagtcaatcatatatcaaaaaatttaaactcttcttgatcaatg

SEQ ID NO: 33425 - DNA, 3000 bp, Unknown; identical to SEQ ID NO: 2761
  misc_feature (1)..( 3000): 2750-1469P.txt file - cDNA_ID_3069616; gDNA_ID_1620589; Annot_ID_161381

SEQ ID NO: 33426 - DNA, 3003 bp, Unknown
  misc_feature (1)..( 3003): 2750-1469P.txt file - cDNA_ID_3069624; gDNA_ID_1620589; Annot_ID_161373
gtctgatttacctgaagaactcctagatttaattgcaaaccgttattcctccaacattgacgtcctacgtatccgtagcacctgtaaatcctggcgttctgcggttgcgatgtctaaagagcgtcttcagtttcgctttgaacgctaccttcctacctccaacaagaagataaaggctcatctctctcccaccactttcttccgtataactctcccttcttcatgtcctaacaaaggatggctagtaagaactagacaagcctccaaaatgtatcgtaagattactctcttgtgtcctctctctggcgagcgcatcacccgttcccaccaaaccctagaccttttgaaggttggcgtttcagagattcgccaatcttacgagattcaaatattcgatggattgaaggacgaaaagataccattagattcagagatattctctaattatatcaagaatagtgacaaaataccatcaggtgtattctttagagttgctttcctagacaatattttttttgcagtcaattaccacgataataaaatatggtgttgtaagactagagaaggaagtagaagttggacaaaaattaaaaaccaagtcgaagatttctcggacattatacttcacatgggacgtatctatgccgtggacttaaaaggagcaatttggtggattagtttatcacagcttaccattgttcaacagacatcttcaactccgttggactactataaatatgatagttgccaagacacgaggctcgtggaatattgtggagatctatgcattgttcatgaacttagcataactcgaaatcatatccagaggaccgttggttttaaggtttataagatggacgaggatttggcaaaatgggttgaggttagttgcttgggagacaacacactcattgttgcttgcaacagttgttttactgtcgtagcctctgagtaccatggatgtttgaagaattctatttacttctcttattatgatgtcaagaaggccgaaaatataaaagtgttcaagcttgatgatggtagtatcacccagaggactgatatttcttctcagagttgttttcacatgttctctcttcccttcctcaactattaattacctttaatttaaaaatcttgattattaaattaaagatttttttatttaatttaagtatatttcaaatatgaatttaatgcatatctatgttacttataattaacagaaaatttaattaaataaaaactaattaaattaataaattaaatttaaaatcatgaaaataatattgtattttttttctcaggaataatactataatttaacttttcacaaaatgttttttgaaacgatcatatttcgaaattttgaatgtggcaatgaggtttagaatggaaggaaaagtaaatacatggtaaagtaaataacaatgtatgtgactgcatttataaaattataatctaataaataaaatttaaagtgaaacattagttcctaagaataatacattagagagagttgttatttattattaaatttttacataaatgaaaataaaataataccaaactcaacaatgtaattatccatcttctaaaaacgtaaataatcaagaatcattattttcatgagttataaaacaaaatatataaaaagtgatatgtaagctgttagaaaaaattctatgtaatttatgtagcacaactctttaacatgatcaaaatgaagaaaaagtttgagatttcattacttgaatcaaatgttgaatcaaaggctgactttaaacaaaatatttaaaataagtttttttttctttgagaaaaatgatagtccttatgtttttagttgatatttgaggataaatttttggaaattcacatgtctttggaatcataagatcatatgagcaagaagatttagatttcgaacctatttgaaattcccttttcaaaagtatgatttgatatgcagcggtgagaaaaaaacagagaagtagaacaaaaattctattttgttgaatagatttgagaattaattataacggttaatttacttagagaattaggaattcaaaagaaattgagccgttttataattaagttaccactaaaatccgctaatttatttacaaatatttgcttaaacacacacatgcactcgaggaaacgataatcgttttgaaatcaaatgacggggtttcagccaataatacggcgtcgtttaaccgtggagaggttggaaatttacacggtggcgtttaaaggttagttaacttagcgaaaggatttagacgatgttgttttggagttttatatgttttcttgtgtgtcaagctttgctccttaagtctgatttttttgtctaaattctcgagtttcttccatacctgtaaaaattcgttatcctaatagttttagaagaactaaatttctacagcttttctttgtgaattcgatttagtacagaataacatacataataaaagattttaaaaaaaaatcatgtctaacagagaggcatgttcatctaacaaaactattatcttttattatacacatacatatataagatgccaaatattttattttcatctaagagatgtctatctaattaaataatgtgggacaaatatgtagttagaataacgaattcaaagcttcacaagtcgcacgtttttcatttttctttctgtagtttagggaccggccaaaagtacatcaacttagacccaagctaagacccaaaaatttggaccattttctaacaacttgccgtccatggaaaccgaatcaaaaatagcatcattcgttggtgacccatttttgggatatttagcattatcccattcaccatttatcagccatcaatcattcatccaatatatatacacatagacatttcgtaaaactcaaatcactcaccacataaaaccaaagtcccatctcttaaaaaactaatcatttcaaagttttgtctctagtctttctttttattgagcaatg

SEQ ID NO: 33427 - DNA, 3003 bp, Unknown
  misc_feature (1)..( 3003): 2750-1469P.txt file - cDNA_ID_3069635; gDNA_ID_1620590; Annot_ID_161401
ttgctatagaagcttaaaatattaaagacacataatgttttaacatatttcatagattattttgaaattcagtgaaaaaactctaacatcagaaacaatcatactttttcattaacgatctcaaacttgtatacctttacaaatgttgaactttagcttaatcaagtttactttgatgaatgatgatagatatctatctgaaagtttcttgatgtaatgttttctagggcttagtgtattagagtaaaagtcgggaacatatcgtgggaattagtatactagtacattaatttagacagctaaggttacgtccaagaaaaacaatgataattttgataagattcgggggaagaaaaatgcttaatgagtaattaaatagttttttggaacttattgatcacgggagatcgatcacctggcataattatagtggccacacgacttaaaatttaaaggataatcattttgtttataagatgtatcgacataagtatgaccggacatgagtataatatgacccgcctcgttcataagattccaacgaatacgaaagagaccaagtaactaatcacatattgataagttaatactattaagaaactattaagctagaacttttagatctatgtgtggttgaatgaatatataaatcactagataacgtttacgtcaaaaccattattttttctcacatgaagatttcatcactatctaagatatctcatagtattttgtttcaaaatcaatcaaaggataaattaaaaacaagcaacaacttcatgaaaatacaaacaaagtagcacaaaacaacatcaataatatttccctttgatatatccaaaatccactgcattaggtataaatctataatcattggcgtggcgtatcacacaagtcacaacactaaactatatagtcaatggagaaatgaaatcaaatcttagtaatttccacacaatcatatgcaattaattgaaatcgtctcaacattaatttggtctttctccattaatcagagacttcgattttaatttggttctagaaataagtttgtgtttgatactgtataaaaatatgggtgctggaaccaaattaaaatgtgtggttttaatggaaaaatggactgtcaaagagagccaggctggcattttctctccgatgattgcttgtgggtcccgttgtcttcactgtcttaagcacatgcgcttctgcttacgtgtcctattcgcatttaacacttaatcatcatataaacctactttttttttgttcaccatgtataaaaacagacctcttttaatctgtaacattactacatctcacatttacgaaatggatactatatcttagtgtataatgttatttgaatagtatcttgcgtgtatatctttcttttacatgagtaatcctttaaaagcaatagataaacatggtttcgtaatgtagtggtagtaaactaatacgtcgtcttagattatccctatatagtaatcactttgacaaaatcattaatatattttagtgacttctttttgtttttaaaacagtaaatccaaacggctgctagctcaaatcaaaacagaccacatgagcaccatgtgtcgttttttaacacatcatattcttcttctctcctatctctatctatctactatcaatgtaattatcttctagttttagttatcttttcccaattgatcttagagtttttataatttgtatagccagtgaaataaataggctactaagactagtggtacatatacaatcatttataccaacaattcttaatctatatgaattagtaaaattaattcataatgtagaatagtcgtgtcggcaagatatgtttgttgttccagtcgttcaaggcaaaaacttaagaaaaaaaatgatgaatttaactgagttattattagttaagtttatagtcattatcattaacaagccaactatacagtcaattataaagataggaaacaaaaacagagataaacatgaaaacaaagttattcccaaaattatgaattaaattgaatttactaataagttataggagtgaagtctctcattaattcattttacttaggggaagaaggctaatataacgctccaaaaatctcagtgaatgatattgtctggtccttttatgtaaaattaataataataaggttgattagttactgggatcaaacaaaatgattaatattaatattaatagcaaattccaacaaacagtaagtgttaaacaaataataacatgtacttgtttcgcaactctctcttcatctcctcttcctctggtctttttttcttttgttgcgacttttcttcttcttcttcctcaggaacttaagtttctgagtccatgaagatgccagtaagtacgtttctccctttctttaattcttatttttgatttttttgtctaatgagtttggcttaatctctgtctgcaattctatgattctctcagttaaattttggtaaagaaaatcatatgaaatcgagatagcttgtaggattcttacctcagttctgtgttatttgtttgtaatcgagacctctctgcagccaaatctagaaatctgtctttagattcctctgttttttttttgtacttacaggctctgttacttggatcttcatgtcagtgtgttctgattgatgtttttcttatgaccgatgcttctgtttagtttcatagtttgaagtttatgaactcttatctctgtttatgaggttttccaagaggagaacttatcagattcccctgaatttcttccatggaaaccgaaaatataggagagttcatgtttttaatcagatatgattcttgtcaaactcaatttacgtttagctttcccggaatttcctttacgcaaacgttttttgtttcccttcacatatgactctcgttagtcatcacatataagatttgctaacatcatcagttttgatctgattttgtcgaatttagactgattttctcaagttgtaatg

SEQ ID NO: 33428 - DNA, 3000 bp, Unknown; identical to SEQ ID NO: 2773
  misc_feature (1)..( 3000): 2750-1469P.txt file - cDNA_ID_3069638; gDNA_ID_1620590; Annot_ID_161399

SEQ ID NO: 33429 - DNA, 3003 bp, Unknown
  misc_feature (1)..( 3003): 2750-1469P.txt file - cDNA_ID_3069642; gDNA_ID_1620590; Annot_ID_161398
tctcgtacccgagagcgtagctgttccatctcttgtaagaaatcctatgttcgatacactttgtttgcccacgataagggttccaaaccacaagcttataatttttttcgttggtgatgcataaaaataaaccgtgacagatatggacttgagatatacctattcgatctgaatcatctaggctgataagtttacatttaaactctatagatggatcaacattgttttgaatgccatggagattgacgctcattagataaactttgtattccgtcattattaccacctgaaactcactttcccttgctgctgcgtttgcttgaccaacgtgcttctttgtaaagctctcgtctttggatataatgttccattttttgcaagtagatcgcactgttctcagagatgtcaccggaactctagagagcacctcctctaccaaatccctaggaagatctgaaatcgccattgttgaatatgttatatgtcatactacaaatcaagttacctttagcagtgaaacaaaaaaaataaaactcttttcttttctctgcctagctagggcacacccggtggtatgcaacagaaaatttatattttctgagttaacttaagatatagattttattatgtttgatatcttgaatttccttgaattgcttttttaatttaaataatttgacatatgattttcaatagtggactttttttagcgaatctcattaattgatcatacgatgggtcctattagtgaccattatttagaaaatgaatgcacaggaacaacatgttgttcctctttttttcaccatcattagtattttttttccaaattgtaatatgtagaccccacaatattcctaatcattctttattttttgaggaatggtagaagaaaatttttccttcccaaatttgatgaggaacaaacaggaaaaaaaattaaatatttattaaataaaaattaaatttatgttcgttttatatttaatatttaatttgaaaaataatttatttattttttaatttttgttactatttattctatgttttggttatcatttacagtaacatttgttctatttttcctttatatccattccttttcattcctattttatcattttttcttttcctgtttgttcttttttagtcatgttcttcttcattccttgtattcatttataggtcaccaatcggacccgatatgttgatttaaagagagtggacatatcaattctggtagctggtaaaaagcatctatttcctttgctttcaagctcatgtgttacacaaacatgttataaagtcatttttttgtttttcatatgcaaagagaacaacaattgtatcatggacaatacagaacttctttattttcatctaaatagcaatgctaaagagagcttctaaggaaaaaagtgtctaagatgtattcggctgtttcaaaaaaatattggaagagccaacgagagattacatactaagtgaataataatggtctgacatacaaattaatgatcaaaccattattatgtcaagagcgaggcaaccatattcgattaattagttcgcactgctctaagagatgctaacgggaccctagagagcacttcctcttccaaatctcggggaagatcggacatcgccattgttgaatctctcatctccaagttaggtcaaagcttctacaactcttttcgtaccttccggctatatatgtaacagcaattgaagacacaactcactgggctaaacctgggcttcagttatcaagtcggcctcttaatgtgggaccaatacattttttgtatttgatcgtatagcaaaaacaaatgattagcaccatgtggaaacattagagagtttgtgtaattaaatttcaagtttcttttctgtcttgttatatacataaaaatggttacagtaaccttgttttttctagttatcctcatatgctccaaaaacataggagaaaacataatcatgaactttttgaccaatagtattgttaggacttgaattctcttagatttgttaattgatgatgaattctcttagatgtttataacactatgaaaatcattacttaaaaaaaaaaaaactaagatgatccatcagtcacactttaaatgttttttaaaatatgttcatatgttttgtttatggcattgcgtacataatttaattagactaattataatatcgatcaaacaaagaattattggctggatttggtcgcagccattagcagtcgctctcaactaatattattacgagaatctctagctgagcaagtatctcgtatttctcacgctctgacgaaaacttctacgagatagacgcagatatcgagaccacgtcattccccctaacaaggcaacaacatgtggcggacgccagtaaaactctgctcaattcacttcaattccatttttcgaatccgcgtgacgtaacccacctaagggtttataatccactactttgcacccccacctaaaaatgcatcacaagcgcgacaagtgtcaatacaattcagatacggagaatactctgagatcccacatctgctttcggtgggctcacccgcatcagataaaaaccctaagctaagggatcagaccaaacagtttaaccaaacgaggttatcaacttatacgacaacgaaagcacttatcaatgataagttagttaacttatcaaactacagtctgtgtgacaaaacgcatcgaagaaagtggagaacaagtcgtacttttttctttatctttttccttttttattaaatgaaaaaatataaatagaaattttgtagcatctctggggtcagctttttcttaatgttcgctttgcgacgcgaggaaatgcaaccttgaaaccctagaaaactcattctcaactacgactaaatcgatttcgcaaactttgacctacccttctttcacgataaacccagatcgcttaaattccttgaatttcttcttctgagagttttaggaaaaaatg

SEQ ID NO: 33430 - DNA, 3003 bp, Unknown
  misc_feature (1)..( 3003): 2750-1469P.txt file - cDNA_ID_3069654; gDNA_ID_1620591; Annot_ID_161424
attcccatctgaagattccttcttctctcttaaaaaacttcgtcgaatcctcgaagctatattcattgctgatcctgtgaagaagaagaagaatctgaaaatctccaatgccttagaaagtagaaaaaatgggcctgggcatggcctgttactgggctactgggccttattataataacaaaaggcccaataaattagggtttagagaactcttaaccctaatgtcgcatcatatataaagtcgccattgaagtgaagctgagatcttttcgaagagcggaagctaaggagaggcgaattcgaatcgagaagatggtgtctgggtcagggatatgttcaaagcgtgtcgttgttgacgcacgtcaccatatgtgtggtcgtcttgcttcgatcatagctaaagagttgctcaatggacagagtgttgttgttgtccgatgtgaggagatttgtttgtctggtggtttggttcgtcagaagatgaagtacatgaggtttcttaggaaacgcatgaacactaaaccttctcatggtcctattcatttccgtgctccgtctaagatcttctggcgtaccgttcgtgggttcgtattctaatctcacagtcttaaagttcttagcttagtatgtgattcttgaaaatgaagattagaatttgagtattgggtttttggaaagttgttatattttgtgtagcttgttagggtttgcatcaatggatggatttgtgtttaggttggttagttactattaagtatgaagaaatggtcagcttttgatctttgtgcaatgatgtctgtgttaggaattgtatgtttgatagtgtgatggaggatttgaaatgtgatcatttgtcatttacaggatgattccacacaagaccaagcgtggtgctgctgctcttgcacgtttgaaggtgtttgagggagtaccacctccttatgacaaggtcaagagaatggtcattcctgatgctctcaagtaatgtttctgcaactttgttctatcttgtaattttggttatgttcaatgtgttttagctgtcaactggttttcgtttgttttgttttgtttagggtgttgaggcttcaggctggtcacaagtactgcttgttgggacgtttgtcttctgaagttggctggaaccattacgataccatcaaggtatgtcccttttgtccttttcgtctgccttattattggaacaaaaggtgcttcatttactaaaattgtatttgtaagtttcctatgagttgatttgaatagcatctactgacacatctttgtcattgttctgggtcttttgctgattgttttaatttataactgaagatcatatcattgtacttagtttagtcaggagaaaattatctcacttaatctgtggaagaaactgggaatttactgttggtttaatgattttacaggagcttgaggtgaagagaaaggagaggtcacaagctttgtatgagcgtaagaagcaactcaccaagctcagggcaaaggccgagaaggttgcagaggagaaacttggatcccagctcgatgttcttgcatcgatcaagtactgaagaaaatcagcatctatcttttggtttaactcttgttttggtttttatctattcagattttgttttcttccttgtatcactgttgaagtttatcacctcatttcagttttatttatcagttgatacttcaatccttagggatgagttctataacttctaagcgtcccaattatgttaatcttctacaaatattcttcaatccaaattcactatatggcatgacagttgactaaggaactaacaaaattctcttcttcttcaggctagtttgtgtaattcttaagattttactggagatattatatcaaataagaggtgcgtaaaagtaattttatattcaaataaaaacattttgccatgaacaaaaaaaaaaggttttattatttcatatgtaagcaaggccatgaattgatcaactcacgtggtctacctgtccctctccttttggacctaaagttagctacgtggcacttccttatttccgtataaaatctgcgtcggcacttaccacgtgtcatacaactagtggagacaacatggaaaaaactattctgtcggtggacccacatcagatttttaattccaaaaataaaagttacacataaccaaactaatactgttaaaattgacagttatggttagcttagcgcttacgcgtaccgtaaccaccgctacaacaaccaagcggtcgttaaatctcgccgttaataagaagttaactaacaacacctttatctttgactagccgtaacgttaattactctccaaatctcaaagcattgattaataaaacaaatgttgactaataaaatctccggttaaacctggtttacttaccggtttagtttcggttttcatttctactccatgttaaagcaagctataaaaatggcgaatataaccatcgtgaaagctttctctctcttcttcttcttccttcttctctgcatttaattttgggtttgaatacgacgcttcgtcttcttctttctccaagctacgttccgaggaaaactttatacgtatatgtatataaaagatttgactttgtaatctgaaaacgacgtttttgttgaaagagagagcttttttttccttctttacctaaatctggaaaatttaaagaaagatttctgattttgatactccgcgatttcgtgagatcgcttgttaggtaagaaaagaattcgaagacgaaaaatgtcgaattttgagaaaatcatttctggtttttgtttttctggatctttgaatttggagcaataaaggatcagtttttatttgatgattcttgtctcttgatcttgggtttgatttaaaattacgatttgatttgatgattcgatttcatataaatctgagttaaatctacatttttgcagatacataggttttacattattatcatctgtttctttgataaaaacaaatg

SEQ ID NO: 33431 - DNA, 3003 bp, Unknown
  misc_feature (1)..( 3003): 2750-1469P.txt file - cDNA_ID_3069662; gDNA_ID_1620591; Annot_ID_161419
aatggaaaaggagatagccaacaatcctgtcaaatttgtttctgtttgagtttgtctttctcaatattgtttctttcttaatacctctctctctcttattttctttctgttataacctattaaactctacataaaacagcaaacttaatctgtttctggtttttataggactgttgggtattttctatgttcttcgtataaaactcatcaaaagttttgagagatattttcctatattatttgctagtaagagaggttttcagacgaagaaaaagaaaatcttcataaaatgagttgtttctcgtgcttctcttcaaaagttctggacaatgaaggttcttcgatgcctgctccttataagcaaccaaactcacctagtaagctctcgtcaatattcttggaaatgtgcacgtttgttattttgtctacatcttttgatttattatagaatttcttttaagaaaatttatgtttatgtatttctcttacagagagaacaacaggagaagtggtggctaagaacgcaaacggaccatcaaacaatatgggggcacgtattttcacgttccgtgagctagccaccgcgacaaagaattttagacaagagtgcctcattggtgaaggtgggttcgggagggtttacaaaggaaagcttgaaaatccagctcaggtaaaatctagacacttgtggaccaatatttttcgattaatctaaatttcgatatagtatttaacggttatatattaaaaaaaaaatgtttttgtcttacaatagaaaatagattcaaactcatttgtttattttgtttggggtatgatgatcaggtcgtggcagtgaaacaacttgataggaatggattacaaggacaaagagagttcttggtcgaggtcttaatgcttagtcttctacatcataggaatcttgtgaatcttatcggttattgcgctgatggagaccaaagacttcttgtttacgagtatatgcctcttggatctctagaagatcatctcctcggtaaatcattatttctcaatcaacatttcaatgtttttttaagaaaaaaagataacaagacccggtttggtgatcatttaaattaaaacagatcttgaaccgggacaaaaaccactagactggaacactcgtattaagattgctttaggagcagcaaaaggaattgagtatctccatgatgaggctgatcctccagtgatttaccgagatcttaaatcgtcaaatatattacttgacccagaatacgttgcgaaattatcggatttcggtttagcaaagctaggtcctgttggagacacactacatgtgtcttcccgagttatgggaacttatggttattgtgctcctgaatatcaaagaactggctatctaacaaataaatcagatgtctacagctttggagttgtgttgttggaacttatatccggaagacgagtcatcgacacaatgagacctagtcatgaacaaaatctcgttacttgggtgagtatactttattaacttatatgattttactaacggcttatcaatgtagacactatttaacaatttacaactttggtttaggcactaccgatttttagagatccgactagatattggcagctagctgatccattgcttcgaggcgactatccggaaaagagtttgaaccaagctatagctgtagcggcaatgtgcctgcatgaagaaccaacggttagaccactaatgagtgacgttattacagccttgagctttcttggtgcatcctcaaattcctccaataccggctctaaccatttgcaacaaaatcgatccaacaaatatcaggatgcagttcagtgggactcaagtcctagatatgctaattcgcaaatgtagacatttttatattttatatgacccaacaataattcacaacttatgtatcttccctttatttttacttttgggttatagtttcatctatttataatgaatttattcataattacatttatggttttctcaacgtcaatttcatttattaacgtattctaaattaatcaaacatatctcttctaaattgcataagataggccagtttagcctaggagtacactcacattccatttagaatagagaggcaaacaaactcattagtgttaatggtaatgggccgtctatacatttctgcccactcttttgagccgggcctcgtcgttcgatagggaaattgacacattgtagtcggagttcatagcttgtgatgtaaaactctccaaatgcttgggttatttcatttactgtatataaactaaacagtataataagatgatagtttttttttttttttgtgattagcaattttcaattaaacaccaactaaccattagcatttcaacggaaaaataaaaagttccaacaaaatttaaatacgtaagaatcaataaataatattgaaaatttgaaatcccatagaactgggcaaaaaatcggactgaatactcgaaccgtaattattccgaaaattggacttgaattcgaatcggaaaattcaaattcaccttataggatcttaaacatttctactcaaaaaaccgaatccgattctgataaccgatgatttagatttgttttactaatttctaaatttttatacctgatataattttatctgaactcgattacccaaatatctacccttatatggcatggcatgaaacatcatctctcaagaatatagtaatgccatgaaggaaaattggcaaataaaaatataaaatatacatgaaattctttttttttaaaagttttgtttttgcttatagtaataaactataaattaatttataattagaaaaaagaaagaagaaggtacggcggtggatattggcccttgccgcaaaagcaaaagctatcgccaccaccgtgtcataaatctcagatctctctctctctctctctctctctctctctctctctctctctctctctctctctctctctctcttgcgataacaatg

SEQ ID NO: 33432 - DNA, 3000 bp, Unknown; identical to SEQ ID NO: 2775
  misc_feature (1)..( 3000): 2750-1469P.txt file - cDNA_ID_3069693; gDNA_ID_1620592; Annot_ID_161452

SEQ ID NO: 33433 - DNA, 3000 bp, Unknown
  misc_feature (1)..( 3000): 2750-1469P.txt file - cDNA_ID_3069697; gDNA_ID_1620592; Annot_ID_161451
gcaatcatgcgttgcctggaaacattcagagacttccaacgttgtaaaaaaccagatacctactattaggcactcattttcttattgtctatccagcttgttcaaccaactttccaagacgtgcttggacatttgagggctggagcacttgaaaacttcaagaatgcttttgagaaggccttggatgctggagaagggttttcatcatctgcgaaatcctgcgctcagtcatgcatatctaagtttgataaaggatgtgaaggtatcatgtattgttactattactgctgaaaatattctgatatagatagcatgttgaaagcgatatctgaactcaatgggaatctcaaaggaaatgttatgttgcagaggctgttattgaacaagcaaaatgggatacatctaaaactcgggaaaagcttgagcgtgatattgaagctcatatctcttctgtccgtactgcaaagttggctgaactgactactctgtatgaggtaaaatagaattctcaagcagctgaaagccatacatattggtctgaattatctaccatcaaacaggtgtaaactcatatctggacatttctaatagataattttcattgcagtcaaaactaaatgtagccttatctggaccggtggaagctcttctggatggggctaatgatgaaacatggccagcaataagaaagctacttagacgggaaggagaattggctgtctatggtctctccaacgcattatctggtttcgaaatggacgaagaaacacggagtaaaatgcttgctgatctcgagaactatgcacgaggtattgttgaaaccaaggcaaaggaagaggctggaagagcgatgatgcgcatgaaggataggtgtcaccattttacttgtctttcatcatttccttgtccgataacttccatctcttacagagctttctgattaaacaaacttctatccagatttgctacaatcttcagccatgattctgattcaatgccacgtgtttggactggaaaggaggacatcagagcaattacaaaaatggctcgttctgcggtatgagacctacctgatatagcaatatctcagcacctattctttgaatcaatcgcaaatttctcgagattttgatatgacccttgttctctttttcagtccttgaagctgctgtctgttatggctgttatacgcttggatgatgaactcgacaatattgagaagacattgacgctagctctgtttaattctacgggcaacaatgctactagcaagagcatcagcacaattgattcacttgcctcaagcacttgggagaaggtgactaaaaccttactcactgtatataatgaaaacacaaaaggtctcatatttagtactcacacctttgagatataaaagatccttactgttaccttgttattatcaggttgcaccagaaaagacgttgatcacacctgtgcagtgtaaatcactgtggaggcaatttaagaacgagacagaatataccgttacacaggccatttctgcacaggtaatctttgcaatccacactttcaagcatatcttccgtttgctcattcacatgagctgatgttaaaatttggcaatgctacaaaacgtttttgaatatctttttttggtcatgtcgtttctagcttcttgtctcctttctcatctgttctttaatcagctaacacccggaaaaataattgaggtttcaatctgaataaagtctccttggatttcaggaagctaaccgacggaataacaactggctgccacctccatgggcaatccttgccctggttgttcttggatttaatgaatttatgactctcttaaggtaccctccttgtccattcttttgaattgactcggcggctttttcatacaatcaagattccgtactcactttggctcttcgtgcctgcatctctcatggcagaaatcctctatggctcttagttctatttgtcggataccttgtatccaaagccttgtgggtgcaattaaatatttcaggagaattccaaaacggcgtggtatgagcacgatatccaacatccatatttttacttttgcccctgttcttcatttgatctcaattataatctcaccgaaatgccaatgtttcatctatgatcaacaacagctacctggacttctctctttgtcaaccaaattcattccaacggtcatgaacctcctcaaaaagcttgcggaagaaggacaagcaccacccacaaatagcaaccaatcaatgaactctacagctcaatccgaggttacaaccaatggagaaagcagcagcagcagtagctctggttcatctccagcaaaaaacgtacccattgatacaagtgcatagaacaaagaagtatacaagcttaagctgttgtgctagcccacgaagctagaaacttaaaattcgttaccctttcaaaaaggtagctctcagttttggtgttgatcagagagattcaccgagagccatatgttttatgtctccgatggcattggttccctcttgcaggtgtcaaagtgatcttgtatgttcctagactaagattctgatgcagacaaaaacaaaaaaactcatgatttgtttgcgagttctgtagtgatgtggttattgtatctgataaaaagaatgttacttgaagaaaaaccggtttttgattaagtgaaattcagtttggtttttgttgattgaagagaatttcaggttctcattgcaagtttatagtgtaatcatgttagcatagagtttttgggccattggaaaattcataatgggcctaagataacggatgaaactgtaaacctaattatgggagatgcagaaacagagcacaaagaaagttccagactattagcttttctaaaagaaaaaagtttcactctttggaggttggaacttaattccttgattaagaaaccccagaaaaaccctaaacccttgaagcgtctccttctctagttctttgcaagcggaaatg

SEQ ID NO: 33434 - DNA, 3000 bp, Unknown
  misc_feature (1)..( 3000): 2750-1469P.txt file - cDNA_ID_3069720; gDNA_ID_1620593; Annot_ID_161460
cccgccagaatagttatatgaagtaattataaggacttctcaactctgatcattgaagaaaacaagggaattgagattatagatctattatgggagatatttacaacaaaaaccaatgccatcacctaacacatgagatgtcaatgattgtatagtttgcaatataatcgatagatcacaaccttttgatttttaagaaaagtattggagtttcataaaaaagaaatttatagtcagaaaatatcaaattagactgaagacgaaaacaattaaaaaaaaaaacagatttgtaaggtttaccgagaaaaaggcaatgtgtaattttatttttctataattttgttatacttattggtatatggattatagagctttcacttataagttcattaatatatttgtaatttcaagttgaatttaataaagaacatgtcaaaaaaaaaattgtttaggttttactgaaatttacctagtttaacccaaatttagagaaaaataactagattaacactaaaatattatggtttactaaaataatacaatttttttatgtaaaaataccaatacccattttatttttaattctacgttttatggttaattaaataaaataattactcaagaagactccacacaattgcattttcttacttttttttcttttttttcttcttatgtttatgaccaacttactttttatattcttatcaacattaacctcgttaattaattggtgataattcattggtatacactataccacacgatatcttacaatttataaaatttctatataatatattaaactaaagatattggtatatatatatatgtttataatttcgttgcaaagagtaggaccatttaaaataattggacgtagagatcgggagatactgatacacacgtatacacaaagataatcatttatcatttccttcagtgtgaaaaaaaaaaacattatcatttccaattctttcatctatatatataatatatatacatacatatataggaggacatacaaaggcatatttccaaaagaatattcgattgttttacatttttcatatttttttgatgcgtctgtgtatacatgacttcattggataatgttgatgtaaccttgaatttgttctttcacttttatgtttatctcttttcttttattatccacctttaatattatctttatatatctcttgctagttgaagattagcatagcattatctatagaaaaatttaaacactgtttcattataacaacttaatttttctttttaacataattataagtattttcgaaaatttatttacgttcttaattaaagtcttaagtttcaaaacaaaattatttatttggtgtttaaaactttatcggctgacgaaaataaaaaacaatttatgggctatcacaaaatgccttgaatgcgtcattgcattacgggccatgcaaagtcctatggaccatctccatgtgtggcccacgtgataatgggtcccgttattctcttcttttcttttacatcacagttctctttattattattgtcaaatttgttcacaacagttgggaacaatgtccactagttaaagtgacatttaatctaagatacatgatccgattggtaacacaaagctgtacaaaattattagcggttagttggagttataagttttttgaaaatagtgcaaaactgtataaaaaagttgtatgcgaaagctgtataataaagttgagagtaaaaatatttgtaacacttttaataaaacttttatgattgatagaaatgaaagctatacaaaatataatactttaattttgttcatcattcaaaaccataatacttgaaagttatgaaaaaaacataatacttgatttaaaatgtgcattttattaagtggttaaatttatttgattccgttttttcttccaaaatttgattgcattaaattgtattagcgcgtataataaaaattatttatggatggaatcttatcgatctaaaaatatcaacaaaaaataatctttttctaatcactactaagagctaacagataatatcatgattaaaaactaatagttgctaatgtaatcgacgtattatcatttcattaaggttcaagtttatatatttgatgttgttaacaattaaaaaaaaaggcactactactatatattttcttacttcaaaattactactagtattattcacaagcgccatcaagcgggttattaccaaggctcgaacactcacaaaaaatcgaaactctactgaggtagagaattgagtttaccaccagagacaatgcaacttggttatatatggattcgttgattagccatccaaaagcaaaataatgcagaccgaagagttgttaaggggagtgttcctccatggaggacgtggagaagaaaagttggttgctgcacgaggttgagcaagagaaaggttcgttgcaggacgaggtaaagcaagagggaggctcaatttaggacgagaaagagatttgtcatgagatacataaaattgcagagaaaaactcgtttctagtgtatcttataataataataataataatcttataataataataagtctatcaaagatttttaaaaagaaatacgccaattatataaataaaaaaattgaaatgtgcaccataaaaaatgctaatatatagtattcattcatagtactccatacaaaaagcttttttaaaaaaaaacttatcattaaatcttattatcttttacgggtgttttcattaaagtaaaataaaaataaataagaacagtacaaaactatagcttacgtatctgaatagttcctccaaatgacgatcctacccttcacaatctctctttgtttactcaattccatgaaccgctataaatacgctctaaacgttactcgtcacttggcttgcacagaacaaaccaaccttctagattcttctccttccttcttcaactctctctcacttctccagatatg

SEQ ID NO: 33435 - DNA, 3000 bp, Unknown; identical to SEQ ID NO: 2782
  misc_feature (1)..( 3000): 2750-1469P.txt file - cDNA_ID_3069743; gDNA_ID_1620593; Annot_ID_161463

SEQ ID NO: 33436 - DNA, 3000 bp, Unknown; identical to SEQ ID NO: 2776
  misc_feature (1)..( 3000): 2750-1469P.txt file - cDNA_ID_3069747; gDNA_ID_1620593; Annot_ID_161459

SEQ ID NO: 33437 - DNA, 3003 bp, Unknown
  misc_feature (1)..( 3003): 2750-1469P.txt file - cDNA_ID_3069755; gDNA_ID_1620594; Annot_ID_161498
cactgaaatgggtccccaaaggtctatatgtaataactcaaaagttgaattacaaatattgtttgaagactgaaaagacaacttcttctgcttagccaaatgacaaatgtgacaataagcagatcctttattcttgtgtttagtagtcctcaaaatgtctgaaatagcatccagtcttgagtaagctggatgtcccatcctcatgtgccataaactaacatccaccaccgcattaacagagactgaatccaatggaggtgtagtatccaacacatagaggttgccaatgcgtctacctctgccaattctcaggtccttggtaagatcctgtatttcacaacatgacggatcaaagatcactcttgaaccaatatctgaagtcaaactactgatgctgatcagattcaaacgaaactcagggagaaataaaacatttcgaagaagaatgttttcatttatctgtactgaacccactccactgattttaacacgtgatcctgttgggagattcacataactcaccacagaatgatccaaagaaacaaataggctcttatcatggcaaacatgatgagttgcaccagagtctatcacccaagtttcagtggaaagagtatgttgggatacattcaatataccaacaaagtagtatgtagagttagagaatgagataccagtgtaatcaataggagaacgtgaaattccagcatctgaagaagaagcagttggttgtgacttcagttgagaactgaacaaggctatgaagttctgaagttgatcattggagagattaccaagcagaccatctagagtagcctgagttggaaccatcggaggcaataaagagacctgagcagcaaccggttgaggtttggtacccttctctggtagtttgcctttaaaaccaggagggtaaccatgctttttgtaacatttctctgcaatatgtcccaccttgttgcagaatgaacagattggacgccctttattaggtccattctgaacatagcaaatcttaggagtcaaagcagtagaagatatcttagagacctgaaaagcagcaggaggagaaacattggtagagaaacctttctgactgtaatcctggtcaagaatattgtaaacttcaaccagagaaggcaaggctttctttgcaatgatctgtctcctgactatagagtaggactcattcaaacctgccaagaatttgacagttttagctctctctgccttctgttgcagacgaagaactttaccacaagtacaaggatcatcaggttcctctgtactgtccaacaaatcccaaagaatacgcaactgagtatagtactcagatagagaaagagaaccctggcgaaaatcctggatctcctgtgtcagattgtacgtacgaggaagattagtcatatgaaaacgtccataaatgtcacgccagatatctgtagcatcattcatgcgtagaatgctacgataaatctgcggagacacagagttcaacaaccatgatttcaccatactattacatctggaccaaaggcgaaagttcccatccgattcaagtggacgaggcaaagaaccatcaacaaaaccaatcttattcttagcatctaacgagatccgcaacgctgcactccaatcatcatagttagtctcatctaagcggatagagacgagattcaaacctggatgatcaccactgtgcataaaaaacggagactgagtcggatccatggaatctgaagtcacaacagctcgcgatgcgccagcagagagcagatctacagctggaggagagatcggaggagagactgtgagaccagtggatcgcgacgatttccatggaacggagcttatcgacgcctttgaacgagtggatttccgagttactcgagcaacagccaccatctttacagaaaaacgagtagtgaacaagaaaaaaacgagatcggagaagaagaaatctgatcggaaacaacaaaaacttagctcgttggctctgataccatattacaagataaggattgagctgagctagggagaaaacttgttaagattttcgattcttatttcttaaagagtaaagtgtacaacaatttccttatatacaattggtctaacttaaccagtcaattaaaccggagaataatctattctaactaaatcggatggtatatatactccaagagagttgttattatacctcaagagcgtaaaggtttagaacgaacacaagattcttgagctgcgaaggctgaatgaagaggtggacaaagagattgctctgagtaagtcatgtgcagcgaagattgttcaacagcttgaaaatgtgaagcatcacagttgcagataagtaagttgttgtctcagagataggcaagcaaagaaaatggtgtaacttgaaggtgctgagaaagtgactgcagaaaaagagagcacaaagagttaacggcgattccattatctgcaacattaaacaaagataaaaaaaagaagaaattttcacagaagtggacgaaaaaagatttgccctcaccgtttgtcaaagtgagaactggttttcacggtttctcttttcattcaatttcggaccaaattaccctgggaaaacttaataatggcacaaaccaaaccgtgcaacagttcgtatcggttcagttgacggcgtaaaccaaaccctacagcagttggttttggtttagttgatgcggttcagttttgaaaaagacaaaaaaaaaaaaaaactgaaacgaagaaacccgagaaaacgaaaaagagaagagagtaacggagagatttgagagagaatcagaaagcgaaacgaaattcagtatccattgcttcaaaattcgacataacttcgaattgttgggtagttgaattgagccactgaactcccacatccggggaagtgaaagttactgtttttcccggcgaagccaagagaaagttactttttattccggcgaaatttgaacctccggcgagatagcatctttagctatg

SEQ ID NO: 33438 - DNA, 3003 bp, Unknown
  misc_feature (1)..( 3003): 2750-1469P.txt file - cDNA_ID_3069780; gDNA_ID_1620595; Annot_ID_161520
actagctcatattctatatactttatccaacatcatacccatacattgttaagctctacctaacttccgttcctagaagtttggtcaacatagtttgtcaatcgactcttagtgcaaacccaatttattttctgttctaatataatagaccttgacactaatagagcaaccaatttggttgctagtttgaaatctcataataacatttggtttctcataactcggtcaaaccacgaaatcttcaggcatatttcagccgcgacgtattgttattgtaccgccaaacagaaaatttgaatatttgagggtttagttattcgaattaatttgaactcgtttgaattattttaaatattaactgttggcttgtgttcgtgtgaatatggacccaatcattattggcagttccccataaaaatactttttataatctcgataatgatataataatgcaatctcgataaactcagcctaaacaacacgttaattctattctatttgagtaagggacatcaatagaaccaacaataatgttagtatacaaatgggcctattaataacatttggttttctcataactcggtcgaacaagaaatcttcttacataactcagtcgtgacgcatgcataactaagcaatgtgactgttataactcggcaaaccctaaaagtgcttttcttaagccatcaggttgtacaatcaagtaattaacatatcatattaacttttcaactagtagaatcatgaaattagctcatattctatatactttatccaacatcatactttatccaacatcatacccaacaacatcattcctagaagtttgatcaacatagtttgtcaatcgacccttagtgaaaacccaatttattttctgttctgatataatagaccttgacactaatagagcaaccaatttggttgctagtttgaaatctcataataacatttggtttctcataactcggtcaaaccacgaaatcttcaggcatatttcagccgcgacgtattgttattgtaccgccaaacagaaaatttgaatatttgagggtttagttattcgaattaatttgaactcgtttgaattattttaaatattaactgttggcttgtgttcgtgtgaatatggactcaatcattattggcagttccccataaaaatactttttataatctcgataatgatataataatgcaatctcgataaactcagcctaaacaacacgttaattctattctatttgagtaagggacatcaatagaaccaacaataatgttagtatacaaatgggcctattaataacatttggttttctcataactcggtcgaacaagaaatcttcttacataactcagtcgtgacgcatgcataactaagcaatgtgactgttataactcggccaaaccctaaaagtgcttttcttaagccatcaggttgtacaatcaagtaattaacatatcatattaacttttcaactagtagaatcatgaaattacctcatattctatatactttatccaacatcatactttatccaacatcatacccaacaacatcattcctagaagtttgatcaacatagtttgtcaatcgacccttagtgaaaacccaatttattttctgttttgatattatagatcttgacactaataaaccaacaatttggtggctagtttgaaatctcataataacatttggtttctcataactcgatcaaaccacgaaatcttctggcataactcagtcgtgacatattggtattccactatcaaacataaaatttgaatatttgagggtttagttatacaaatcaattcgaactcgtttgaattatttttaatattaattgttggcgtgttcatgtgaatatggacccagtcattattggcggttccccataaaaacactttttgtaattttgataatgatataataaagaatattatttcgtatggaaataaggatgacaatgaggtacggcgaaatcaggaggcgcgataagggcgttctgatcgagtgtgattgcaatgctaaagttgtcgttgccacttctcgtgatcctgttacaagcggaaaactgtatttcagttgtccgtatgaaatatcagttgtaagcatcttttttgagttatgattctttattttatttcttttatttttgtatccctatgaatcaacctcttatttttcagggtcccggtcgaggctgcggtttcaagagatggtggactgttgcattgtgtgacgagtttgacatgataaaagaggagactattgtgatgaagaaggatctggaagcagccaataagcgcgtcgaggctcaggcggaaaagatcttttttatggaaaagaaatttgaaatgttagagatgaattatgagcttgaagaagtatctgtgagcatagctaaatttgattttttcaatttggacttccttgtactgtcaatttaattaagtcagccagtcttccgatttatgcgatgataactcagccatcacgttataataactcaaccaaatatcgaattaatctacgataactcagccgttacgttacaatgattcagctatcacacacgaataactcagccatcacacacgagtaactaaactaaacatcaagttaatatacgataagtccgcctttacgttagcataactcagccatcacacacgaataactcagccaaacatcaagttaatctacgataaatccgccgtaacgttagaataactcagccatcacacacacgtaaaagagagactgattatgaatcatacacacgaataaaagataaaaaaaaaaataacataaataacatagaagtactgcaattaaataacataaaataaaatacaaataacatggagatgtaattttgttatgaccaaacaatcacatccatcgccaccttcattcttcatctgattcaaaacttgaactctcggtcgatccataccccagcttatcccaatcaatactaatcaccttgaatg

SEQ ID NO: 33439 - DNA, 3003 bp, Unknown
  misc_feature (1)..( 3003): 2750-1469P.txt file - cDNA_ID_3069855; gDNA_ID_1620597; Annot_ID_161574
ctacatttttaaaattatttttatttattactgtgtcaagttttattacaaatttcataggtgatagcaattttgaaaattttcatttgtatgattaaaatgaattgctttttccatttagcaaaatatttgatcatttaaatatttatcatgttttctatttgtgaaacaaaaaaatagaatggagaaagcatctttcaaagaaaagagtagtgtagccaaaatggttgggacaatagtttcactagttggcgcacttgtggtagttctctaccatggtccacgagtcttcaccccatcttctccaccatttccacaactccgtcagcttcttttgccgttatcatcctcaaactcggattggatcatcggtggttgtcttttagccatcaaagacaccctcgttcctgttgcttttattcttcaagtaataacatattaattctcttaacttgatacatcatacatacttgcatgtacataaactaaattttccttatagtagattaatattgaattggacaggcacatataatgaagttatatccagcaccattcacggtctctttcttctattttctgattgcttcaatcttgacgtcattgatcggaatcgtagcagaaaagaacaatccgagcatatggatcattcattttgacattacattagtttgcatagttgttggggtacgtaaattttaatattttagaaaacttaattatatcttaaacttcttttcaatactatagctatttttcgcagggaatatttaatccaggatattacgcgattcatctgtgggcagtacgtaataaaggacctgtttacttagctatattcagacctttatcgattttaatagcagtgattatgggagcgatttttcttggagattctttttacctaggaaggtatatgtatatatgaatcaataatcttcagacacacttgtttgtgaaacaagaaaaaccacacatctaatctaatggtttcttgttatgtggttaatgttgcagtttggtcggagggattttgatatcgttagggttttacactgtgatgtggggaaaagcaaaagaagggaagactcagttcttgtcgctgtcagaggaaactcctcttctagacgaaaacatagacgaccgaatatagatttacaagaatattggaaacgatgatttaattaatatgattagctctttgtagaatgtgtttgtgttgatcgagattaggagcactctattagtaacaataaaatgttctatatagctttgtaactgaacattgaacaatatattttgttactcatttttgaacacatgttacggacaaatgtttttgaataatatgaaaatagattgagagagttgggaaaattggaggaagaagaagcgacaaacctgtcgctaccttcatcaagaatcataatatcagtgacctctccccatgaagagaaatgtttacaaaggctaatcatgatatcatctttagaaagcgaatactcatatcacagggaaaaacctaataatttgactgcgggagacaatattatcatgtgaaaaaaaaaaaaaaaattatcaacaagacaaaattacaaaatattaaattaataaataatctcgtttaactataaaatcaaattttaatatttttgtataaattcgaaccgatatttaatttctttatgttgtaaaacataaacgcaaactgtttttttttataaattcgaactgaaatttaattttgtttaattgtaaaatttaaattaatttataaattcatatataaactaatatataactcgatttaatgacatattagactttataattaaaatgaatttaattttttgtagatggtagattttagggtcttttgtaaaactaacatattttgataaagtatttaagaatatagcagtataatatggtaaactaaataaatagcacacatgagagatgaaatgtctaaatactccttcatgtttgtttcagtgtgtagacacacgggcgtgagattgtaagctgatgatttcatgtgttatagagagtggagagaaatgagagtttgtgagtttggtaagcacacaagacgagaaaaaaggtgggataaggagaggtgatggtggtgtgggcaacgacgacggtgatggtgtgggcaacgacggtggtgatattgattgcagtggtggtcgtcgcggtggtggcggtgactctgatttcaacaccatattgcagcacaataaaataaaaaaagcaattaattccagaaatcagatactacattctctaatgtaccaaacaatgcaaaagtaatatctgcaaatcgtggatgtcaatttttgtatctagaagtgatatagtttttactaaagtctaaagactcatactatttagtaatttttggataaatagtatactatttacatcaaatctatggtttctgttatagtcctgatttctcactcctaatcatcaaagttcatgaatcgacacttgtcgatttgaatcagatctgtttcagaagtagatcaatcgaatgggagttcgaaatatggtgtttgtgagaaggagagtaaatgaaagagacactagaaagagcgagagagaggataagaaacacatagaggcggataaaggaggaagaaaaagccaaattctggaatgagaagagagataggcgaagagcgtgttgttcacatagggttataactggaattaatacagaagatataaagaatatcaccttcttttttgttaggtgttagttttctaatttatatttttttgtgtgtttcttttgcaaatttccctagattttaattggcttaaaaaaaagttgaatctttattactttgaaaaacttccccttttctcctcctccatcactctcagggtttctcggttcaccaaaaactcctaaatctctctctcagatcgtcactacccttttcaattccatcctcaatcttcaaaattcccaaacgaaatcaacaaaagatg

SEQ ID NO: 33440 - DNA, 3003 bp, Unknown
  misc_feature (1)..( 3003): 2750-1469P.txt file - cDNA_ID_3069857; gDNA_ID_1620597; Annot_ID_161572
ttttgttttctttgactaattattaagtttttgctgatttcaattttagtttttcggattattctagtcaacaagtcgaaattgtaaccattccatttccggctaatttaattttaataattataatagttttttatgttaaccgaaattaattaaactcaaaagaactaatcccgaaagatattgtttacatatgtgatgaagccgttcgctatgaatttttcgtgcattataataaagttctttagaataattacttcaaagttcccctataattttttcaattcgactatttttttttccataaatcatgttagttttcacttcactatattcaacactatagtttgctaaccaattctttaccactagccgccttacccctatcccacaactgtctcatactcttatcagtaactaggtaaataatctatatttatggtaaatgcgtttaatatgttcttctttctttctttcaatgcatacattaattcaggttttcggcatctatatttatggcaattgatatgaagatttaagttactatcgcactattgctcaatcttgtggtccaaatcatacaaggctgtttgcatgaatgaaataaatgcgtattaattgtgtttgatcattgattatttcttagccttcttttggaataaacacttaacacactaaatttcattttgtgaataaagaatggaaaaagtatctttcaaagagaggagtagtctagccaaattgatggggacgatattgtcactgataggtgcacttgtggtgattttctaccacggtccacgtgtcttcctcgcatcttctccgccctatgtaaacttccgtcagttttctccaccgttgtcatcttcaaactccgattggctcatcggtggagctcttctaaccatgcaaggcatattcgtttctgtttctttcattcttcaggtaccaattttttttccttatatatagtagaaataattttaaatttatggttaagtcaaaaattagtcattaaaaaaggtggaaacatacgaacacatggtttagagtagacctaggcgttcagatatttggttcggttctagttcggttccaattctttcggctctcgagtttaggattcatataggaactaaaacagttttggtttggtttgggttcgggttcggttttttcggttctgaagtttaattaggacccattcggatatttatttcagatattttttagtattttcggatattttcgagtatttttggatattttggtatttttatatatttttcaactatattttcggtatttttgaatgttcaatctaaaaataactaatatttttggatatataatcatatttagatattctcggatacccgaaatatttcagttcggttcgggttcggttccaattattttggttctagaatttaggattcatttgagtattttaccattttggtttggcttcggattcggttctttttgctttggttccagttcgtttttttttggttcgggtattatgcccatgcatagaggggtgaactttggtttttggttggagatgatgttataatacatgtgggaaaacacatatcttcatttagtaaacatcatttcattctaatatttattctatataatgatttttggacaggcacatataatgagtgtatatccagcagcattcagagtctcctttctttacactgtatgtgtttcaatcgtgacctcgacgattggactagtagttgaaaagaacaacccaagcgtttggatcattcatttcgatattactttgattacaattgttaccatggtatgttatatatatatatatattttaaagatatcaaaatatctactttttgatcttaacacttttttaaaaataaaatatttcaggcaatagtaacttcagtatactatgtgattcattcatggacagtacgacataaaggacctctgtacttagccatatttaaacctttgtccattttaatagcagtggttatgggggccatttttctcaatgattctctctatctcggatggtattaatgaatcaatagtcttcataaacatatctataaacaaaaacatctactcaccttcgattttgtccttcgttttgcagtttgatcggaggaattttgataacattaggcttttacgctgtgatgtggggcaaagcaaacgaagagaaggatcagttatcattttcagaaaaagagaaaacgcctcttctattaaaccgcaaaaacgaccaagtttaaaaagaaaaagaatatagacaataaaactactaatagttaacaaatactgttattaataccatatttataaaattgtcttatgtctctatgaacctaggagttggaaaaaaatgtgtgtatttagatttttttttcaaaatactccaacatttataaatacgagttaacatttttccttgactcctttggaacatatgaaaagcttaaattgatattctttgaagcaatgataggtaactgcaccaagtatatatcccggtatagtcacacatcccaagtttagtgaactacacgaattatgtgtattgtatgctaatgtataccaattagtaacatatgatcaacaccatcatattccttttacaccgtttgtcaaatccatttttaaaaccacttttggtgaattacgccgtagaaaaacaagtctaacacattgtaacattttgaagtggtaataaaatttctgattcaaggtttcaatatctataattattgaagtggtttcaatatccattattggatgatcatattttggcacaactgttttcaagtctgcgcaaagaatagggaatcttataataaattcaagaaacaacaattattggacccacaatacaccacttcccctctaactagtactatcataaatgaaaagcaaacaaattaagcgataacaaatcaaagactcacatttcaacaccaaacctttctaccatttccaatg

SEQ ID NO: 33441 - DNA, 3003 bp, Unknown
  misc_feature (1)..( 3003): 2750-1469P.txt file - cDNA_ID_3069861; gDNA_ID_1620597; Annot_ID_161571
taggacaaaatcttttgtcactaattgatttcttacaccgtagctttccatcaaattgaaatacacacacaaacacaagcgcatcacgtttcacggctacaataatgttcttttagattttgttattttcctaaatactgacgtaaaagtcatatccaatataattgttttgtcttttcaatttctttttatgggcagacccaaatattatgcataaacattatatattagaatatattttagttgttagtgagctaattaggttttattgtatggcgtgtggaaacggcatgcttccattatatgcgaatggtctaaaccatgtgttttggtattcaattattatatagacaattagttaggccttggcttttttttttgcgattatgatataatcttatgaacctgataaagagaagatctaatcttatgaacctgataaaaagaagatctaatcttggttcattaaaataaggtagtattaaatttgtacggaagttgataagttgtatacctaatttttttttttttggtaaaatgtaaagtatttagggtaaattagctaaataaccaattcctgaaaagaaattaaatatctagcaccataagttgccgaattcagagagtaacgcatgaggtgtgtgtaatgacaacacactctttcaccacacactccttcacccaaattctatacatatcatcatagaaaaatagaatagtatatatttgttcaaaccaaaactttgattccgatgaatccaaataatcaattatatattttttgatggaatgatactaaaccctaagataatatatagggaacctaagggttttaatctaaaacaatgattaaatcacttaacatccttaatcaaaacaaacaattcattttaaaacgtatatagtacaatgtatacgtaaatagtatattcacaaaatagaatagtatctctcaaaaatcttccaaaatcaaaatcgatttattggctatttccctttagaatttccaacatcgtaaaccctttatcgcttctagatctaagaaatccataacatgatcgtcaatttgttgttcataattctcaattttattttccatggatttacaaattaaaattctcatatgaactttgatgggaaagtgaagattaatttgacataattggcgaaaggatttcaccggatttttctagtattctctggctgacgaagaataaatatagtcagagtattattgcgctaatggtgttgttataaaatagagtaaatcagatttgagtgatcctatcgacatttaagattgatccatatataattttgacttttgtttagttgatggtgatgtatgtaaagattcgtaagaaaagggcgagatagatgaaaggagcacacttcataaaagagaagaagatttattcacaaggatgtcttttgaagaagaaagaagaaggagagcgagatgtacaaacacagtaagaaaagggagagagagatgaaaggagcacacttcataaaagagaagaagatttattcaataggatgtcttttgaaaaagaaagaagaaggagagcgtgatgtacaaacacatgatagtattgtcaatattatatatattatacataatatttttttctattgtttgaagtgttagtttaccaattaaagtatttttgttggttatatttgccaattccccaagtatttataccattttcgaagtttcgacataagttaaaaaggatataagaaccggaaaaataacgaaaatctacagaaagaacagacaatgacaaaacaacaaaggaggaaaacatatgtatagagcgaaaacaaaagaagaaacaccgattccaaaatgccaaactcggaaatttgcgtgatttcctccacaactccaagaagctggagtctcatcctaagttgtatacctaatttgtttacagaagttatctatggtgctaaaaaaaatggttttaacacttgaaaaaaaagcttttactaaagttatatatatatggtttagtggttttctttagtgtatgagtcgatatgagaggacagtaaaagataaatcattttttatataaaaaagctgttgaatattatttgttatttgtgataaacaatttgaatagtaaaacatgttacataatttctttagctagtgcttatagaaaattgattttaaaacaaaataaagataaaagttagtttctattcaaaaaattgaaaatgattgccacatcatttaaaactaaaagttaaaaattaaaggtaaaattggttttttttttttgaaatcgctttaattgtaagggtaaaagtggatatttgtttttactgaaatcatgagtatgaaaataacagcaattttttttggataataaacgcacattttaattattatgtgtattttttccaaccaaaaataattgagtattcaacgtctagataaaaaagagactgagatttttttcgactttttctccaaaaaaaacgaagttccaaaaataatgatgaaattagtagtggtaaatggtcaatttaaatccgttgctacaaatcaaaatttaaatctgtaaattaactaaatctattaaattattaatgaaaaccaatgtaaaaagaatctcaacttctcaagcatactttgtttcaaatattctactattcaaaatactcccttaaatcataacctgaaactcacataagctgatccaaaattgaatttcattccacaatttttctcttaaacttcatataaacatgtcagcatgttacacggccttttttgtctgcttcatatatctctcaagtgtgtgtactacacaataacatttcctgaaaatctaactttcacccactcaccatcttttcttctctctttccccatcaaaaaaaacaaaaacaaaacacaactctgtttctctcatcttaaaattcatgtaaaaaaaatctacaaatcaaagagagaaacagagtaaagagaaagagaagaagatg

SEQ ID NO: 33442 - DNA, 3000 bp, Unknown
  misc_feature (1)..( 3000): 2750-1469P.txt file - cDNA_ID_3069867; gDNA_ID_1620597; Annot_ID_161566
tttacaataaattttgccttcaaggtttttttccttcttaacaaaaaaaagcacttagaatgaaaccctgattacaatttagtctttgaaataggttagctaatagtcaagctagatgtagatatcctatataatataataatatttccaaaagatgtaaccatcctatatgatgaattaccttcttattttgttaggtaaaacgtattaaaattaattaattgaaatctatagtgtataaattaaagttatatctatatagaacattaataagctatcatatctaatctatctatctatacaagaaaagctttcgattattatcaactttagcatactatatatatatatacatctactatatgaaatttaggtcgacacatttcttcttagataaatcagcttagatcattggtttttttacaaaacttttcatatcttctatatacatctttactggtgaaaaaaatatcaagatagtgaattcagtaatcaaaatacgatagattattactactatatattatgcagttgaactttactttattacaaattcatcaaatcttaaactacatcaacaacattgttcagtagtcgtttttggttatgggttataatattttattgtttaaaagtaaaaaaaaaaaatcattgtggttggacttgttggtttgaccattatagtgtgtgtgacattttgtcaagcaatcaccctagagaagaaagctttatacacgagatttttggtttccaattccatttcgagagtatttttacgcctcgaataaatttttgtactagaagacaattaatatagagttaaaaaattcatcactatagtaatagataagttagtataaatcataatttgccaaacgaatattaatgacgttgtgatgtggtgaagagagagcattaatgatgcacaaaccaaagcacatcactttgaagaataataagtgcatgcatgaaataattgggtaaagaaatccgttgtaaaacaattttttggtgttaaataaattttacattcaatacaagaaaaaaaaattcgtagaataaatttataaacttttggtataaacttttaaaaatgttcttagaataaattaataaacttttggcataaacttttaaaaatgtttttaaaaagcaaatcgtttaactttttttgtattcctttgataaacttttttttggttacaaattttcattcgataaacttttggaccaaatgcttttgtttgatgttcgtttgctgactttcgcatatttgttctcaacttagtggttccacggagatgacgatctgcccccaacatatacaaacatatatagtgaaatattttagtaagtaaaatttagaatttgataatatgatccattgtcgtaaattgtaaataatttaattgttttaaattttttaaacacccatagagtaaaaagtgaatgtaaatagattttgttttggtaatccaactatataatattttgttattatatttttttacaacagactgattcttgaccgaaaccaaaaataatttgtctagtatgtgaaacagacttttactatttgaaatatgcatagtagaaaacaattattgaaatcacattagaaatattcgaaccattatgaaacgatttttcataataattttgatcaacaacataaatgtttaactgaaagactagctatgtgaatagattagtattttaaatttttaatagtataactttcttatttcaatcttgtttttggaagaaaaaaacatccttttcaccatgtaatatctcagtaaaactaattttgtatcttaataaacaattgatctagttgttggtataccttactcatatcactacgaaaatacttattctatattcaaattcaaagctaaaaataaaaatctatttgacaaaaaaataattaggtaaagtgcaccggccgggaagcaaatatattattgcgatttttatcgtccatagatttcataaaagatcgttagcaatatggttacatcggcatcaaaaactcgaaatggacattgtcgcatgcttactttattttatattaaagttacaaaaatcatttgtttgtctaccttctcacaacacctgtaaagtcatttacctttcgcttcgaaactttatttatcattagaaataatctaaataagtgtattagttatttcaatacagacttaaactcgaactctttatatcattacttttgtaaacattcgtttaatttgtaactgtaatatgaattaatttaactatcgcaaacaaatgagatgtctcctaagcagagaaaatatatactataaatccatgcaaattaacaaatattttaccatataatatatatatatatatatatatatattataatataacaacgcatatttaaaattcgtccaaaaagatggaaaaggagaggaaaatatatcttacgtgatttgtttctctatcagagtgctcgcttacattcacgtcacgtggataactttttgatagtttttatttttaaatattcaaatatggtcgtgaataagaatattacaaaggaacttgcatacaatcacatgcatgtgaaatatacatgtatatatacatatacacacgtatactatgtaaggtaggcataatagttataatcatggatccaaaaataataagccaacgagaaagtgttgaaagatattcagataaatgtcatgattgtttccccaaaacggaaaaacaaaaattcaaggtcgttttcatttcaattcctttacttcttgagttttgcttcgtcatcaatacatatacacatacttatatcatagtggtatacatgagtatctatatttatacaaacatctcatcttctatctataaatatatgcaaaaaccatacaagtttaacataccgaattacatatatatctcgctcgctctcttctttgttcttgctccttgttctagttcggatttttcttttgaagtgaaatg

SEQ ID NO: 33443 - DNA, 1998 bp, Unknown; identical to SEQ ID NO: 2796
  misc_feature (1)..( 1998): 2750-1469P.txt file - cDNA_ID_3069894; gDNA_ID_1620598; Annot_ID_161585

SEQ ID NO: 33444 - DNA, 3000 bp, Unknown
  misc_feature (1)..( 3000): 2750-1469P.txt file - cDNA_ID_3069948; gDNA_ID_1620600; Annot_ID_161640
gtttacaacctcagtcaaaccttcatcacttggactagtcaaaccttcatcacttggactagtcagagctgcagcagcctttcccttgcctttcttttccactgcggcttttcttggagcttttaccacagtagacggagctttattagccacaaagctccggtgtgctacatcttcattgaacaacggttcaaaacatatagtcctctcctcatcaactagacgtttcttccaaccatcagctattagatcatcgacatcattcactccacactctttatccataattctttccaaaagtagcttctcatcaggagttggagccaagatactctgaatgtcctgtgcatgataagaaagtaattaatatagcatacatgatagaacatacatgatacatgatagataactaataaatatgtcatcactaaccttagttgtaccgagtttgtcatacacatctgacattggaaaccctttcatagtgcttgatttaaacttcattttacacatccggggacactgaggatctgcggattcaatatcttcgcagaaattttccctgagaactgggatcgcctcaaatgctagatactacataaaaacaatacaagatttttcaaaaactaataagtataactgctaataaaaacacagttgtacacagtttaactttcttaaaacaattcataaatgcataatgaaatgacatacctccaaaggcataacaaaactaggaaacaccttttgtggaccaactactccattgcactttttcatcagatagaaaatgtctttcacatttttttcaaatgcaaatcttccccacggaaatgttttgcacaactctagatcagccacagccctaaggaagaacttctccacatttggtgcgtttggtcctgtcttaccctttccaacgattacactacataaaaaatatagtacagctaccctcagacgagcatcagaaggttttttcatagacaataacttattctccacatcaagatactgaactgttgctccgagtccaaacatcttgccagcaaaagtggtacagcccaagctgtccaagggtttgggataattatggcagtataatcctgacataagtgcaaattcttcgagagaataccggatcggtacgccattgacaataaaccatacttccttcttcttatctaaacatgttgtacgaagaaataacagccacatacccatcaccttatgatttggatccttatgcatgtggaagaagtgtttgaattgtgggtgctccaaaaaccacttcaactcagactctttaagatgagtctccaataatccgactgccttatgaagataacactttgctgtaatcttgaatggctttgtatactcactcggaccgaagtacattttaagaggttgaagagcttcagtttcctcatcagaatcctgcaatcaacatagatatacctagattatacatagatataccttttagttttgaaaatttataagttagattcgaatatagatatacctagtttatacatagatatacattttagttttgaaaatttataagttaaattcaagtttagatatacctagtttcaatatagatatacattttagtttcgtataatttaatggtagaaatcagcatagatatacctaatttgaaaatagatataccttttagtctctaaaatatctaagttatattcgaacatagatatacctagtttaaatatagatatactttttagtttcatataatttaaaggtagaaatcagcatagatatacctaatttatacatagatatattgtttagtctctaaaatatgtaagttatattcgaacatagatatacctagtttttagtttcgaaaatttctaagttagattcaaaatagatatactcaatttatgcatagatatactaatttatacatagatatactttttaaaatttctaagttacaatatcaacaaagatataccaaattcatacatagttatacttttctaattgtgtaaagtttaaagttcataccgctctatcgtcgttagagattgaatttgttgcttcagaatccacttcaacagccgacgctactactacttcgtcattgattgtctgtgaaaccaccacctccgccgcggacgccaccgccaacggcacacatgcgttctttgttcgagccatttctccaaacctacaaacaaaatcatttggattagcactactcttcaatcaatttcgatcacaaaacccaatctgaaacaactcgaatcaaatcgacgaacagttaaatcacttaccccaatttcttagtttcctgtagatataccaagatcgacgaacagttatattgttgtcgttgacgagaattgagaatgattttactggattttacagtgaagaaataaagaagaaacaaaggaaaagagatgtgaatcgattttaccgcagagaattaggggaattagggttttatttggatttgacccgaaaacagtggacttggattattttaggatccatttgccctggttgggttgtaattaagcaatattcttagggttttctgagtaatttacttcgtttacggaataaaaaaaatcaaaaacaaatttttataaaaagagtatatgagattactcttcaaccaagaggagccgctgagaatttggtccccttggcacgtataaaccctagcagagacattaaaccctgaaagtaattagggatcactgttctccggctccggcgaaaaaatccctcgaaatcgtaattctctcatacgtctccatttctgggtttagcgtttcagcagcttccatttcagattctgaaattcaccgaattttctctgtcttttgtgtttattctactagaagattcttacggcttgttaaaatgattgttgatactatcactgtcgactcttatttgtgttgtgttgcttttcaggatcctaacctcaattgattgaaggaagttatg

SEQ ID NO: 33445 - DNA, 3000 bp, Unknown
  misc_feature (1)..( 3000): 2750-1469P.txt file - cDNA_ID_3069964; gDNA_ID_1620600; Annot_ID_161639
tcaaccaagaggagccgctgagaatttggtccccttggcacgtataaaccctagcagagacattaaaccctgaaagtaattagggatcactgttctccggctccggcgaaaaaatccctcgaaatcgtaattctctcatacgtctccatttctgggtttagcgtttcagcagcttccatttcagattctgaaattcaccgaattttctctgtcttttgtgtttattctactagaagattcttacggcttgttaaaatgattgttgatactatcactgtcgactcttatttgtgttgtgttgcttttcaggatcctaacctcaattgattgaaggaagttatgtattcgctttcgaggattctccaaaggtaaaaagctttctaatttataaattttggttttttttttcaatttttagagctcttgtgtgtggtttagcagcaagcaaattagatcttctcttatggggtttgttatgatttatttgaattgaaagttttattttttacttgattgtgtcatttaggagtcaaagatataactttgcaccttcttcgtttggtgcggtcagtaaattagaagtatcaagtggtggtgataaagaacgggtctttaaatcatttggattgatttatagcaaacctcaaggtttagtcagactttattccgcaagagatgtgttttcacggttctttggcatccacaagctttcttctatagctgatgctaaagataaaggagatgaggtagttagggaagaggagctgtctgaatcagaggaggcggttcctgtttctggggatgtaccagagggagttgttgatgatgattctttgttcgagcctgaacttggtagtgacaatgatgatcttgaaattgaagagaagcattcgaaagatggtgggaaaccaactaagaaaagaggtcaatctgagctgtacgaatccattgttgcttataaatcagtgaaacatgttcttgaaaaatgggtcaaagaaggaaaagatttgagtcaagctgaggttactcttgctatacacaatctgcgtaaacgcaaatcctatgctatgtgtttgcaggtaaatatgttctcattttacactttgccaaatcttttattgttctgtctctatcaccctcttaatgtgtatgtctttgcttgggctttggcatttgcagttgtgggagtggttgggagctaatacgcagtttgagttcacagaggcaaattatgcttctcagttggatttggtggccaaggtacatagtttacaaaaagctgaaatctttttgaaagatattccagaatcttctaggggagaagtagtatacagaaccctgctggcaaattgtgtacttaagcatcatgtaaataaagctgaagacattttcaacaaaatgaaagagctaaaatttccaacaagtgtgtttgcttgcaaccagctgcttctcctctacagtatgcatgatagaaagaagataagtgatgttttgttgctaatggagagagaaaacatcaagccgagtcgtgctacctatcattttttaatcaatagtaaaggtttagccggagacataactggaatggagaagatcgtggagacaattaaggaagaaggcatcgaactagatcctgaactgcagtctattctggctaagtactacataagagcggggcttaaagaaagagcacaagaccttatgaaggagatagaagggaaaggtttgcaacaaactccatgggtgtgccggtcattactcccactttatgcagacataggagacagtgacaatgtgagaagactgagtaggtttgttgatcaaaatccgagatacgataattgcatttctgccattaaagcatggggaaagctgaaggaagtcgaagaagcagaggcagtgtttgagagacttgtggagaaatacaaaattttccctatgatgccatattttgccctcatggagatatacacagagaacaagatgctagcaaaaggcagagatctggttaaaagaatgggaaatgcagggattgcgattgggccgtcgacatggcacgcgcttgtgaagctatacatcaaagcaggagaagttggaaaagctgagttgatattgaacagagctacaaaggataataagatgagacctatgttcactacttacatggcgattcttgaagaatatgcaaaaagaggcgatgttcataacacagagaaggtattcatgaaaatgaaaagggcaagctatgcagctcagcttatgcagtatgaaaccgtgctcctggcttatatcaacgccaaaactcctgcttacgggatgattgagaggatgaaggcagacaatgtgttcccgaacaagagtctagctgcgaaactggctcaggttaatccgtttaaaaagtgtccagtgtctgttttacttgacatataacgataatcatcttatgtattgagctgttaagtgtttgttctggttgcttccaagctaggaaataataaacagaggattcgtttttcttccaaagtttctcatttttgagtttgtgttcctgtggttttttgtaagtgacataaactggaataaaattgaactggactagaggtacgtggaaaaaattatcgaaccgaagcaaaaactagactagtagaaattggaagacgaaaccgagaagttgaaccgtaaataaataaacacatcagagccgacatgaaccgggttgggtatatccaatgacgtgggacccagcagattataagagaattgaaaaatacaaaaatgcggtgagcgtggatcgaacacgcgaccttcagatcttcagtctgacgctctcccaactgagctatccccgctttgttgttaccttaacgatacgtcaaataattaatctctagtttaaatttctattttctcaattattccttttgacttcgccgcttgcttttgagagacggagacaaaaacacacacgacgaagaaatctccgggcggtcgaagaagatg

SEQ ID NO: 33446 - DNA, 3000 bp, Unknown
  misc_feature (1)..( 3000): 2750-1469P.txt file - cDNA_ID_3069996; gDNA_ID_1620601; Annot_ID_161659
aaaaggttagaactttcttagatctttcgatttcttgatttagacccacttttcgaattctgattctcttcatttccattgattttttcttggtttaactctgtttctccagtggtttgacttgttactgaattaaaaattaggttaagattttgatccatttactggtttcgtaggatttttgatctgaagattctgatttgggatctcaaatggagaacgttgatgtgtctaagtacatacacagctctgtgcacaaagctgttgcttctaaagactatgttggtctcagagcaatactgtcttctcttccaaagcctaaagatccatgtgagattcaaacagaagcagcttcattatccgaggaagcaaaatccgataccatttcagctgtgattgatagaagagacgtcccaagccgcgacacgccgctacatctagcggtgaagctctgtgattcaacatcagtagaaatgctaatggttgctggagctgactggactttgcaaaacgaagacggttggaacgcgttgcaggaagctgtttgcagtagacaagaggcgatagcgatgattatagttcggcactatcagcctttagcttgggctaaatggtgtaggagactacctcgtttgatagctacaatgagtaagatgaaagatttttacttggagatgagttttcattttgagagctctgttgttccttttgtatctaaggttgcaccgtctgatacttataaggtttggaaagtgggatcgaatttgagagcggatatgactatggctggttttgatgggtttaagattcaacggtctgatcaaagtatattgtttcttggtgatgggtcagaggatggtgaagttgctcgtggatcgctttacatggtgaatcataaggataaagaagtgatgaatgcgttggatggtgcttgtggagttccatcagaagaagaagttaggaaagaagtggctgcaatgtgtaagagcaatatctttagacccgggattgatgtgacacaagcggttttatctccgcagactaattggaggaggcaggagaagagtgagatggttggtccttggaaagctaaggtctatgagatgaacaatgttgttgttagtgttaagtcaagaaaggttcctggttcattggctgtagaaggaggcgatgatgatatctgcgatgttttaacagatgaagagcaaaagcaactagaggatgctcttaagctggatttaccagacttcccaaatgtcaatggtgagaatggtttcattgttcatcatcaggaagatcatgttgaggccaacaagaaagcagagaagaaagggtggttaggaggttggagaaagaaagagactaaacaagagaagcagattcaatacgcgccaccgagaagctctctttgtgtgaatgagaaagtaagtaatctattgggagagtctaatcagataaaaccaggaagacactcagtagataatgagcattataggaaaccaaaagcattggtctctgacaagactcgccacgaaagcgaatataagaaagggctacgtcctgttctttggctatctccaaacttcccattacaaacagaggagttgcttcctttacttgacatacttgcaaacaaagttaaggcgattcgtcgtcttagagaacttcttaccacaaaacttccctctggaacatttccggtcaaggtatgttgtcgtttcatgttaagagctaatcttaatgttcttgaagatgagtttttttttctttttcttatagagattgtttgtgaatgtaggttgctattccagtggtacctacaataaaagtgcttgttacattcacaaagtttgaagaaattgagcctgtagatgagtttaagacgcctctctcgagcccgacttcttctggctatgagagtccagctgctgcaacaactgacttcaccaactcatcatcgtcctcctcgtggtttcgtcggtctagatcaaacaaagatggtgggagtagtaagtcaaaaacattacaagacccatttgctatacccacaggttatacttgggtcagtcttgaatcaaagaaaaggaaaccaaaaaagggtggtaaaaaaacagaacaagttagctaaccacttcaactcttgagaacataatactaacctacacaggttttcttcatgagatttgtgaaaagacattgaagaaagggtgagaaaggcataaaaattctgatacaactttatttgattattttgtaacatagctcagacatttgcaatgaattgttttcctttccattgtgatgtaaaaacatttgttctgcgtcttttgtatcttttttttattcttcttattcaatatgcttggaatatgcaacacctgagtcgatatcttggaaaaaactggagccgattaaatcacattctagtgtaattccaaataagtttgtagatgaggtaacgtttgttcttgaattttgactattttagatgttgaggactatatacggattgtcttgaggaggaaggcattttattaacctaactacttcataataatctaatttcaccaacacaaaataacccattaacacttgggccttcaattcaacaccatggcccattggcctttttcttctttcttctttctcttacgatccttttctctttgttgttgcagtctcttctcatcttctccactcttcacttgatctcatcttaaatacgattaagtataggatcaatttccaacaaaaatctggaattcaccagagcttcatcctcatcgcgaaatcgacccgccgtaagtcttttctctaatctctactctctacttgtcgatttgatggttgtttggtttaatcgattagatatagagctgtcaaatggtccgtccagagactattgggtgtatccgtacaaacaatttttttttatgggccaagttggacggttcataatgaacaatggtccgaaaatgtccatgcccaataaagaccatg

SEQ ID NO: 33447 - DNA, 3003 bp, Unknown
  misc_feature (1)..( 3003): 2750-1469P.txt file - cDNA_ID_3070000; gDNA_ID_1620601; Annot_ID_161658
aattaacaaaagcctaatagcttaatgatgatcagaacatgggtaaccacagaagaaacttacagagaactgattagacatcataggtgatggatcgcaagtcccaggagtgatttgccactgcttaaactcccctctgaagcccctagatatgcttccacttctgcaattacaagcacgattggtcaaacctaaattacgaaactatgccaaataaaaccaaaaatcagaggctatctgctatgtaccccattcctccgagtggaacaccttgggatgcagatggtttgcagttctctttggtgaagggatcgataggtgctttctgtagtaatcataagttaaatctccgcaaacaaagaccaaaactttgtaccataaatatgtaaatcaagaaactctattgatcaagggagttacccttccatgggaggcctcttctctgacataagaccataatcgtatccccaagcgtacctgtaattccgaaaataagaagtaaagagacgccccatacaacaacgaagcgaaggaaataaacacaagatgtctctttgtttaccattttaatggcttccctaaaagtaatagtgaattcttttaagatattggcatggcagtttaatctcctcctccatgcgtgtggtggcggagcagcactatcaaaatcgagctatggaaacaaagacaagtcaaaagtcaaattttccaatcgtcatgattcctaaactactaaaaatagactcaccaattgcaaagtacttctgctgatgaattcctcagtcggccatgaatgctttctacggtgaaacaaagttgctccaaccatatttactatacttctcgattctacactgatttgatcaaagaaaattgaaagcaataaggaattaaggatcaacacgaaattgcatatacttcttaactttaaaaaggttgaatttttttaccttttatttacataaaagaacaaaaggtatttctcagggaagcatttgcagcgaattgaaacggcaccgtctcagtcgcaacaatccccgattcaaaacctaaaggaagtgacaatgaaaacggttcacattcagacgaatcggtagaagcgaaattttgaatacaaaggcaaatcaaaacataccaaaaagttttgtattcgatctgtcacgttgaatagtcaataggacaaaaatatgaaatccgatgagattttctcagaagaagaaggaggaggaggagaagaattggattcgaatcttcgaaaatcggtttgatggtattggtgagatttagaggaatctatgtggatgctgacgtggcgtcgtcgtggcgagcggagaatcgaccgtcagagacaaggttctcatacggtggcaagtggtttttaaactcttttgatttgcgtgcgtctccacagtgacgaagacgaagaccaaagagaaatagaaagagagactaattttgcattgcgtttttttacgttttagtccttttagttttgtcaaaagtgttgttttgacactttttttttaatctaatcaggaacatgtttaaagaccacttaacattattaattggggaatctttcaccgaccacatctggataatagggttggatttggaaatctcttgtctggtttttaaatttaattatcgtatattgtagtaatttataaacatattaacaactaatataaggtaactaattaaaagagattatccagattagttgtacacttgtctttttcgagaacgtatttgtacggttttacaaattttcttctaaaaaatgtgtcactgtcttaagccaattatttgctgaattagattaaaaaaacaaaactttctatgataacgtattttaagaataatttatatataaagacattatattatactcaaatgccaatttgtagtaataaaaaaaggtattatcgtttttaaaataattttaaatgtcaaacatacaagctcatgtctaaactattaaattttacaattgttaggtaaattaatataggaaacctaattaaagagttggagatcagttgttttttttcttgaacaaatattttgattggacaaatgtctttttcctactatggctatggacctatggtttacaatgtttctttttaattgcgacatttgatgctgttggtaagattaagacaattagttattgaaatacataagaaaacatttttaaccaaaataaaaaatacataagaaaacactataacagcgacatcgacgtcattaaatattgttttataagaaaaatatatcatactcaaatggcaaattatgtaacagtataaaatagaagaaattttaaataactaaatgtcaaacattttaatatataattgtgtaaataggtttatatcttaatatagttaccttttgataatccgaatagtaactatgttttgcgatataaagaaaatgcgatgcaattcaaatagtaacgaaaatacataaatatatatatatatatagagagattttaatattgttataatattattgcgatgtggttttggatgtggtctacatcatcattcgtgttctatacatgagttgtgattttctccaatgttaataagtgaatatcgaaatcaacggaggaatagaaaatataataaaagccgaaaaaccaaggtggcgccgacgtagcacaaagaaaaagtacaaaaaagtcaaaactcgttgccgacgtaatgactatcggtgtaaatccgaggtcgcgacttcgaatcgttctaaaacccattttacatgctcccattttttttttcgaacaaatgatgtcacaatctcagagtcaataaataaaatggaaacaaataatcatcatatgaacttggtcttgccacgtggaccctccattgccgttaccttccggtgaaataccaaacactccgcttccacttagagccgtagaagagctactacttcatcaaccacaaccactatctcctcaaaatctctctctaccgatcgatg

SEQ ID NO: 33448 - DNA, 3000 bp, Unknown
  misc_feature (1)..( 3000): 2750-1469P.txt file - cDNA_ID_3070004; gDNA_ID_1620601; Annot_ID_161656
ctgatgttcatgtgtcatatgcttcacttaagttgccaccctgtatggatgtatacctgataatgttgttaactgaaattgttccatgttacacatacacacaatttgtcttccgttttacgtggaatagtgcttatgcattattgaccagcatcggttttcaacttcagattataagaggtgggaggaagatattgaagcatggcagaatcccattctcagagatgaaaggctccctgagtggtaattgctttggaacctaatagatctttgaatactttgctctctcaccgttctgccctgaactattttgtatttttgtaggtacaagttcactctgttcaatgagctttactttttggttgccggtggtacagtttggataggtacacatctatacgcttcttcaaagtcaaactcttgattgtaaaattgtgttcttcgcttttaacaaaattttgttgtttcattattttggtgccttgaaattattgtatcaccttatcaacggtttttggttgcagactcttcttcactcaatgctaatgggaatagtcagcatcaacaatcgggattaggaaattcagatggtaaggtcggtggacttgacattaatgatcaacggaatgaccttggtaatggcaacagcgttggagtaaaaagcaatgatgaagtatcagccattcataaccggaatggtttatttgtcgatactccccatgtagatgatggcgatgatgttggtcggtttctgtatttggaaggtgtggagtatgtgatgtggtgcacatatgatgtacacttttacgcatcatatgcgctccttatgctattcccaaagatcgaactaaacatccagcgtgattttgcgaaagccgtgttgtctgaagatggtaggaaggttaagttcctggcagaaggaaatgtgggaattcgcaaggtcagaggtgctgttcctcacgatctggggatgcatgatccttggaatgaaatgaatgcctacaacatacatgacacaagcaggtggaaggatctgaacccaaagtttgtgcttcaggtgtatagagattttgcagctacaggggattaccaatttggaatagacgtgtggcccgcagttcgtgctgctatggagtacatggaacagtttgatagagacaatgacgatctaatagagaatgatggtttcccagatcagacatatgatacatggactgttcatggcgtgagtgcctactgcggttgcctgtggctggctgctcttcaagctgcagcagcaatggctctccaaattggtgacaaattctttgcagaactttgtaaaaataagtttttgaatgcaaaggcagcactggaaacgaaactctggaatggatcatacttcaattacgacagtgggtcaagcagcaacagcaaatctatacagaccgatcagctggcgggtcaatggtatgccgcgtcttcaggtctgcctccattatttgaggaatccaaaatcagaagcactatgcaaaagatctttgatttcaatgtgatgaagacaaaaggaggtaaaatgggtgctgtaaatgggatgcatccggatgggaaagtggatgacacgtgcatgcagtctcgtgagatatggacaggtgttacttatgcagctgcggctactatgatcctctctggaatggaagaacaaggtttcaccactgctgagggaattttcacagctggctggtcagaagaaggtttcgggtaagttttctttcttctttatatccagtctgttaattgtttcgatatcacacacacatagatatactcgagcatgatgatgatgtatctttgttgaaccgaataacagatattggttccagacaccggaaggttggacaatggatgggcattaccggtcactgatatacatgagaccgctcgcgatatggggaatgcaatgggcattatcgttgccaaaggcaattctggacgctccacagatcaacatgatggacagagtacacttatcccctagaagccgaagattctcgaacaacttcaaagttgtgaaacacaaggcaaagtgttttggtaattcagcattaagctgttcttgctaaatcattcggtcttgttatatataagatacaagtaaattcacatctctgatatgattatcggagtaacatatataaaaaagaggaaatgttatttaaggagaggaactagccgacatagttcctgagttgtaataatattaatagagaggagtatgtgggaaaagtttccataaaaagatgatggaaacgtaaatgttgttcaacattttggtgtggaggtgacttgactcttgttttgtttagataataaataataatctgagaagaacaatttgtgttcttcttttcttctgttggttttgaattattggctaaaagaaaagccacgtaagagcatataatgacaacgcctacgtacgctttttagcgttcaatttagaccttaagttttgaaagattccatgtcttcgttttaaaagtcgctttcaattgtttgagcatatgtttcgtagggagcactaagttggtatacataaaggtattgatcaatctaaaaaactcaatggtttaattatattaatgactttagcctaaaaaaacttaagtcagtgtaaaacaatatcgatgtgtgattaagaagagatccaatttaacattacccacacaatcatttgattatttcctcctctccgtatctgtgtctctcttctcttgatcttttagtgttcttgctttgtcgcttcaacgcttaaggtaacactgcttcttctttgatattcgcgattcatcgaacgatttcatcattatagacaaacatcctatcgatcgggtttgtttttgctgattcgagattcactgtttgttagtttcatttcgttattttgcttcatgtggtgttgattgattattcgattttcttttttggcagtttggatttgtgtgagtctgcataatcatg

SEQ ID NO: 33449 - DNA, 3003 bp, Unknown
  misc_feature (1)..( 3003): 2750-1469P.txt file - cDNA_ID_3070035; gDNA_ID_1620602; Annot_ID_161690
aagaaaaaatatcacgtttttgaaaaatatcactattatacttatgacaaaaataggtcacaaaattaattcaaatccaccccttagctaaatataaaatataataatgtgtaagctaatttcatactccagatatatcacttccgaaatttattggatgaaatgaagaagcatgcataaattctgaactaatgcaacaactacatttcctaacagcaaaattacgacatctcatcttccctcattttcgtaggaagttaggcaatgtaaagactacttggttccggaccgaaacttggtcctccgagacatcatccacatgcatggatcagctacacttggtattaccttgacgtcaatagttgtcgacgtattgaaataatggtaactaaatcatccgtaaactcaatctgaaacttaagtaaatattctacaatttctcctttcaacaacctttttgaatgatgaagtcaattcctctttgtgactgttcgacgacaaagagcacaaatccgttgacagtaattagaagatgtggaaagaaaatcgagtttccacgcaccctatgtggactggttccctctagtttggaatgtatgttcaaacaaatttgaatttattttgtattcatgtacgtagtagacatttaaatttattagtagacggaaattcatatacatatggactacggataaattaaacactccctttctttcaggcagagaccgaacgtattgtgtgattaaaaatacacaaacattcaaactatgactttttcataggcgctcctcgtccttcgccacaaatacgtactattaacatttctttctttttaaatagctagagagtaaaatgatcaatcgaattttttgaaggcaacaacagaataagaaaattccagcaacatcttcacttaatagccataatacctcgagtctcctatataaacattcccactcctcaacgtttcatctaatgaaaaaacaccatctccggttaaaagatcaaagatcccaaacaatgatttcaaaatttggatcggtccatatcttggctgtggtagccatacaactcctaattataccaagcgtttcgtcccttaaccttacaaatgcgtatttgcaccacaaatgtaacaacaccgaaggaaaatatagccacgggagtgcgtttgagaaatatatcaacttagctctccgtgccatcgattcagacaattatctcaatggttttgcctacatcgagagaggtgaggatcccaataaagtcttcgtcatgtaccaatgtcgcggcgactcctacgggtctaagtgcaaatcctgcataagcgctgccatctctggggtaattgtcacttcaattttattagttaaccgtcatacatttacattttaaaattgcgagcacaaacacatgtcattttgttttggttaagatcttagagatatatccaatgatcctgacactctacatagatggatgaattgagactaaaaatgataaaagattgtgaccataactaaaaaaatgaagattaaacaatgcaatattgttcttaaccgcgatgtcacatgtatggatacgtatatgacagcttcgtaggagatgtccaaaaagcaagggggcagtaatatggtatgaccaatgtctttttgagatatctaccaatcaactccttcaataagattgattacgagaacgatttctatttgtccaacccgaacgacgtgaacgataaggagttgttcaacaaggagacctcggctctcttggaggagctaacaaataaagccactgataaaaataacatgataggcaataaatttgtgctgtacgcggcaggggataagagaattggaacgaagaatgtgtatgcaatggtgcaatgtacgaaagacttagtgactacaacttctgctgcgtgtttcgaatggattttcaagatgttttcaaagtgctgtgaaggaaagcaaggagggagagttttgggtacgagctgtaactttaggtatgagttatatccctttcttagaaattaacgactgtacagtgagtgctctacataaaataaaaggggtccagagccaaaatatggtcttatacattggttgtgtttaatagttgagcgaataaatgtatttcctctttgtgattcgttttgtatattttcgtttgttagcataactcattaaaagaagaagaagttgtatttaggtttttaaactaactaatttgaaaaatcaaagtatttctaattcccacttcattattttcatttttcacccacagtctccttctttcacactatttggtttataactaattagatagatagtgaaataaatctcaccctttcacacgaaagaagaagccaaaaggaaggggagaagctcatatgcccaaaatacatttttttaattctaaatctgaaatgatgaatcaaatttggtttataatagccagaaaatgatatggcaaagtaaatgtattataattatgaattaaaatgattttcagctttttttcttctttttgtaaaattatctagttacagacaaatttaagagtaatagtaaacgaagaagtcatatatacaaaatgctaaagagatgaaactgtatgtttagaatgcaattaaatctgagaattaagttcattttcaggttacaaaatttgactttttcataggcaatcctcttcccttgccgaaaataccaagtctcaacggccacctcctcctctcctgcattacagactaattttttttttttttttttttaaatagaaattaaaatgagcaatcgaattttgtattatgcaaccaaaatttgacaacttccagaaattctaataactatcaaattaaaaaaaaaaaaaaaaatcgtcacttaatagccatgcatatttccttgagtctcgtataaaaacattaaaactctttaagatgtcatctaatgttaaaagaccctctcctaagaaatagatcaaagatccaaaacaatg

SEQ ID NO: 33450 - DNA, 3000 bp, Unknown; identical to SEQ ID NO: 2816
  misc_feature (1)..( 3000): 2750-1469P.txt file - cDNA_ID_3070074; gDNA_ID_1620603; Annot_ID_161713

SEQ ID NO: 33451 - DNA, 3003 bp, Unknown
  misc_feature (1)..( 3003): 2750-1469P.txt file - cDNA_ID_3070102; gDNA_ID_1620604; Annot_ID_161735
gagatctagaagaagctattgtgatccttgacaaggtcactgggaaatcgaaagggtatggtttcgtcacttttatgcacgttgatggagctttactagctctgaaagaaccatctaagaaaattgatgggcgtgttacagtaacgcagctcgcggcatctggaaatcaaggtacgggttcccagattgcagatatatcaatgaggaagatctatgtggcgaatgttccttttgatatgccggcggataggctattgaatcactttatggcttatggagatgttgaggaaggtcctttgggttttgataaggttactggtaaatctagaggctttgcattgtttgtctacaagacagcggaaggtgcgcaggctgctcttgctgatccggtgaaggtgattgatggaaaacatttgaattgtaagttggctgttgatggtaagaaaggagggaagcctggaatgccacaagctcaagatggtggttctggtcatggacacgttcatggtgagggaatgggaatggtgcgtcctgcaggaccttatggtgcagctggtggtatcagtgcttatggtgggtactctggaggaccaccagcgcatcacatgaattccacacactcctcaatgggtgttggttctgctgggtatggtggacactatggtggatatggaggtccaggtggtactggcgtctacggtggacttggcggtgggtatggtgggcctggtactggaagtgggcagtatagaatgccaccaagttcgatgcctggtggtggtggttatcccgagagtgggcattacggtctttcatcatctgctgggtatcctggacagcatcatcaggctgttggaacgtcccctgtgccaagagttcctcatggcggaatgtaccccaacggtccaccaaactactgaaaaggtgcggttgttctcccttgtatattttggggtttaagagtgtgttgcattatcatgattcattgcatagttatatattcttccctactttgtggcatattgtttttgcaggttgtgcgtaattttcttgctagaaattctctgctattcttttccctgtgtctcttttagtctatttgcttgttagtactgtgttagctacttgatgcaatgcctttagtcgatgtttttttgcttgtgttcattcctttattttaacgcatgaaagatagccagaaaagtggcaccttgaacccttttatggggaatgtttgtggcattctttcatgcagtttttctgtttgtctttaagctgctagtctgtgcaccatgctttgtctctctatcatttactttttgtagtaatgagagtacgcatgtgatcgttccatcttgagtccttgttttccttctcagtatttaatcttcttctgaggatagcatgaggttgatttctttgataatgctaatgaccaaattgagttgtgaatgggtgttgattcaggtttgtgacagcatattgggtgaagatgctttttgtgcttagtggtgattacctgattgcagctctttaatctctggaatgatgaatgtatagctgctttgacctatctgcacttgacctgaatgtgctttggtttctataatgaatgattagactaggatatatttatgtacttttaaatatagacatactcggcaaatgagttttgttggtcagattagtgagtcttcaataatatgttgtattttctcctacattgttttctggtttatgtccagccactctattgggcttcctgattggtggttatatttcttgaactttgatacttaaatgtttgtgacttttggatatctaaaccttgctgattggtggttatatttgtgacttttgaggacatccagactggccctagaggctatgatttgtgattattgactaatgatgcctaggtaaagtggtgcatattttgtgaccagtcattggcactgtacgtgtttatccatgtcaaaaccataacttgagtagtgctgagtttgcataaaaatgtgaaacatgaaggtggtgttgaagtcttgctgttatttcatgctaaattgcgacccagttggtattgtatgacagaaactatgttctttcaaagcttagtgtggttattccaagggtatggaggatatatcgagttgttgacttgtttaaattatgacattattgtatcgtgaaaatctcatggcttgtgatgtcgaggtgttgcttctctgatcccaagatgctgagtttgtttttgttttttgggatttgagaaaatgataatgtgttcttagtctatggtggggtcatttatttgtcacttcgaagacagattttgatgcccgaatagctcttcttgcttctttcttggtcacaaacaaaagacaatttgtcaatttgtgtgttttaggtgtagaaaaaggctagaaagctgtcattgttaagcttgtatagactcttttcttgccaatgaccattcgttttttttccccttacattttgtcctttttgtcgagcgaatcttcaatgttcctaactgaaaacggagtgggctgaagaaaatctcaacaacggctggaggcgatgtaacttgagctatcgaaaaggaatggaactgcgacgaaaccatgtaaataataataatagtgtattgttgttctttggtatattttcacacacactctcttctgtaacttacaaaagaatattcataatcacgtttgaatagctcttagacacaaatgagttgggttataaattagtaattaacaatggcatgttacaaattagactaacaacattgtagcaaatcaagccgattatattttatttaattagtaaaagattaacacaacaaaagaaacctgaaaatagttaagtggagggccccatgaccactaacaaaaacatataagctcttttcgttttgttactctctccattgaattctgtcttgatcactttcgattctctcaaaaaatcccataactttcccaacgaaaaatg

SEQ ID NO: 33452 - DNA, 3003 bp, Unknown
  misc_feature (1)..( 3003): 2750-1469P.txt file - cDNA_ID_3070110; gDNA_ID_1620604; Annot_ID_161725
ccaaattttcaaagtcttaaaagtgccaattccctacattgttgctgatactgtgaagattataaatggttttgttctgcaaacaggtgtttatagcctgtggagtctcaagttctggtggtaaaggtggtaaagatgacctttaccgcaaacccaaggctggaatgtggcaactcatgaagaagcattttaactctggaattgcaattgatatggataagttagttttctccccacctgctcctaaaaacttgaatttacctgaaacttctagcaatgctggaagattacactcatttgtccaccagccttactgattaaacactccgtttaagtccactagcacattttttgttgttgatactgacatctgtgctatgctcatcagatccttctacgttggggatgcagctggaagaaaaatggatcacagcgacgctgacatcaaatttgcacaggtatttattgcaaacgtcagacaatacccatcctttattttataagtcaccctatttacttttctgactttcctcatagacaactactttctttggttgcaggcgagtgggctaaagttttttaccccggaggaatactttatcccctcaagtacatcgccagggacttagctgtatcagtcttgtgcttgtgtttgcagtttgcaacttcttttgcttttttttttgtgatgaaactagtagctagcttttgtgataaaactagtagtgtgcttttgtgatcaaagtattagtatgtgttttaactctttttgtatattactgatatttaagcgtcaactagagcttattgaaccaggaaaaagaaactcctttgaacaggcaggattgcaaagtcaacataacaaaccactgataacaaaaaaagttcaaatttccgactcatttacatacatgggattgggaaagtttaaaatctcttatgatgctaataacatacatcaaaaattcactctccttttcactctttaatcagaagactcagacatgaaatcactccttctgaccaatctcgccttccaaaatggcgtgtcttgtcagaacaatctctttgacaaggtttctgtaaacaaagggcctaacagcagcacggagaaagagctcaggtggaatcctactcttctttatcttcttcatccaccttccatatcctactgtcttccattcttctggcttcacttttgccttcttacctctcatttccaactcatctccttcaatctctcccttttctcgttcctccaatgcctttaactgcttctcataaaacttatctgacaccaccatactcatctccgcaagcttctccatccgctccgcattgtttgtcgctttgttgaattgctcttcccagtacctctcatcctcttccggatccgactcctctatttcatcttccaaactgtcttcttcaacgtttccctccacatcgacaaccatgttatcatcatcatctacttcttccacctcaccatcatcatcatcatcatcatcatcatcatcgtcattgtcagcttcatcttcaatccattctgagaactcagccttctctgagcttccactaatgctaatctcatcctcatcttcatctggagcatcacaccctaactccatctcctccaactttgctttccattcttttgtatacggatgcaacagctcgttcgggtggtttccaagcaagaacttcaacactctggacttcttttcatcactcaacttctcataagcattcaccacatcatccacgaaagctgtctgtctcaccttcaacatcttacacaatcctccgtaataagtactcaactccactctaccttcatcatcctccacttcacacacaaatccagattccgtcaccgggtttaaataagggataagcgagttaaagaaatcttcttgaggctcaaacctacactgaaacacaggcttcttcacatacacaatatcaggtctaaaccaagccgcacattgacatatcaaagaccgagacttgttccctaatctccccatcaaattccacttatccaacctctgcttcttatccgcttccacaaccacttcactaaccaacgtccattgctcccacggtaactcactgagtctccatttcggatgcctgacaaacacccaaaaatacctcaaaccaacattcgaatccaactccttaaccctcttctgaaaagctatattcatctcatgctgctcaatcttctcaaactcttcatgattctccacttcaccaatcatagtaacacactcatcagagatagtaccacgaaccggatcaccaaccacaacaccacgccacgagtaaggtccaaactctccatacttgaaccaatcataaggatgacgcaatctcgggtcatccttatccataaaccgaaccatcctatcgtaaccaagcccaatcatctcaagctcctcctcagtaaacttatccggatgactactgagaatctgactccgactcttgtcagggttattatacaatctataaaacaaagattccgctagcttcttcgacttttcacgagcattcctcttcacctgcttcctcatatccgaatctccttctatccttccaccagatgaacctcctccaagctttttcttgctcctcccggccaatgcccgcacgtctcgccggaatccaccatcttctctgagcaaaagctccgaccttttgacactaaacgcataattcctctcggtaattgccggtaaaaccgaaacgatccttcgtaccccggaattgagtggagatttacggaaggaaaagctagggttcagggttttagaaaaggataaatcttgactcagcatttcttctcccgacacagcttagagatgacgtagcaactgtaataatataagccaaacgatacgacggcgttttgctactgcgccattagtaatcagaaaaagttaaaaaccttgtctttttttttttttttttggttcaatagattgattagcgatg

SEQ ID NO: 33453 - DNA, 3000 bp, Unknown; identical to SEQ ID NO: 2830
  misc_feature (1)..( 3000): 2750-1469P.txt file - cDNA_ID_3070129; gDNA_ID_1620605; Annot_ID_161766

SEQ ID NO: 33454 - DNA, 3003 bp, Unknown
  misc_feature (1)..( 3003): 2750-1469P.txt file - cDNA_ID_3070160; gDNA_ID_1620606; Annot_ID_161795
gaaagagaagaggaatgaaactgaatcagtcattatcactctatgtaaaaagtgtaacgtttttggctggattagtttccaatttgtgaccaataaaacccaaatttcgaagataagagtttgggctcagaaccctttattgcttctgatgctcagaactaatgtacagtaatcttttgcattgtgtagcttttgatagtgaaaaatatttttgaataaaaagcttatctactgtaccattctagcagcagcggttggcaaggaatcgcaaaccaagggttgttccttactgttaagacactctcatatatggaaagcaatgttaaatactgcccttgtccgttgcaacagctggctatctgtttcggcttttgtctgtctttataacattctaaacatttcattgtactcatagttcagcctttaaacagattactttctttcagatttgtttcaatttgggacccatctctcttttagttttgtcaaaacatggttctgtgtggccatggttttcaaagttcttagttttccatgagctcacatcgcagaccttgatttaaagaaaatgcttgataatcacacagtagctgtagcgtgcttaaagcctcgtgaaaccaaaaggtcgacatgcatttaagtttcgtctcttcgttttcctctagaaaggttgatggtaacaaatattaatgcctcgttaatctaaaagttggagacagctatcatcatcatactttcgactctttgtagtcctctctaaaggttgtgacttttgcaattccctttcatgtctatataaagacacgtatgttcagaatgttatctaacacttaccctctttatttcagagatgtcttcttccattgttaaaatcggaatagatagcatcaaaacaacggtaactgaaaaagagcgagatatcaaccgtcttgtgaagacattcttgtccaacaaaaacaacaggaagaagatcattggtcttgataccgaacgggtgcaaaagggaagaaagctaaataagaccgtcttgttgcagctctgcgatggtgacaattgtctaatagtacaacttcccgatgaagatgaagatgaaggtgaaggtgaagatgataatctgccactccccctcttcaattttctcaatctacccgagttcacatttgtgggcattggcataaacaagactatgatgaggcttgagagtgagtttggtttgacctgcaagaatgttgttgagattggacccgccacatggaatctgaccaatatgacgaccgatgtgaaatttaggatcagtgctattgtttcgactgagagaccatcaaatgccgtacttgaggactgggagaaatttgttctcaataagaaccagatcaagcttgcagcctccaatgcatactttgcttttggcattgggaacattttgttggatgttcagattttaagttaatgaatctagatttctgtttgtctttctttgtttttctttcttatgttcttcagtatcttgttgtagtttgcatttcaaccgttttaaagaccacaaaatgtggtatttggttcttcatttttttgttcttgttctctctgttagaccacaaagtgtaatattgggaaagttttgaggttaattagactgccacaataagcgttcaactagctagagtctgaatgattgtagccaccctaaactctgaggtcaaggtaaaggtataatattattactacaccacgtgagctattgaactgggcctgataattaaaagttgattagggcctattagaccacataacgaaatcttgagccgctgctgctagggggctgaaggatgattaattaagtgttcaacttgaagcaatgaaatagcttctgagagaagagagagttatgaaactgaaatgatcatcattttttttcttgggacaaatcagtcatcatctcttaatcttatctatgtaaagtgtaacttttttttgcgggattagtttccaatttgtgattaataaaacccaaattttaactaatgtataagagtttgggcttagaacccaaaataagtgggcctctatgcattgtctacctttagatagtgaaactattttagaataaaatgacaaagtagaactgtacagttttttgatgttttccatgaaaaagaaataagttccatgtattggagagaagagagtcagaaaaaaagagtcaaaaagattcttttgaaagacgggtaaacttcggagttccaagtaattattgcattttcatatacgctctgttcctggattcactaaatcttatttgaatacaaatgcatatgtagcaaatttaatattgtaactatatgtaaaatgttattttacaaaaaaacctccaaagtatttagtttttgcaaacttaccctcctaatccttaaagtacatgacaattgacaactacccaaccaaagaaaaagctgcaatacaaatacaagcctcggttatatcgatcatccaaacatgtgttttctttttattcaaaaacgaaaagcaaggagcattgtttgattgcatgaaaacgaaattaataactcagatggtaaggaagctcgttgttgaccctatagaatacatagaatgcttcaaaaaaaaaaaaattgtaacaagtgtcgttctctatagagaaacaacacaacataaaattcttaaaacgacattgagaaaaggtgtgtattactgttttttccgttggtggttagttaattgtcattcatttttggaatataaacggtaaacttttgcaaaaaggaatattacaaggatttgtattgcaaaaacaaaaacacatcaatagttacttcgataaaagtaaaaatggttgcagagtattattattactcaataggccctagctcagtcacacaggtacatccataatagtgccccattaacttctttcactctcttattgtgtgttgaacagtgacaaagaaagagagagagagctttgctttgcagaaaaaaatg

SEQ ID NO: 33455 - DNA, 3003 bp, Unknown
  misc_feature (1)..( 3003): 2750-1469P.txt file - cDNA_ID_3070171; gDNA_ID_1620606; Annot_ID_161791
gtagcacacttgaaacacaaagcgaagtcgcactcaatgcaattgaatgtttcatttgtggaacaatgtcctaactctttgcaaacacaacatcttcgttcctctcctggtttcgatgttaagaacaaaggatccatatgacttgcatggaccaatggctcggaaattgtggcacactgcacgtgtaccttaaaacgacattctctttcactgcactcatagaagaaaccagttgtgcacctccaagaacaaattgaacatgatttcgtagcatccataacaaggtcagatcttcccactagagtaagcagatgtggatgtactgggtgatgtattttgcgagacagttttgcacattcttcatgaagaatgaaatcacattgcatacatgagtagaagttaccgaaatatatcggagtgatgcatgcttgacacaacttattctcgttgtaatctctgtcaatgttctcatcaagtttcaaatgatgatggtcatgactgaaatgtcgtatgattccatctcttactgtcacaaacggctcaatttttttgatgtcttcttcgggctctccctcgagttctttaccatcccacacattgctctgtgtggcacattttgaatgtgctgcataccaacaaccgtccttgttgcaagaataacccccataatcattatcgatctttctacgacaaacaccacaacatcgaacttcttggtcgaaagaaggagtaaaatggatacgatggaaatgacgagatatccttatgacacgtggtaagctgatacacttttggtggaccacaaagtcgcaagggggacacatataaaatggacagcttgaatgtgtcaaggcacaaacgttgcaagttaaagaagtctttcttggaaattgagcaagtgtatgctcatgccacttcggttggtccaaagacaatactcttgttctctttatgcaagcaatattcatagcataatcgcaagccgagcaataataaaatacctcttcgagatctttatcgcaacaataacattccctggttgtgtccccattcaacaagacaagttggagggaatgttttggatgaagagtatgtttgatcacaactggagccttttcatattctccatggttctcgccattgcaagtttggcagcgaatatgactaacgccttcttcagatatccagattttctcccagttaaaagggagacacttccacttgccattgctgctccacgagacttcttcgtcaatcacttgaaattttccttttttcaattttacttgtacttgagggtaaaggaaaataagccttttccactctgaatacatagagacgacgagtgagaatatttgatagatgagtgatatgagctccggctgtggctcgagactcaatgtttcaccaacgagggaaatgaggtaggaatcgagactcactcttttaaaatagcggaaaaagaggtcgggatctgcctccaggtcgaactctatgtccaggtctgaatctagctccgaaagctttatgtacacatatgtgtccgagttcgaatccatctccaaatgctctatgttcaaatccatctccaaatgctctatgttcgaatatgtgcccgagtttgaatcctgcttcaataactttgtcccggtatctatttcgggatggcaatttcgatataagcctcgtgggactcttagtaaacttccagcagaatgacgcaattccgggtcttgctcccgctttaaaacgctgacagatttgacatgagagatttctccagaaatgagagatatgagcttccttagcggatccggctgggaacccaaatccatagagttgaagagcgagactgcttgagtagtgagtgacatcatttccgtctccggctgcgcatccaaatcaattttactgaccatagatattatttgaggaatgagagatgtcttaatggataaagatattggttgggagattagttgagtaatgagagatatgattttcaacccaagattaatctccggctccggctccggctccggctccggctctggctccaaatcacgaactaactctggctgtggcttccaacagacgacttcgtcaattatttgactgatgagtgatataagctctggcggctccggtgttggactacataattctcgaatgagtaacacgaaaaactccaagtctggctgtgaattcgtgtcctgctccgaaataaattccgtagagttgacgagagagagcttgtgtgaaaagagagctatgagcttccttaacgaatctggctgggaatcaaaatccatagagttgaagacatagattgcttgattagtgagtgacatgagcctcgaccccggttgcgaatcgaaatccattgagctgaccagagagattgtttgagtaatgagtggtatcatcttagaaatagaatcccagtccggatctaaatatgaatccggattcaaacccacgctcagactatatatttgaaagatgagtgatttgagctctgactcgggattcgagttcgactccatagagatgctgagagattttttgagcaacgagagatatgagatgattatttggcttatgtttctaaatgctaatttttatacaaacacatcaaaatatcacgagacattctcaaacttacgggctgtccaactacaaagtcaatgatcaatttggagattagatattaattatcccaatactagtactataatattattacaagagtttagtatacgagtttatgcactacacgttctcttcataaacaaaattgttgaaataatctttccaatatttcagttatttaccaaaagcattgaacggtcgacttttaatttaatggcgccatggactttgtagttggcggatcttccctcattatattatatagatttgaaaaagtttacagccgtacaattttaaaatgtataggtcatctgaaggcagagtcaataatcagtttagatataaaagatg

SEQ ID NO: 33456 - DNA, 2571 bp, Unknown
  misc_feature (1)..( 2571): 2750-1469P.txt file - cDNA_ID_3070175; gDNA_ID_1620606; Annot_ID_161789
ttcctcctaaaagcactaaataacattttattttattttttatttaaaaaaaaaatttaaaaacactgtatttttttgtgcaatgaggatggtctaagaagctgatcaaagaaagatgaaaagaggtacaattattttatatactatctctgtcatgaatcttgcccattataatacattaagagaagcagttctttttattcttttcatgctctacatgttaaggtcagccaatgaaagagcacttgcactttcgaattttgatgaagagaaaacgcatgaacaacgggtctgtctaaactcttgtatgccacaaatatttatctaaagtcttcatcccaagcaaaccatctaatcagtgaagactcttataatcacattaaagttttcttcaaaaaatcatatactggtttttcaagacatcgacatcaaagttagactcaaatttctcacagacatctcagtccagcttggcccaatatcatcaaatcaatgaaatttcagtccagctgagcagatatagttggaaatttattaaattaatgacagagagtttacaaaatttagacccaaatgaaagaagaagatagctagtatacaaaattagttaataaattaaataaatatgtgaaaacacccttagctcactggctaaagggttaaaggtttgtctaatttgtcgttgtaaatgttttaagtgctaagtttccaacattccacgtattatataacataaggattagtcttagtcaggactttagtttggtatcttcgattataaatttttttttttttgtcttgcataactcttagcttacgcaatgcaagtcaatcatctaaatatccaataattgtttactgtattttcttttattatttattatttatttgtaaagtactgtattatttttctgacgttgaccaaaaaccacacaaaaaaatgcttttaacaaagtaattttttatttttattttaaatactttaaacaaagaattgtgaataagactgtaggaattagcaactagctttaaagaaagaagagttatggttttattagcttttctttataacaaactgaaaacgaaatcacaactatcgacaatgactaattgatgagaagaaaagaaacaaaagaaaacaaatttcttcagactttgtattctaccaaacaagaaatctaagccaaaacattcaaagcgatttctcaagcaaaactagaagatgaaggtaagtattatatggtttatgtatgtgtttttatggcttctttgattgacgttacaacatatcatttttttagcaaaagatcttgataagagtgactatgaccgatgacaaaacccgagcaaaagcaatgacaaaagcagttcagtttaaaggtaagaagacctttccacaaaaaagattaccaaactctgttggatctaatggttttataggcgtgtcagccgtggaaataaaaggcgatcacaggaaccagatagaggtaaccggcgttgaagttgatatgatccctcttatccaaatactcagaaagaaggtagcgttcgcagagcttgtgagcgtgaccaaagttgaaccaccaaagaaagaagacgagaagaaaggaggggacggaaagggtgcagagggaaaaggcggtgaccaaaaaggtggcgataagaaagggccagatgacaaggaacctccggagccaaaacctgtgccgtgttatccatggcctctgcagggatacggtgtaccttcctcctttcctcatcaaggatacggtgtgccttccacctttccccagggagacggtgtaccttcctcgtttccatacccgtgccatccggcacatccctacaatgatataggggaacccgtttacaatcacgaacccaattgcaaaatcatgtgaaatgagttttacagaggaagattgatagagagagcatgatgaccaatgtttttttttttattgtaaagaactaaagaagcactatgtttactatttagtcatatgaataaagctctgaggccaccaaatcaatttactgctatctcaacatgctcttttaatctttatgcatttcctagtaaatatttgtatgagcacagcaaaatcactcactattcgaaagattttgcacactgttcaaatgacccgacccaatcttggcccagaatcttctcactcactattcggattttagtttaggtataatcgtaatctttggaattttgaatatgatatcttgacttgtcattgtgcaataatgttctgactcctccagaataatcagcattttgaatactgtgaaatattactaatttaatattaaaatattaccactagatttccgaaaacacccccattactcttgctccgcaacggtaaacgtaacgtactcaaaggggtgttaacgtaatttcaactgaaaaaaactaacggttcccgagaacccatcacatattaagaaagaaaataaaaaagagatctttttcgcttttccacaatcacaagacaaccacaaaactctcactccaaaactctcaattttgccttcctttgatcgaatactacaatg

SEQ ID NO: 33457 - DNA, 3000 bp, Unknown
  misc_feature (1)..( 3000): 2750-1469P.txt file - cDNA_ID_3070191; gDNA_ID_1620607; Annot_ID_161823
agttgttatttttatggcttgaaattgatgttctaggatttgcaatcgccggaaggaaaattcttacgaacgctcatgtggtgatggctatgaatgatcacacattcgtggacgtcaaaagacatggctctcaaatcaaatacaaagcaaaagttcaaaagatttcacatgaatgtgatttggccatcttggagatcgatagtgacgagttttggaagggtatgaatcccttggagcttggagacataccacctctccaagaagttgtgtccgttgttggtaataaatcatatggagacatatcatgcatgtttcctacaatcttataattcatattccaatataccataaaattatgctaaatgatgaaatttttcttatgatttggttagtagaattatattaatgtgctcaaaatgcaggtggtgaaaatatctgcattacaaaaggtctagtacttagagttgaaactagaatatacgattacagtgacagtgatctgctatcaatacagattgatgcaactatcaacgatgaaaatagtggtggcccggtgattatgggaaacaaagtcgttggtgtggtatatgaaatagggtaagttgaaagctaaactgtaaatcttagataatcaatttacatacatttgtatcaagaggtgggggaaactctttaacttttttttttttggggtgtggtttttacatgcagttttgtgatcccaactccaataattaagcatttcataactagtgttcaagagagcagacaatattcttgtttcggctcattggatctttcatatcaatctctcgaaaatgttcaaatccgtaatcatttcaagatgagccatgaaatgacaggaattcttattaacaaaataaactcgtcgtcgggggcttacaaaattttgagaaaagacgacattattcttgcaattgatggtgttccaataggaaatgatgagaaaggtaatgatattggtaatagatattgcttaatggtcttctccatatttacttgtgaagtgagtttctgtttgatgcagttcctttccaaaacaaaagacggatagatttcagctacttggtttctatgaagaaaccaggtgaaaaagccttagttaaagttttacgaaacggaaaagagtatgagtacaatatcagtctaaaaccggtaaatcatcgtctgttatattttataaattgtttggccctgctcgttcacattttgttctgaactactttcttttgtacacaggtgaaaccaaactttacagtgcaacaattttataatgttccaagttactacatatttgggggttttgtttttgtgcctctcactaaaacatatcttgatagtgaacatcaccaagtcaaaatttccgaggtttgcatctttctttgtccacgatactatttgttttttttttctctttaattcaatcatgtttaatttgaatctgagtttggtagaaagaatgaggatatgtagagctactaaagatgctatttttcttaacaataaaagcatgtttagtttaaaaatatgtcttcttttcaatataacatttaggcattgcacttagagagaaattgtttcttggtgtagagattagcagatgacatcaacgaaggataccaaagtttatatggtgctcaggtaatttatttattacttgttcttgagagtttcttggtgaaagctaactgaaacgccattagtttgtctcaactttgaatctaacgataaaaacgatagaaagataaacatggttccaaattttgtgcaattattatgtctaggaaaagatattaatagttgtggtgggaacaggtggagaaagtgaacggagtggaagtaaagaatcttaagcatctatgcgagctaatagaggaatgtagcaccgaagatttgaggctggagtttaaaaatcataaggttttggtcctcaactatgaatctgctaaaaaggcaacgttacaaatcttggaacgtcacaaaataaagtcggtcatatcaaaggacatttgtcttcctatgttgcttgatgatccgttcaaagacaataagatcaaccttcttccttggagtgttcttcctttgatgtttgatttttcctaataaacaaggattgatttcaaaaggagttacatgactagctatcacatggagaatataatgaaagaatgaagaccattcatacgtagaagaagacatcttccaagttaaactaaataaacatatgtgtgttcttatttttctcaacggatatgtgttttaattgaggtttgtaattggtttaagagaaagtgttttcttatcaatggtttttttttttttttatgtttgttgaatcaaagagatttcacgtaaaagttaaaacgtgttatcttaattattagcatgattacttttatctttcttttttatcaaaaaactttttaatgagattgccaaacgtttttttgcatccacgtaaactcctctgaacgtaaacttttccagagtgtatttatgtggacgtcagaaaaacgtattttgcatccacgtaacgaaaatagttcatataaactaaaagtggctatgtcttacagatatgtacacgacgcatgaaattcgtaatgtttcgtagagaaaggggacaagaaaatataattaatcaattattattcaaaacaatttataatcgattttttttttttcttataattaattattactcgaatcaattatattttatcaaaagaataaaattaatttgttcatgacatctgatgggtccattttcactgctaggccctttgtggtggcgtccgatctgaatcgaatccacttggcttaatttatttgaccatttttcgaagtataaatttgaatattcaaactcgatggcttacgttatcccttatataaacacattatcaacctccaaatattttcatcatcaatctttcaatcacaaaaaacaacaacaccaaaaaaaaaacgcacacaatg

SEQ ID NO: 33458 - DNA, 3000 bp, Unknown; identical to SEQ ID NO: 2838
  misc_feature (1)..( 3000): 2750-1469P.txt file - cDNA_ID_3070193; gDNA_ID_1620607; Annot_ID_161822

SEQ ID NO: 33459 - DNA, 3000 bp, Unknown; identical to SEQ ID NO: 2841
  misc_feature (1)..( 3000): 2750-1469P.txt file - cDNA_ID_3070201; gDNA_ID_1620607; Annot_ID_161813

SEQ ID NO: 33460 - DNA, 3000 bp, Unknown; identical to SEQ ID NO: 6160
  misc_feature (1)..( 3000): 2750-1469P.txt file - cDNA_ID_3070205; gDNA_ID_1620852; Annot_ID_51002

SEQ ID NO: 33461 - DNA, 3000 bp, Unknown; identical to SEQ ID NO: 6160
  misc_feature (1)..( 3000): 2750-1469P.txt file - cDNA_ID_3070205; gDNA_ID_1620852; Annot_ID_170346

SEQ ID NO: 33462 - DNA, 3003 bp, Unknown
  misc_feature (1)..( 3003): 2750-1469P.txt file - cDNA_ID_3070205; gDNA_ID_1620607; Annot_ID_161810
gggatgatggtttctatgaagatgtgaggaaggtatatgtaggacaaggtgactccggtgtgtcttttgttaagtttgagtatgctaatcgcaaggagcttgtagctggagttggccatgggaagatgtcaattcttggaacagaggaggtttttgtgctctgttctcgtattgacctaataatgttttcttgagatccaagtttcactggtctttgtattttgtggcagtttgtgctcgattctccaaatgaatacattgtatcggtggagggaagttacgataaattatttggagtggaaggcgagttggtgacgatgcttaggttcaagacaaacaagcgtacctctccaccgtttgggctcgatgcaggcacaacgtttgcgttggagatgaaagatcataagatcgttggattccatggcaaagctggagattttgttcatcaagttggtatccacgtcacccaaatcaccaagtcttaaagctttgtgagctttctcttctattcctagaataaaattaaaaagccatgtctgtttgttactcctcagcttctagttactctcttttaactatgtcttgcttcgtttgtttgttatgtgttatgaagtggtctgcttctttgaataaagcatcgttttgttggaatgtgataaactgataattgtgttatgctatacttggatgcatgaggataaatgaaaactaactattcaactaaaccctaaaacctatacgatcaaaattatagtaaatagtaacacttaatgagactttaaagttgagatgtgtaactagtcaccactcactcatgttagtgattcatgtgtgtgtcagtgtgtgtgtgtgtgtttttatcaaggtcttctcttaagattcataagtgtgaatctggtgggacttaattggtctggtggagtagaacctatgcgggcaatgaggaaggttaaggtaggctaaccgagcccactctctaagtgtttaatttgtaaccttaattcgtaaataaaagctgtttaatttgtaacctttattagataaaattttgtctttttttttgtcaaaagataaaatgttgtcaatcattttaaaaacaaagaaaaaaacttttttggcaagaatttatatatttgcttgtcataaattttccattttgtagtattttgaaaaaaatattttaacgaatggaagcaataactcgacaaaaagagtcaaactaaagtaccttcacatgcaaaacaaaacgtaaatttggtatttttttcccattaaaaaaaatatatatatattcttggccttgtgtgcgaagacgatcgagaacgagaagaacgataagctcaatacgcacgaacgtagatcgaagactggaaaggtatatcttcatcaaaatattcatgattatggttgagtttaattttgtttacgtatttgttttaatttttcaaaagtccactgttggctggctgttgctatcttggaatgattttcatatctcaataactattgtttactctaagttaaattattggggtgctatttatgatgactgatgaagtgatgggaacatgattgcaatattaaaatctcttttttatttatattaattataagtttgtacccacttcattttaaatagataatgccaagacgtaggtatattattactgaatttattttttaataataagtaaatatgcaggtttcaactagaaaggtaacacatcaacaagaaataccaaaaaccactagcttacatattttgatcatataagtattgaataatatagttatagatgatcaaatagttattattaattacttagctagtgtaatttctatcgattgtttcacattcgcaacagataattatataaataaatacatactacatgttaacctttgtttttgttaaataggatgttttcttgattgatgatctagatcaacttttaataatttatacgtaccagctttcattcgatcgtgcgacttcttggaatatcccatggtacatttgcagtcgagctagaaagcttttttgataatttatgaatcatattaagcgtctctcaattagattaatatttagtaccagtgtaaatgatacaattataaatctttttaccaacgaatacagaatttgttttagaaatattcttcgcaaaattttataatatttcataaatcagttataaaaaaaaaaaaagcagttttgaattcagaggaattcgtaaatttccctaagagttattaaaactagttgtgatattttggagtattctttatggctagatccatatgatccggttcttgtatctagattttttttacggaatattgtatgatatatctagtctcctctttggttctaaacttctaattaatcttcggtgatttgaattaaacgttactgtttttaaattatgattaaggctttaaaacatgttcatacaataattaccaaatcttaaccaattagactcttaataaggagaacgtatatatatgttgcaacttgcaactttagccctttacaaataattaatcgtacataatctaattgataaacgattctttaaattttaaaacaatgaattagcttgctgccatcgtttaatgggccaacgccaatataaagacgattagttgagaagttgtgcaagtagaagtatatgaatattttcattatctaaaaaaaaaaatgtatatgaacatgcgtttttcccagtaatgctttttatataaatatgcctcgtggatcacgaaagaataaattattatttcccttattatttcatctagtacgatcaatatcaagaagtcaatataaataaacatacaattcactttaattgatcatagcaccgataacaatctactctctttaaaaggtcttatctctattcttctctattatgtaaaaattggttaatagtagatattaacaatttatttttgcaactacagaaattcgtaagtactatcaagaagcagaagatg

SEQ ID NO: 33463 - DNA, 3003 bp, Unknown
  misc_feature (1)..( 3003): 2750-1469P.txt file - cDNA_ID_3070208; gDNA_ID_1620608; Annot_ID_161840
aagatgatacatactaaaaaaaatcttataagaacccatgaattgtcacaaactggctgatatttctcaagtgtaaagccgactagtcattcaaaattcgaaactatatgtgttaaagtcaccaagcttatcaataattgtcatgaactatgaacaaaatcgaattatatgtgttaaagtcaaattatatctgaagttcttgtattaatcctttgagatatgtagtccaaaagattatctaaaatgatatatatcaatatatgcatagtttagagtgcattaatatatggttggagtaaactaaatgtatatagtaagcgccggcctcattttaaaaatcgcgtatgttctgcactaatcatttttttatttataattacgacaaaagaaaaagaaaaaaataacaataaatcatcaggtttcttgtctcattagataatatatttatggactaatcacagctcacgtaatcaaatttataagcaagttgcaatattctatgaataattaccaattcacccaatagataacctcaaacctctaaggagaaatccaacatatctttggtttatattaattttaatattcttgaaataggccctcgaatctttccttttctttttatagttttgaatttcagtttggtgttctgtgcccaactacagacgtgtgtgtgaaagattctaggggcttaacacaaacggtacgatacatttataaaaagggaaaaaacccaaaaaaaatctcaactaatttttatttggacgtttaatatctaattatttttatttgaaaggtaaatacacgaagtaataaaaccgtgcaatttaatacacaaacaagtaattgttgttattttcatactcacgatctcacaacaaaaataaaatttcaattttacccttaccatctcaattaactattaatttttataatatgatattaaattttataattttgaataaaaaataattttattaatattttagtttatgttaataaatttaatttttattcaaaatcataaaaattaatatcatattatcaaaaaaataatagttaattgagatggtaagggtaaaattggaattttatttttgttgtgagatcgtgaatataaaaataacagcaattaattgtttgtgtattaaattgtacgattttattatttcgtgtatttaccttccaaccaaaaacaattgggtattaaacgtctaaataaaaattaattgaggttttttgggggttttttccctttataaaaataacatagttctttcattctctttttatagaataacactgttctttcttacaacttttgatttacatttttctgtcttttttttctgtcaaaccatagatttccattcattaactttaaagaagggaagttcatacaaattaaagctaagagaatacaagaaaataaaaataaaaatttcatgagttttctaaagaactgtgtacttttaaaagagtttacaagatttaaaaaatctgttgagatcttggcaaattcaaccttgaagacggacttatcgaaatcctcgacttatcgaaatcctcgaccaacgtgtagtcataaacggttctcgcaaacaaagcaaatgaacctttgaaaagatgctctacaggggaggcggacgggtcaaacagttggaataagatatggtaaccatctatcggagaaagggtcataatatcgctccttccacactatcagaggtttgcaaattattcaaacaattgatgttcacatgaatgaacccgataattagcgaatggagagatagagttgaaaaaagctccgctaacccctactctgtagtgacggggtcataatgccagtctttttcactctattggttgtgatagagaatttcagatagggttcatactaaacttaactgttgatctcgacaaaggtaactattagacaaacctaaagaaacggatactctattagcgtgaagttcacgatcagcaaaatcagagctaaagggtgctaaaggaaaataccttgacagaaaattatcgatacttaacacgggcagcaaaactccaagacactttccaagtgagccttaacccaaagcgattcgagatcaaactttcacaattacttttttctcttaaccattattttttaaacaccaagaacatgtcatcaatcagactcaaaaatgctaaacaagattaggataactatggtggaattgtggaagaaacaaactgaacataaaatagtaatggtggttgatataaacaataggcccgatgaaaactacaatagatggaaaataaagggaatatttcattaataaccggactttcggcaaaaatccaactagtccccatttttttgtgtaattttttcttcaatctcttaaaaatacagatcaatcgcacgattattattttttattttgtaggattagcgtatatatttttgggaccctatatttttcttttgtagacaacccttaaaaaaaaaaaagaaaacgcaaacgtcgggtgttttaaaacgagccacatagctttaacttgtgggctatatatatagctttgcacacataagaacgaaacataatgtggcttggcttatctctcagcacaagtgtttcctcttaaactcatccaatagtcctttacgccttcaaatccttcttcattctcccattcacaattccttcatttttaatttttgattcatcctccattttttttttctgaaaaacaagaaaagttcaaaaaaaaaccaaaaaaccaatctcggttttcgtcattgtattcatctttaatggtagaccgtagacacgtattttgaaggtagattttaaataactctgtataatgagaatttcttactttgcgtaattttattgagaatctaatccgatgaatttggtcaatgcaacttatttatctacaatgcagggaattacaaaattttaatactatctcttaccaaaaaattagaaaatagagagaagaaaaatg

SEQ ID NO: 33464 - DNA, 3003 bp, Unknown
  misc_feature (1)..( 3003): 2750-1469P.txt file - cDNA_ID_3070216; gDNA_ID_1620609; Annot_ID_161856
atcatcagtctccaagatttaaactaaatgttctagaacaagataagaatgggaccactaaccagtctaagatctcggtcatccaaatcgcgagtccgaaaaccgatagtcctttcaacataactcatctcattgctcccagacccttttcctttctcattcaaaagatcagcaaaagcaccaccgtactcaattctcatcaatctgactgcagatactgtataggctccacaaacaaaaactgttataagatattgggacaattcaattgcacttaacaatattgatgcaaagacttcaaaagactctttgtactcattaataataattttctaagtactcattaaacgcaacgactctatgtcaacctagatattcagtgtaacactatcactactcaagctagtggtaactaaatcaatggatttactctaccagctctatgtggagaaacttccaaattcagattctgagatttccgcgacggagccaccggacctgaaaaataggaaattttccgagagattgaagacagaaccaggcaaacaacgtcgatactgccattatttttctatttttttaaagaaaccaaaaacagtagagaactattcacctcttctatcaggcgaaaatggttttcgagtcttttgggttcgcttaaacgaccctggagaagctttctgcgtttcagcagacagataaacgcgaaatgagagcaattgcgccatggatgctccactgctggagctagagccaaacctgggaactcttatcgtactttcagaagaaaacactcttttccgccaagagtgttggtttaatgggcctaaaagcccatactttgcagatctcaatttagttcaatttcggcccgtctacttttttttttcctttttttttacatttaacgcaaaggcaaaaacgtaattatctaaaagtcctcttcttccccagttttcctaatttggtaacccttgttgcaggcggctgttgctgatcgggtctctcttctccattttccgattagtaagtgtttattctactcattttgtcaaaatatcacaatgttaatgcaaatttacatatatcaactatcaaaaaggcaatcttttattgaaacgtgttctaagtttgaaaagactaaaactttcactgtgctgctgtaggattaactaggaagtcatgtggttcagaataggcaattcacgtgcaatgacagagataaagtaaaaaaagaaaagtatagaggtacccgtgacctctttcttacacgaacgtgacacgtgagcatgattgtacattagagacgaagctgccctctttcctccttccattacagtgttcttaaggtacaactatgtttctttactttctcttcagggcattgctacttcttaaagttcttcttcccattgacaaacaaagggatcagtgtttttatttcgtcccttcctttgtctgtattcttaagagacaaccaaatcttttttgtttagtaaagtttacgagtgaatggctacttttcataccgttagagatgcggtgaagctctttgacgctggtatttctggaggaaaacatctcaacaaaggacaagaagaggtattgtgccttttgtgtttctttcaccctctgtaacattgtgtgtgttccttggtgtgatataatactgcaatattttctgaaaatttggttattgttgcagggagtgttggtggaggagacaaatctctgtctctggaataaagaggttaacaagttgaaagaaaagataaagaatgctgtgaagaccaagattgaggctttgttagaactggaggaagctaagaaaacggttgagcaactcagtcaggagttgggaattaagcggaacatgattaatgatgagaaagatttagatttgagtagtagtgtaagagttgtgacttcagagctaggtgttgctaaggaatcgattcatagagtagctgaagaggagagtgagctgtgtatgttaatggagtctcttaagctcgagcttcaaaacgtggagaaagcacattcagagcttaaagagattgagcaaagagagagggatcatcaagccattgaagatctgaagaaggaaacaaaagatgcaaaaacccaactctcgttgttagaagaagagctcaagattgctgtttttgaagctcaagaagcaaaagatgcagaggaacacgccagggaacggctaaatgttgcagttttagaatctgatttcagatcattagctgtggtgaaagaaagtgctgctgaagaattaactgagacagaagctttaagagcttgcagagatgaaacactcaagacattagagatgagtgagagagaaattgaagatataaaagctgcaacacaagatgctttgaagaaagctgagatggctcaagaagctacaattgtggtggatgttgagctgaaacgacggcgtaaagcagcgagtaggatcttggcagaatccaaaatgtgtgccaaatctaccaaggaagtgctcaagtcaaaaccaagatcatcgtcaaaagaaggttgcctggtcaagtgttagaagaatcttggtcagagttgtaattgtgaaaatctgtagaacttcaataactagaagaagtgtcactttgttggttgtgttcaaagttggaagatttaataagattgtagtgcgaccatttgtggttttgaatgtatatgtaaacacattcactatcagcattcagcaatcggataactaaacaaaaacaatttgatgatttggagatttggaaatttacagagctaaaagtgaaaaatgccagtgattaataaaagaaaagataattaaggtcggttagtaaaaagacgtaaatataaataaaaggcttgtttttttatttttcactttgttctctctctctctcgtaacacgcctgagagttctcgtcgtccttatctcgatcttggttgattcgctctccgatcggaaattagggcttttgttttctgaagatg

SEQ ID NO: 33465 - DNA, 3000 bp, Unknown
  misc_feature (1)..( 3000): 2750-1469P.txt file - cDNA_ID_3070218; gDNA_ID_1620609; Annot_ID_161848
ttttgtcatatttagttgtataagtaagttcattttaaatataaacgggagtggacatgttctgctgtgtcaaaatcgtatagtctatcactattcgatagatctttcgctcctcaatcgttttcttaaactagttaaccaagaaaatttacgggtttttgtattagtaattacatatactcaatagagtaccaaatcttcattatccattcatttcaactgtctcattcctgcttgtttgatacatgtaacattcagtattaaactcttctttctggtttttttttttttttttttttttttttggtgttttcacgttgatcaattgaattagtcaaatcaaatgttttccttttaataaaaacctctcgaaaggactagagaaaagataaatcacattaaatggaacatgcatgatgctagctagtgtagttgaaccgtttcagaaaacaaaacaaaaagttgttcaaagtgaaaacccaactaagcgatcgactagaagattctcaacaaatttcacagtaactttattttttaatattcaaataaaaatgatcttatggagactagtgatgatgaatatgtaggataggatagtgggggaactgataaaaaaaaagtatggaggtctaaaactaaaagcagagagcagagaatctatatatggagtctttaaagcaaacttatattactttttaaacatatattcgattcttcgttctcgttgataaatattctacaggttgtacatatggattgatggatcatgggattaaatatatgtacacaatacatcattttgacgtaacttataacattgttagaattttgtaatgagtctgaaagtttctacagttatcatcttagggcttactaatagctattatattattgttaagaatacgtaataacattgataaatgcgtatgtacattttacttttaccaaacccatgatcaatttaaagaaatctatacgtactgttcaagcttggaatcatggtaccggatgttctgttggccacggaatcagcaaaagttatcagatcaagaaaattaaacattttaaaaatcaactatagccaagaaatagaaaaaaatggctcaatccatcacatatcatgtttacacgaaagtacatcatctcctaaaagacatatagaattaggaatatccatcatacgtttttctttgacattgaaaattcattatatgcaaaggtatacacgtgtgcatgcacggacagcattattcccccgaaactatcgggtgtagacaacacaccgctaaaaacatgtagtacatcagtctagcctatagaactaataatggagttcgatatgaaatatgtaaacatataattttgtatgtatatgatcatattgtagtttaatcgtatttgacgagtttcatttttgcataatatatacgaggtaacaattttcaagaaaaagtgtaacgcgagagaattacttagatttaaaaaggattccattaaaagagatgcttacagaggctaggaggatgtagaagaagctagaaaacgtaactcgctctctatatgagcaaattgcgtttgattaaacttaaacaaaactgattaattagaaagtactcaaacaaggattaaatgccgtttagcttcgattctaagctcttccttcatctttctgatgaactcgtcgaatttcttattcatctcctcctccgtcgatgtcatcactcctacgttcccttcttcttcctcgtttatagatccgccacgaagaccacactcttcctctccatcattatctgctaatgtgttgtcgtcgtcatcttcttcttcgttgtcctcggtttcttgatgttttgtatcttcctccactgtaacttcctctgcaagaaaggactctgttcctattccatgatcagatttatactctagctccagtatcgtagtgtaactctcgaaatctccataatcaaaggttttatcggtattactccaaattttctctattggtttggacgaagcgaccaaaccagaacacttagcaacaaccactacgagaccattgcagaggaggaacatgtagtttttatctactgcgtgtgttacgagttggatcatgaacctatataaatagaagtcgtggctggttaaaagagataaaatccacatcgaaactgctataaacttggtcaatttcttcagaaactccggttttatttgatccatctctctggtttcttttctttggttttgtgagtgaatggtgaggactagaataagaagaagaagaagaaggaattaaacaggttaaagtgtaattgtgcaaagcgttacactacactcaacggctttggtatttatagaatttaagccaaaggcaatgggcatctgtggatgattttaccaaaccaccccttgttctgaagctgcatggctgcatgccacgtgtgaagtgtgatttcccagttatgtggataaaaaaaagtctctgtgtttcttctattgtttgtttgtcaactaatccatgttttcttatgtcctattattggttacattgcgaaacgacctctggttagtgttccaaaagttccgaatcttttatgacctctgatggaattcggattttttttctttttatatcatcaagctatacatgatgacttagcttttatggtatgttaatggtaaaggaatatgacttttaagtcatgtatagcttgatgatatatataaaaaaaaatactcatgattgagacaaatacaaacggaatagtaagggatgattggtctttgaatagtgtgagggcttgtggacaataatatttagaagatgtcattgtcttttatgtctttgattggtttaagtcattttccttctttaaattgcatggatttggcgacatcattatgttaattgttaggcttcttctacatgtattttgcttttattaaaaaaaaattatacttgaactacgctaacaccttatatttccgtgtgagattatg

SEQ ID NO: 33466 - DNA, 3000 bp, Unknown; identical to SEQ ID NO: 2853
  misc_feature (1)..( 3000): 2750-1469P.txt file - cDNA_ID_3070222; gDNA_ID_1620609; Annot_ID_161847

SEQ ID NO: 33467 - DNA, 3003 bp, Unknown
  misc_feature (1)..( 3003): 2750-1469P.txt file - cDNA_ID_3070247; gDNA_ID_1620610; Annot_ID_161884
caaataggttattgtctaatttgtaacatctttttgctgataaacactattatctgatgatagaaaattgtaactataatccgttttatggattgctgacaaacaaaatccgttttggcatagaaaataaagttattgtacgtattgaatggcaatatgcatatatgtatgtattagttaaactcaccttctcagccccctttatcacgaaatatccaccctgatcaaaggcacaatccccctttttgcagttttctttccctttctcgcttgttttgcaaaggatagatttcaccatgacaggaatgctaccaattagaatgtcctgctttttgacatccagtatcttcttctcgacatagttgtcttgtcctgtcttgaatttgtcgcttttaacaacagtattcttgaacacctagtcaatttatagagtgaagaagcagttagacaataaactacatttataagaataagatacatggacagcaaaacagaaacatcatcaaaagtttgacagtacaagagtcattgcacacaagcataaaacactcaaactaaagcacagtgaggcagtggggaagaactaaataaaaaaaaaagctgaagatgtttttcttttattgcatccaaactttaaaatgaaacaaactaaagcttatttcgtttgaatacccaccactacaaggaaaagtaatcacaattcaaattttaaacaagaaacatctaaagattgggagcagacaaaatcatcaatcttaaacacaaccaagcttgaaatacacctctacttcacacgaacatgtaactgtaataaatctcttttactagatattttgctcaggtaagaaatccagcgaatgcaaataaggaaccaaatccaattacagaaaacttgtaaagccaaaaagagtgaaaccagtttcagacaaatatgttccttaacccttagtaaattatttgatggcaagttaaattgagaaatctatgacaggaacctcagtgtatgtcaacatcttcatatatgtgtcagaaagagtctagtagaaacatcaagaaataagcttataccatgtgttctttatcattcatcaaatccagacaaggttacttaatttcgacaaagaatttctgttacctcaacttggacattgactttgatccttgcagagtatgtcatgttctgaagcctagcatgccatgggagaaactcaagctccttgtcatccgaaaagaaagtaggcttctccacagtgacttctccgaacttcaccgttgcgtatctccaatcattatccttcttctttacaacatcaaaagacggttccacaagcatctcaccaaaggattgaaacacattctgaagcccgtgttcaatgaagtagttgtaggagttgagctgatgacttataagtccatacttatcaaagaaagaagttgcagcttttttgcagaaactctgcagaaaaccttctcctagctcagatagattgatctccccagtagtagcctcgaactcttcaagatccttcacatcaatgtccatatctggcatacctcaaaacacactgtacgaacaaaaaccctaaacaaagacagagaaattgattaaaaagctgtgaaaatcatgaaccacgaaaatgcaatcatgcgaatacaaacacgaaatcaacaactttcccttagaaccgaatcattctccataacatattctccgatgcttaaaagcagaatcaaagcgtattacctaaaataggtaccttgattgcttaaagctggcacgatggagtaaaacggcggtgtcggaggagtgcagagtaaacgtcgccggaaaatcgctgagaatgcggagagattcgacgtagaaaacccttggcacactttttcagtggttaagcgaagcagtcaaagagaagtgaagaaattgacgtcactagtactagtagacaatattattaaattttgctctttggtatctatatttttatgtttaagttttattttatttttattttaaagtgaaaaggaaatatatttagaagttcacatgacataaaatttgtaacatctttttttttttccaaaatttgtaacatctacattttggtttttacatctaattcgatttggttgtttggtttaataaatttcatatataacttaattttgaccaaaacacaaagaaaaaaaacaacacataattcactaaaaaagctcagagcaatcccaatggtttaaaatcaattaatttttaattttggatcttaagcttattttaaattaaaatgttgtttttactaagttaagaaaagttaggaagaagtttaaccaatttctacttcaatggttaagaacgattagaattttaagaaacaacaaactatttcaacacaatgtctacccactcaaaacacaacacatatgcttttcttagttttaagaaaatatcttaataaagatgtttttgtttaaccaaaaaaaataaaataaagatgtttttttttttggtgagtgacggagaggcttaataaagatgtttatcttagctaaagtttattggtttcattaaatttaatcacttttatacctaaaaattagctaagatacaaagttggggttgctcctacagtttagaaataatcatcaaatagttaccaaatttgggacatcataattatgggtagtttgatttattaggttaaatctgatctaattatagaaatataatatataagtaaataaaaagttattatataagtgtaagtattgagctctgttttttgttttattatctctgagagtctgaagaagccatgcttctgtagcggtgccaaccaacttggaactgatctttcctgtgaaaaatcgtaatcatgacatcgacctactttctcgtctctttctttctacctttctttgcttcttcatctttctctctttctcctctcatatattctctctatgcaagcaacttcatcacgataacctcttatctcctcagccatg

SEQ ID NO: 33468 - DNA, 3000 bp, Unknown; identical to SEQ ID NO: 2857
  misc_feature (1)..( 3000): 2750-1469P.txt file - cDNA_ID_3070251; gDNA_ID_1620610; Annot_ID_161883

SEQ ID NO: 33469 - DNA, 3003 bp, Unknown
  misc_feature (1)..( 3003): 2750-1469P.txt file - cDNA_ID_3070259; gDNA_ID_1620610; Annot_ID_161878
tgtattaatatttagcctactaactttctgacaaatttaggatcaattatgggattgacacattaaagtttatgtttttgtgaatataggaacatctcacagtacttacaaatttaagtacttctatctcttctctttttaccatattaacctttatattgttggaaaaaaaaatcaagcagaaacgtcgattttttctctccttatgctttcttcattcttccttcttcaagatcttgggtcttgagatgcgatgaagatgatttaggatttgctcatgattcacaattagattgcttttagttattgcgtacatgattgttttgaataaattttcagttattcacaatcaatgaatttgtgtctataattaaagccattgggttgcctaaacatcatcccttagggtttagatatcttgcatcaaatcttatttaattaattccattggattcatcgaaaaagagtcatagaaacgttgtgtgaatcaacggaggaaaaggaaacgatattgatggagtcaaaagtaatgattttgattgagtgtggagtccatgttaataaacaaatttgattatcacgacggagaggattgcagaaggtggagacagtgaggattgttgttctcacgacggagaagacgaattgatttctcatcaacacatttgagggcaaaatcgtcatttctcgaatcaagaagtacccaggcttataagtccaagtagaatgtgtttttcttcaaatttttggatccaaatatacccatatgtacaaaagccccgacaatgtatcagtgtttttatttttcatcatgtgcacaaaaaagaagagcaaatgctaatttatagtgagtaacaatgagatgaaaactaataatgataaatctggttacagatttaattcattattgtgagcaaaggtgcccacttgtagttaattttgtttaaacaggaataattagtgaatactataatgagtatattccctaaaaggtgaagggtttgtaatcttcttatgatggattagtaacagcagcatctcgtttgtatattaaaagtattttcgatagatcaagaaagattaagcacttgtcatccacccacaactcgatctaatttttttcatttaacatttctggatcatgtttttgagatttgatctattaatattagtgtttataagatgccagcgaagtagaaccaaatgtgaagattatacagtattagaaattactgaggtaatactgtttatatttgtgtaaacttgctatacaagtctctccaaacgaccaagcctatattaattaggacttgatcgacgtacctacgttccaatactataaaacctaataaaattaaaggaaggttttcatatcccagttaaaacattttacgtttgatcgaacatgaaaacaaaaaatcgcctcaaaaaccctatttatggattagagtctcgtgttttcgaagagttgcgttttttttttttttaattttctttggttcaaagaaaggaagagtttcgtttagaatttgaattttagcatgtacttactattcaataaaagaggtgagaattaatggagagaaacacgtgacctgaaacaggtatgatcgagagatgtcacaagtgtatttgtacttgaaaataaaataaaatggacagctaaaattgtgatttcttaaaattactagctacgaacctttctttttcattaaaccacaaagtacgttttctccttttcgtatatcttgttaagttcaaaaatccaaatgctttgatctaaaaaaaaaatattaattctaaactcttcaatcaattatggaaaaaaaaagaggctcaaacgaaattcgcaattcgaaactgtcacatgtgtattcgttatttcgatatagaaacctcaacttgaatataatagtttgtttgtttgcttgaagttaatctctctcttttttatcagctaaagctgcatttataaaaattctagtttaacttttaccatttgctataatttagagattttaacaagaaatctggcctagtccgcaaaacttatagaataaatcaaacattcttcaatattttacacatccacaatacccaatccaagaaatggattgcagttgcaccagagattacatgtctcgttttagtttgctagtcactcaaactcacaaagcataaattgtaatagaaaatagaactttatttaaatctgaagaaagatatatataaaaaaaaaaaaaaaagaagaagcaggctccagttttgatgggagaagaaaagagagctggcaacagctattcactgatagaccgatcactctcttctgtcccgcactcttttcttcttttgtttctttcttttcgacagctttcatttttcctccatttttaaatttgaattattttacagtcataaaagtacttcaaacgtatatgtaaataacgagcaacaaaacaattaactacaacaaaactagttctagctaagagaattagttagaaatttttattataatagttagtatatgtttattcataacacaattaattaacacacaaaatacatgtaatttcctctataccctcttcacatataattagagtagtgctttaatttaagattaattatcgatttacatcattaatgatcatctagtcttacacagagagtttcagtatctgcatgagattatataaaggaatgtattcatgtttttacttctttttattcatggttaaggatgatacattataattataaatccataatctatgaactcaactattctttataaaaaaggaattaaattctgaaaataaacaactgtagttggcttcccaaggctgctgcttcacctataaataccctatcctctttgaaaactcatctcacatcacaattcacatctcctcgaacaaacaaattataaacccattttccttcataaatttctaaaataaaaccccttaaactttcattcacatcatccaacccccaatg

SEQ ID NO: 33470 - DNA, 3000 bp, Unknown; identical to SEQ ID NO: 2869
  misc_feature (1)..( 3000): 2750-1469P.txt file - cDNA_ID_3070286; gDNA_ID_1620611; Annot_ID_161918

SEQ ID NO: 33471 - DNA, 3000 bp, Unknown; identical to SEQ ID NO: 2866
  misc_feature (1)..( 3000): 2750-1469P.txt file - cDNA_ID_3070290; gDNA_ID_1620611; Annot_ID_161917

SEQ ID NO: 33472 - DNA, 3003 bp, Unknown
  misc_feature (1)..( 3003): 2750-1469P.txt file - cDNA_ID_3070294; gDNA_ID_1620611; Annot_ID_161914
acgtcagcggaggcgctgatgacgtcatacccagatgggtttgggtttcgtggaccgttgttattgttactgccgttaccgttagtatcctttggatttggaatttgtgggtactgttttttcaggaaagatattccaaatttaccaaaaaggttaggtaaaaatatatttacagtttccatattcgagattttgttatctaatttgagcgtaaattaatatctccgaataaattatgttcatggatttggttgcatatatataaaaattgtccgggacaaatttttaaaaaaattatatcttagattccaaaataaagtctcaaaataattaacatatagtcaatcaaagtttttatatgctattagagttgtttaatagtaaaaaaacaaaaaaactttggttgactctgtcaagaataaaatgagatttgttctctaattttagcgtaaaataataaatctgaattaatcatatcccattatctctggacttggagctatatgatcagtactatcattgaatttagacacaaattggttataagggtgttcgtttaatatagtttggtattcggtttttacaaaataaatttgaaaatccgagacaaattggatattcaaaataattgacagatcgtaaggtttatttttattgaagatagaatacttttaattattattgtgagtcggtcttaggttgttgagacgaaagttaattataagaatgtttgtcacaacccattactaagtctaaagcatagaaaacttgggatgactaaacttggggtgacttgtacaatatcaaaaatcgagatcattgcctcggacaataataaattccacaaaagtacgagtgactagtgtccacgagactagtggttgaaaattaggacttgaattcattccctctagaagtttatacaaatttcagaccaactttttaattaacactttttttcatttattttttcttgagcaaaataagagaggaagtaagatagattaaaatttaaacaaccacaagataaacatgctttaagattctagttaagagatggataattgaacgaatccaaaccaattggaggggaatggtctgttagatttcacatgttagaggttcctccatgaagtctagagttagactctttcgaaatctcacaaaatgtagcttgaaggatgagtttgacatcaacaatctgttggtccaatagtaaatctcccagatggaggtgttgagttcaaagcatgttgggagggattttttctcctaaaaagatgaatttaacttggtgtaggtctcgccaggctgacctcgcccatatttacaaattacaatatcatcaaaacccgaaggagtaaacaaagagtggtgattaaagaatgaagtgtcattttaaatagctcccacttgtttttctctcgatctcaatctgacagaaactgatatattccactgatcttcatcgattcatcaaagttttagattttaattcagatttcatcttaagggagggtattacgagtataggaatgtgattatcatattaatgaaagttgaggttttaaaaatagcttaaccaaacaaatgtaatcttgccaaaaagatataaaatgagtccatcaacaaaatttatcggagttacaagatcatcagattccgaaaagcttttctgtttatgcgagcggtaatagtgttttttgatgtctccgtcgatttctttgaaggtggccaaaggcgaaacggagacactattgtgcaacaagttgttcatttgtttccaaacatggtaagctgtagcatgagcaactcctactaatttccaaagaattgtgggagcagtctctgtttttagcttagtccaagccagaattgaaatccaagtaataaagatataaggcgatatcgttaatcctcttctggtgttttctgtatgtaaaacggcgtctttcttttgattcgaaacggaggagtttgtgaagggtaacaagacggaatggttctttatatctgggaggaccaagatggggaaatgtggaaaaagaatgaatcgtagagacaatggaggatactggagggtagtatcatctctgccaagaagattcatgctggagaagcaggccttgtcggctacaaatactcactagagtactacattggaaaacaaccaaaatggcgtaaaagagggttggttgatgcatgaacactggcttaagtcttctgatgatattaataactacgagctggtaagagtatatatgtacgtttacttacttggtttccaagttattgagactcttgagttttggtttttattgtgacgacttctgttgttttgtttgagtagggcaattatgctatgtgcaagatctatctgagtccacacgcagcaaagaagaagaaaacacacgatgaagagatcgacgatttagttcaatttgtggaagcagccttagatgtttctttttatctacttttgctgtccaaagtcagaggtctcattgtctttatatagaatttcttgtatataacattttccactggttgtatagaaaaatcaattttagtcttttgtgcttattcactctaatcaaaatctctaatcaaggtgaaggaggaggtggaggaagaacattttcatcttgctctctaagaagatccaaaatctctgcagggttgttatcaacacgctcttcgtctctgtcttcctctccggatttagtttcgtttatgggcaaataatcaaattcgggtttaatcttccaaaccgttgtttccttttatattacatcatttccttttccttttttattattgggccgaagtagtttatattattaatgggctttaaacaagcccatattcaataattgtcggccaaaaaaaaccctctcttccaagttccaaaatcatttcataaaccctaacaaacccctaaatctttcctttctcaattctctccttcgaagcttttttcttgtgaggtcagaaaagaaaatg

SEQ ID NO: 33473 - DNA, 3000 bp, Unknown; identical to SEQ ID NO: 2872
  misc_feature (1)..( 3000): 2750-1469P.txt file - cDNA_ID_3070298; gDNA_ID_1620611; Annot_ID_161904

SEQ ID NO: 33474 - DNA, 3000 bp, Unknown; identical to SEQ ID NO: 2865
  misc_feature (1)..( 3000): 2750-1469P.txt file - cDNA_ID_3070306; gDNA_ID_1620611; Annot_ID_161895

SEQ ID NO: 33475 - DNA, 999 bp, Unknown; identical to SEQ ID NO: 2878
  misc_feature (1)..( 999): 2750-1469P.txt file - cDNA_ID_3070329; gDNA_ID_1620612; Annot_ID_161953

SEQ ID NO: 33476 - DNA, 3000 bp, Unknown; identical to SEQ ID NO: 2876
  misc_feature (1)..( 3000): 2750-1469P.txt file - cDNA_ID_3070333; gDNA_ID_1620612; Annot_ID_161951

SEQ ID NO: 33477 - DNA, 3000 bp, Unknown; identical to SEQ ID NO: 2882
  misc_feature (1)..( 3000): 2750-1469P.txt file - cDNA_ID_3070341; gDNA_ID_1620612; Annot_ID_161949

SEQ ID NO: 33478 - DNA, 3000 bp, Unknown
  misc_feature (1)..( 3000): 2750-1469P.txt file - cDNA_ID_3070356; gDNA_ID_1620612; Annot_ID_161945
acagcacatgctccatgatgcgctctcgggtaaacaacacttaggcctttgtatatagatgaatgtctgtccgagacaatcattaaatcgtcactgtctggaacaatctcagctaacttttcaaaaaaccatgcccaagaagcatcggtctcaccatcaacaacaccaaaagctattgggaatatttggaagttcccatcttgggcacatgcaataaggagacatcctttgtaaggtccgactagctgcgttccatctaccacaactaccttcctcatatatatcagacctttgatagaagcgccaagagagacaaagacatacttgaagcgctgcttaccatcatcttctggtgtatagtgtaggtgtgttattgtacccggattagctaattggagaagatacagataggtcggcaaaaacctgtaatttgctatctcatccccccgtacattttccactgcaacctcttttgctctccaagcggtagaatacaaaatacgcacattcagatcatttaggagcagctgtggtaagtcgacagctcgcggctcaccctgcgtagaactgtatctgctcctcacaacttctccgaggagcttataattagcatgtttattgtagttcttccgagagtcgatgttacacgtatgtgtcgtagcatacgaagtgattttgaaactttctgaatccttcacgacgcgagcagtcaattgccattgacaagtctcatcaacgcacaccatcttcaatgttttaggacatgacttaggttgcttgaagcaaaagcattgctttatcgcttgaagagacattgtttgttgcaggacttttctattcttaaaaacacttccaacaaacaaagtttcgcctgtggtgctgatttcaacctgtgtctcatcagctcgaaaattgagtaagtcatcgaacacaggagcagcatcgttaccgagattcgccaactcgccaccatgtaacttaggaaattcattatacacttggtaggcctcagctgcggtaactaccccattatcattttgtgtcccagttgaggaagctccaataccttcgatcacttcatccccggtgacttcgtctatacaaataagattggaatccctttgcccttcgcagcgtgtaccgtaacccaatggagagattgtttcttcgccaggtacactaagaccagtgtacgtacacgtttccaagagacgactgaattcccctgtatctccgccaggtacactaacacccgtgtacgtacacgtttccaataaacgactgaatttccctggatgttgagcagtctgttgagtgagactgacgtcttcctcaagatttccttgtacatattcttctactattacatcgttcctcttgttgtaatcgtattcttcgccaataccttcactaccgtctgtggtaggatacagggtacttcccccaatagatccatccacaccaagataatcatcacacccatcatcatcttcgttgccctcctccaattcatcctcttctgttgtatcgtcttcaacatcggcttgctcctctgcatcctcattattttcatcaacatttgtagcactgtcaaacacacggtcactttcagaaacttcaccatgagacctagagacagtattcccgaacgccttcactgtattattgaaagagacgaacaagttgagagaaagatacccaccacgaaccaaaaaaaacgtctcgagacccatctgactgtcaatgtatacaggagggcgtttagtatctatcagcactgacatttcacccggcatccagtagctaattatgggattgatctcggtggacttcaaactgaaagcctctcggagtgtacggacaaagtccgtgtacgtcatggtttcctgaacgcgtacacaacgaccaaagatgccttcctcaggttcaaatttccattctccttctttgcatttccactcaccgaccatggtaaatacgggaatatccgtaacccacctgcatcataaattcaggagacacacattaaatgcaactgaaaaatactatacatataaaaaacaaatggaatgtcgatactacacatttataaacctaaataccaattatcatttgactattttaaacaaacaaatatagattttgcaaatattctgataaaaaaatggagttcgaacacaatcaagatcctaatatgacataaaaaaaacttcttaaaagaacttcattacttacacgagcaatgctccaaacttggtacaaaaacaagatcaacacttcttcagcagcaatgtacgttcgcaataattctttgttcctgggttcatcttctttatctcaacaaattttttttttattattattaataatttttttaatattatttgatgtaatgatgattttgcattaattgtgacaatagtcacatctaaactttttgggggcattaaatgttgatgtcacttcggaataatctcacttgtaacggaaccgaatcgcgtcaacgtgaacaaaaaatcttcaactgaaccggaacagtgtacgtaactaaacctgctaaactaaaccgtacatttcaacagttgctaagagagaagcgcaagggcagaagcgttattttgcaggcgaaaagacaaatggtgaaaaccacatttgactttgacaatccatggaaataaaacatggtcaacggatgtggcctgcaatttacccttaaacaaaactctgttattggtcactattgggctttttgtattgagccgaacgacatatctccagattagtggacccttaaactgacacagagtacttttggtggttggaagaaaacaaagtcacagatgtttggtttctccgacaaacgtggaattaggaatcacagtgatgatcaagagtttatctctggcttctgctcgcatcttcttctctagaacctctccatcttttcttattcccttctcaaagctctctgtatctcatcgtcggaaattctcagtaatg

SEQ ID NO: 33479 - DNA, 3000 bp, Unknown; identical to SEQ ID NO: 2880
  misc_feature (1)..( 3000): 2750-1469P.txt file - cDNA_ID_3070360; gDNA_ID_1620612; Annot_ID_161943

SEQ ID NO: 33480 - DNA, 3000 bp, Unknown; identical to SEQ ID NO: 2879
  misc_feature (1)..( 3000): 2750-1469P.txt file - cDNA_ID_3070368; gDNA_ID_1620612; Annot_ID_161940

SEQ ID NO: 33481 - DNA, 375 bp, Unknown; identical to SEQ ID NO: 2886
  misc_feature (1)..( 375): 2750-1469P.txt file - cDNA_ID_3070398; gDNA_ID_1620613; Annot_ID_161988

SEQ ID NO: 33482 - DNA, 3003 bp, Unknown
  misc_feature (1)..( 3003): 2750-1469P.txt file - cDNA_ID_3070413; gDNA_ID_1620613; Annot_ID_161973
ttggtgactggactatagtgttgtaagatgaatgaagttataataataacgaagcttgctttttgttgttctgttagtactcgttcattcattctctattaagacactcaaaatctcataccactctttatttttctcaaacctcacactctctattattttctacgttgcttgatattgtaacttcttactcttgtattgtatgttatggggatgattgctctcgtttattctctctcaatctatgttctacagagagtctgcagcccacttttgttgacaaaaggagaaaccaacacatcttattttcaataataaacactatttaatttttcaacaaaaaaacactcctttgactaagaattagtgaattaccacatgtgatgcaattctagaatacgtggtaacagagattatttacactatgttttatctacctttccggctttgagcaacaattgcaacaacgatgatgaccgttgagttccaaaactggttccttttcatatattaaggagagaatcatatctttgattattttattcgaaatcttatacaagctggtgcactacgtgtctctcatgtctcaacccatgatcagttagcagacgcattgacgaaaccactaccacgtaccagttttcaagctgcatgttccaagattggagtgacaagagtccctccatcttgagggagcgtattaaggagagaatcatatctttgattattccaatcatacctttgatttctcatatcattcgattactacaatcatggacttatttatgtatagtacatattctgatttatgtctattgtaataccctagctagcatctcctctgtatataagttctcactctgttttaataaaaagatatcacttctacaaactcttatatcatactcctctgcttcttgtcactcttttgttactctctcttcttcaagaaacaaaaggactcacaagtgcttccgagccctccggctcttccgatcattggccatctccaccatgtactcttttcttcagcttacaagtctttacaaaaactctcatccaagtacggacctctcctatatctccgtatcttcaacttccctgtagtcctcgtctcctcggcctcagtggcatatgagatcttcaaggcccatgacctgagcatctcctctcgcgagaaccctccaatcgacgagtccctcttgcttggatcttccgtctttgtcagggccccttatggagatcattttaggtttatgaagaagctcttggttacaaagcttttaggaccacatgcactcgagaggtcacgaggcatccgtgcagatgagctagagcggctttacagaagtctttttgataaagctgtgaagaaggagagtgttgagattggtaaggaagcaacgaagctcagtatcaacagcatatctgcaagatgagcatggggaggagtttttcagaggagagtggtgaggctgagagactaaggggattggttactgatttagatggcttgacaaagaattttttgttggcaaacatattccgctggccgcttgagaagctcggaatctcactgttcaaaaaggagatagtgtgtgtttcaaatatctttgacaagttgctggagaagattcttgtggaacatgaagagcatcgaggaatccacttgacaatggctcatcctcttaagtgcactccagttgctcgatccttaaaccctttaatatcttatctgtaaaatcgatgtttgaatcaaagttggtgtctggactaataataaggacgattgcgctctgttgttctgtaacttactagttcattcatcttattcaggttcccggtttattagctttatatttggtttactgtggtatgattttttctctcgtttatatttgttgaattgtgttaaccaatggactcccgaagctttggtttagtttcccgattaagcattttaggtttggttttccttaagaaaccgtaaacactgtttattgtgttttgtcttgtttaggaattagaacggttgaatttcagatttcgagattcaaatgcgattattgaaggtgatgtccagaaagcaaacaaatttcgtcggtgtagggtttggtttgtagaagttttgtgtcaaaatgtattttttttttttttttttttttaccaatttcgagtgacggaggaggaaaataagatttgggcttcgaagttcagtgaactaagtgtgattttgggagaaaatggagtaaattatccctgcaagaaatccatcggtgagtaaactactatgttgatgaatcgcattgtgttagtgatgattgcatctcttgagtcaatcaagattgattatttattgagatatgttcgtcttttctttgccttttttttgactttatatggcttctcatcaaaattacttaaacatgtctttgtaaccaaatcgttgccaatataactactttcaggtgctaatgatttttctctggaatttcattgactcttcaaactttgaaaatggttagggaatcctcaaatttgtgggagaaatataatacaatcgttgcaaagaatcatatagcaagattctttatttctctacatattttgtagtttacactttacataaccacacagacttacctggtttaggaagaatatacttctttttgaggttttgcttcgctgattagattgtttatcatgttgtgtagtaaacaggttttcaaagaggaaaaagaagaaggttatgaggaacattacttatactgtgagtcaatcttgaatccttctgtttagttgcattattagcttgagaggttatgaactctatatttattattattatcgcttagatcacgagtgtctcttatctgagtttatcttatttcaaaaacaaggttctagttctccaatatttcaccttttttccaaagaaaagcattttttaaaacggatccctgattatgtttcatacttcttcttcactttggagcaacaatg

SEQ ID NO: 33483 - DNA, 3003 bp, Unknown
  misc_feature (1)..( 3003): 2750-1469P.txt file - cDNA_ID_3070421; gDNA_ID_1620613; Annot_ID_161971
ctccgactcttcccatcattggtcatcttcaccttcttctctctgttctagtccacagatctttacagacactctccaccaagtatgggtctattctctatcttcgcgtcttcagtttccctgtagccctcgtctcctcagcatctattgcttatgagatcttcagggaacacgacgtgaacatctcgtctcgtggtttccctcctaccgatgattccctttttgctggatctttcagcttcacctctgctccctatggagattactggaagttcatgaagaagctcctggtcacgaacttgcttggaccccaggcactcgagcggtcacgaggattccgtgcagatgagctagatctgttttacgagaacctgttggataaagcgatgaagaaggagagcgtggatatctgtgtggaggcgttgaagctcagtaacaacagcatctgcaagatgatcatggggaggagttgttcagaggagaatggtgaggcagagagagttagggctttggctacccagttagatggcttgacgaagaagatcttattggcgaacatgttgcgtgcggggtttaaaaagcttgttgtctcactgtttagaaaggaaatgatggatgtttccagcagatttgatgagctgctcgaaaggatccttgtggaacatgaagataaactggacatgcatcatcaaggtacagacttagtggacgcgttgttggcagcttgtcgggacaaaaatgcagagtataagatctctaggaaccatatcaagtcgtttttcgcggtaaatgttcctcccataaggtggtttcattgagaatgcataacttttttgcctaagaaaaaacgttttgcaactgcaggatctcttatttgcaagcactgacacctttgtgcaaacaacacagtggacagtggcggagatcattaataaccctaatgttcttgagagattgagaggagaaatcgattccgtggtcgggaaagcaaggttgattcaagaaactgatttgccaaacctcccttatttgcaagcggtggtcaaggaagggctaagactgcatccgccggggcctctctttgcaaggttctcccaagaagggtgtaggatcggagggttctatgtaccggagaaaacaacattaatgattaatgcttatgctgtgatgagagattctgattcttgggaagatcctgatgagtttaaaccagagaggtttctagcttcgtcaagatcagagcaggaaaaggagagaagagagcaagcaattaagtacattgctttcggaagcggacgaagaagctgtcctggagaaaatctagcatatatctttttaggaactgcaattggagtgatggtacagggatttgagtggagaatcaaagaagagaaagttaacatggaagaggctaatgtaggactgagcttgaccatggcttatcctcttaaggtcactcctgttcctcgaaccctagtccccttaactcagaatccactgaaccggagttcatgaatctttggtaagtaattaggtagccttgtttttacgttaccgtgtctgagtttactggtttagtttggctaatgtgtgaaaccgtaaacaattgtgttgttattcggatttatttgtggattggttcatatatggggttatcttgaaagcagcaaactttagcttcttcatgttacttggttcaatggatttgaaggatgccagttggagtagcatagaaataaacattatattgcaatcacatgagtttcttttgcgaaccattcatgtttcagggaagggagggaaaacttaagatcttgcagtagatttgagaaatgttttggtctttatatttgtcctctccacctatgatatgctactcatgtgtggtttctgtgactttgattgaatttatgacccgaaaggaagaaaatttcagttgtgtagggtttttgtaatttagatattaaagctctttacggagatttctgcagtaattattcttcttttaatgcgctttcaagtagtgatgtttgcggcttcttggctccctggatttacaacgttttcctggcaaactcatcaaatttcttcaaaccaatgctcgcatattcatcagaacaagctcctcgacatcaacgcactctcacaactcacaagctccaagctagccttcaatatcttcattcaaccataatctcacttggtaaatatctctctttcagtaattcctctttctttttcatgggtactacattacaaaaatcagacaaaactttcacggattcctctttctttttcatgggaactacattacaaaaatctgacaaaactgatagaatattaaattcacttgtcgtaagatgtgagttattagcaaaatttcacggagttccaataaagaaaaacatttcttgatctagtaaacaaaacatggccatacattagattcattgattcttgataagagaaattgtatctaatggcaaagatatcttgatgattttaaatgctattttcttaagaaaattttcaaatatgatatgaaaccaaagatcacatacaatctaattttagtggttaaaaaaacaaaatcaaattaaccaatttaaacaacaatttataatgattgtggtcctcagtttacaaacttttccaaattgagtaaggctattacattttggtaacaaagggggcacggcacctcaactttccaagaaatttgtatttttatgtgctattcaaacactacattacggattcctctttctttttcatgggaactacattacaaaaatccgacaaaactgatagaattattaaattcacttgtcgtaagatgtgagttattaccaaaatttcacggagttccaataaagaaaaacatttcttgatctagtaaacaaaacatggccatacattagattcattgattcttggtaagagaaattgtacatttatatgtcatttgcctcgtcttcactttgagtaacaatggcagcaatg

SEQ ID NO: 33484 - DNA, 3000 bp, Unknown
  misc_feature (1)..( 3000): 2750-1469P.txt file - cDNA_ID_3070425; gDNA_ID_1620613; Annot_ID_161966
gttccccaaaaatctcattatcttattcgctataaagccatccttaggtttcttgaagaagagatagcaacagagaagtgagaagagacataagaggatgaagatgaaggagttttgagcgtcaacggtgatatcattgttttttttggtaggttgatgaaacaagaggaatccgtagtcaataatcaatcaggattgtttataacagaggaaatttgtactaagttcccagcgaaactctcgtgaccttcatggcatgtacaattatggtcacaagtgtggaccaaaatagatcttttcatcaaaaaaaaaaatgtgtgaatccaatggataacttggttttcatattcttataattaagaacttaaaattaaataaaaagatagaagaaaaatagtgctttgagaagaagaaaaaaaccgttgccctagaattaaaatccacttctcagtgtcataggcgtcgtcggtttgggaattttataaagttggtctcttttgaattcatcagtttcgtcattctccttcaaatctggaaaccaaagcgagtgtgttttgctctcttgaatcgaatttgtaagctcgtcgattttgcttctttccgggtcgggtaatcaatttgatttgattcttcactcttctacagtgagcagaaaatggaagctctctacgccaagctctacgacaaatacaccaaactccaggttttctgcaacatcttccgtttaattttcttgtcaatttctgagggtttctccggaatttcgcttttctgggttcgattttgatttcgatctccttttttttcagaagaagaaatattccgaatacgatgagattaataaggaacaagaagagaaattccttacctttgtttcaggtaccaatttcgaaagattcgttctttgagtttgagttcctttgttccatacttgaattttagatatctctagttaggtttgatttcacattgcaattacaaacacttggaatcgagaattataacaagagaccttttaagtctgtgaatacgttcttagtgtgtctgtcttttctctcttttgctatttgcagcctcagaggagttgatggaacatttgagaggtgaaaatcagagttctctggagatggttgagaagttgaggaatgaaatcatttcaatcaggcatgtacttcaccttaccgtcttgattttcccagacattcttttttatttagagaagttggagccttgctaatgtaactataacaatcttgatccacagatctggcagggacgacaagtttctggagtgtcaaaagcttctcatggaagaagaactaaagagtaagaaactatgttaattgatgatagttgctgctctattttcatgtgtcatggaatgtagccttataattggacatgatatgtagtttagttaggaatttagctgagataatgtgaactgcttcatggagagtgatgaggacttggttataatactgtctaggataaaatctttgttgtttttcttacagacaaatcactttctgaagaagttgtcaagctaaaagagctggtccaagaggaacatcctcgcaactatgaagatcaaagtggaaaaaaacaaaagagaaagactcctgaaagtgctcgagttacaacgagaagcatgataaaacgtagcagactgtcagaagatttggtggaaacggatatggtatcacctgacattagcaaacatcataaagcaaaggtaaaacagatcacctcttaacctttcagttctgagctgaatgttgtgcatcttgcttcacaaacccagtggatcataaaattagccttactgatactttttcttgcttttgtttcaaggagcctctcttggtttctcagccacaatgctgcagaacaacctacgatggatcaagtagttctgctagttgtacatttcaagctcttggcaaacacttgctaggaatgaaattatcaactaataataagggcaaacgcgcctgcattgtagcctcacacccaacaaccggtaatttgtttttcctgcatgatctatttactttgattcaaaagatcttttgagatcatcagccaccagaaaagcaccaatgctgattttgtttccctgattattttaccataacaggtttatccttcagcctaacttttataaataacccaaatggtgaagaatctgagctgctttacaagcctgcatcactcggaacatttcaaagagtggcaccggaatggatgagagaagttataaagttcagcacaagtatgtgtcccatcttctttgaaagagtctctcgagtcattaagctcaattgttgatcggtaccgtatgtacatctccctccccttatcttgtgtagtcatctctgatggcttcttagtgtgatgtttctcaataggtttgaaaagctagggaagttatcattgtatctatagaaatgtgtctctctttaactttggaattagtttcaaagatagtgtgtccttgtgatgaatcatattgtaacaagatcttgatttatcctttgctctcgataccctctcctcttgtagacctcataaatctctgatctattgagcattttacatgattcaacattttacatatttttgtaacaaattttatcattggaaagattaaatagccgttacataaggtaggtgaattttcaattcaaatgcatcaaaatagccgctataacctaagtgataacgttcggaaaatgctttaggataattcctttttattgcttttgaaaacgacgacgtttcttgtgtcgtacacgttttataacccagacccacgtctctctctctcaaagaagagaagaagaactctctctctatctctatctctatctctcttctccttcttcttcagtttcgatcattcttgaatctgattcttctcgagaaaaaagcgtttcaatttcagaaatttcgactacgattgttgctttgttcaattagaagaggcgaaaaaggatg

SEQ ID NO: 33485 - DNA, 3003 bp, Unknown
  misc_feature (1)..( 3003): 2750-1469P.txt file - cDNA_ID_3070480; gDNA_ID_1621096; Annot_ID_55704
ggttaaccatggcgaagatgtgtttggctgacgggaagcttgctaaaagatatctccctctctttgcacaggtctgtctgcatttgctgattcatgtgtccattttatcattttgattatttctggaaaggaaacttttcgttccaggaacttgattcattggatggtagtctcctttgtctcttcaattttttttaacctatgtgaacccgttgatgccttactcttgcaggaacttgaaaagagtgattgtgcagccttgcgtaacaatcttgtagtagcgatgacagacttttgtgttcactatacagccatgattgagtggtatttcattcacagaacattaatttttcaaatgttaaacatgattgcgacattctaatggtttgtttacctggatagttacataccgaagattactaaacgtcttcgggatccttgtgaagttgttagaaggcaaaccttcatacttctctcaaggttactacaggtattgctattctccacagattctttatcttctgtttttaaaaagtattgaattgacaatgaataagcaggcttgttttcttgattcagagagactacgtgaaatggagaggagttctcttccttcgattccttctatcgctagtggatgaatctgaaaagatacgtcgacttgcagactttttatttggaagcatccttaaaggtatgagaactcacgtgagcaaccatgaaatgcattctttcattcccatgttattgaaaattcttacagagagacatgatctctaggatttttgattattgttacgccccatgttgcttatagtaaaggcgccacttctagcttacaacagtttcgtggaagctatttatgtcttaaacgactgccatgcccacactggccatagtaatccagattctaaacaatcaagaacaaaggatcaagttttttctatcaggtacttgtgttaaagttatatagtctatgctcatacgcaaacttgacattttggtgtgaatgatcttagtgattatctttgtttcatttgttctgtagagggaatgatgaaagggctaggtctaaaagaatgcagatctacgttactttgcttaaacaaatggccccagaacaccttttggccacattcgccaagttatgtgcagagatcctcgcagctgcttctgatggaatgctcaacatagaagatgtcactggtcaatcagttctacaggtaacttccaaaatggctacagagccttttttcttcttgtgattgccgatttttaactcgttttgtctcggtgtaggatgcgtttcagatcttggcgtgcaaagagatccgtttatcagtttccagaggagcatcgtcggagacagcagatatagaggaagaaggtggagatgcagcaactgcaaaaggaagggccataacgcacgctgttagaaaaggtttgattcagaacacgattccaatcttcattgagctcaagaggctattggagagcaagaacagtcctctcacaggttcgctcatggactgcctccgtgtcctcctcaaagactacaagaacgagatcgaagaaatgcttgtcgctgacaaacagcttcagaaagagcttgtttacgatatgcagaagcacgaggctgcaaaggcaaggtccatggctaaccaaggggttgcctgcgggacaagtcatagaaacggtgaacctgaagcatcagcagcaagcgaggagaatgttagagattcgggattggaatcaagagtggtttctgcggctgctgatgtggtggcggctaaggcagctaggtcggtgttgagagaagtgaacggtggagctgcaacgccgcctctgagcgcaatgagtgttccgaagctaaggtcgagccgtggagttagccagagtggtcgaccatcagctgatgtgttggagtctctgagaagaagaccaactttcatgtctgatgatgagagttagaacttaaaaatgagactgtagaaaatagcttttgctgtaaatgcatgacttcgatttttctttttgggagattagatcgagactctattaaagtctaaatcgtatttataaaccgcataagacactaaaacctggtgtgtgtgtgtgtgtgcgcgcatttgtttgcttgctcatgtttgtccttgtgtgataaatccatccctgccctcaaattgatttatgtgttgtatgtgttgattttagtgataacatctcaaagtgattaaatattttcaaaaatgctatttgatgtctataacggctttaaaacttttgcaagttcattagagctatctctagcacatatatggcgcttagagatgttacgaatatgtaagactgattacatatctctttggcttaataaatataagtatttgtgttgaactctttatcttcttcttgaagatgtcttatgggaaacatgttaaatggatagtaaatgagagattcgaaaatatagtgtgagcttccttctttggtttatgcattctccatgtggggggcaaggtttttgaagatttatacttttgtggcaaatctcttgtttgaatactccatgggagtctctcatcaaaactatgctgcaaaatatttgaaaatttataaatctattgtctttgagaaagtgttacaaaatttatgacctcaataatattgcatgaaaactttcatacatcatttggtatatgtatgtttaagaaaaggtaaaaccgtaattataaagagaaagaaaatacaatatcttaatacatatcaatctaattactcattaaccatattaagaaaatatgtgtctttattttttccttttaacataaagcttaaaaagaagatttgtagccagaaaaattaattgtgttcatttcccttttaaaagaatttttcggcgcaacaaaatcgtgaaattgatataaataaactcgagattattaatataaccctttttcacttcacttctctttctctctaaaccctaaaagaagaacgatg

SEQ ID NO: 33486 - DNA, 3003 bp, Unknown; identical to SEQ ID NO: 33485
  misc_feature (1)..( 3003): 2750-1469P.txt file - cDNA_ID_3070480; gDNA_ID_1620616; Annot_ID_46896

SEQ ID NO: 33487 - DNA, 3003 bp, Unknown; identical to SEQ ID NO: 33485
  misc_feature (1)..( 3003): 2750-1469P.txt file - cDNA_ID_3070480; gDNA_ID_1621096; Annot_ID_171056

SEQ ID NO: 33488 - DNA, 3003 bp, Unknown; identical to SEQ ID NO: 33485
  misc_feature (1)..( 3003): 2750-1469P.txt file - cDNA_ID_3070480; gDNA_ID_1620616; Annot_ID_162052

SEQ ID NO: 33489 - DNA, 3003 bp, Unknown; identical to SEQ ID NO: 33485
  misc_feature (1)..( 3003): 2750-1469P.txt file - cDNA_ID_3070480; gDNA_ID_2926164; Annot_ID_139846

SEQ ID NO: 33490 - DNA, 3003 bp, Unknown; identical to SEQ ID NO: 33485
  misc_feature (1)..( 3003): 2750-1469P.txt file - cDNA_ID_3070480; gDNA_ID_2926164; Annot_ID_198995

SEQ ID NO: 33491 - DNA, 3003 bp, Unknown
  misc_feature (1)..( 3003): 2750-1469P.txt file - cDNA_ID_3070484; gDNA_ID_1621096; Annot_ID_171053
ccaccatctgcaaaacatgtcaatgactattgtcaacttgtatcgcaaaaaacatatagctagaagcacgaaaaatctagagtatagtacttggtcagagttttcaattcttgaatccaatttagctgcaaaaacttgaaattgatcttggcaaatctaagtagcatcttgttgtgatcttcttcttgttcatagaaagaaatgtattccctcgcgaatatcatttcggcattgtaatgttgaggcatgcaaagagcatttcgtatacgcattaagatatggggagaacttgctccagctctagctaacgactccaagtttcttgtagtgaagcttaacgcttcctccaagatatcttctcttgttgtccttaagtgagcagcttcatacaaactcaccatgcccttgacatcactggttatagattccataaacttttcattctcccctttgaatctcttgaaaacatctattggtcaataggagaatcttgttaatacatatgaatcgattacaaaaaaatgtactggtagataacttttaccggtagacatgttgtaaccgtatgtcctgaaaacccaaaacatgatggaaatcgtgtacaaatcatcttcaccggctatcatctcctgtatcttttcaaaaccctcttctagactctgctcaatctcatcttcaaagtgaaacgctacaccaaggctcacaagcatatatatgaaaagaatcctcttcttggtcgactcaatgcttttcgaagaaaacatgagcatctcccctacttccggctttagtctctcaatctcttgggcaagggcattcatttcctaacaataatatcatatgttcatacccgttacatcgatcttttacatttattatatatatgtttgtcagtgtgtattatagactcaccgagacatcaacttgagcagagaggaaatggtgaccccattttgaaagcggcagtctcttgaacttgcgattactttcttgatcatgacaggcccgagtaggggtggccttcatgcgaacaagctttccatgctgacctgaaaatgacttgtggggaaagctagagagttttcttaccgaaaataaattggaacgtaaaggaagagagagtatagatccataagctgatatgcattgcatgtttactactagtgatatggaatacattttcaccaccaaatttataggcaaaacataagcgttttcattaagtcatcttttgaaaagttttggaagaatgtatattaatacccccatatttatcttcttcagtgtataatacaacctatgttgggaccatgatattttctgaatttatagtgatattagtttatctttaaattgatatttattaatctatatagatctttttttaattatttaattttttaaagaatacgagttgacacaattcaatatacatcaaattaatgacttggatgttgaaatttgtgtagtattagaattgaaaatttaatatttcaaaaaactcatttgacaataaatcacaatgactataactgaattcatttatataatagatatacatacatctaagtttatgattaataacctcaactatcagatttttaaatgtagtagactattgaaatgaaaataatgcagattaagaagttgtatacttataaaaacttatgactaattgtattaggaagttataaacgatactacaatatgatagttttaaaacacaacataatttaatgaaaattagagacaaaatcattgtttgatgtaataatagttcaagacaaactctaacaaacattcaatagttcaaaaaatatttaaactatagattatatatattatcgtatatatattatatttttgtggttattaatttatgatgttattaaaatcatattttttatatagggttttaaaaaattgttaacttattattttatcaaattatgttaaattttacattcacacgacttgaaactaatataatattatctccttgtatttattaatttatcaaaaattaatttgtagaggttttactgtaaaacatgtttagtttttcattttttaaaaaacctccaagtggcaaaaataagatccatctccatctaaaaaagtgcaaacaaatctccatcatttaaaaatcaacgttaacatccatatctattgttgttgttttttacttctttttctcttggtcaaactctacgttagtttgatcaataaatatgacaagaatttttgcagtctcataggcgtctttgtaaaggttagttagcgtctacataattttccgaaagatataattttcttgagatacagttaactcaattactgaaatgtaataactttctaaaagttgtggctattaaacaaaattgtgaaaaaatttaaaccaaaagccacttcaaaaacaaagaaaaccataaccattaatcaaaattcttttttttttgttaacaagtactagttgcattaaattgtaaacatatggtggtgttgtatatgtttgatacaaagaacctatataacaaaggcttgttgggatagtgcatctgccacattatttcttttccgattgacatgtccatagatgagtgtgatagcttcaacatccaatatcgtataccaccaaagactgaagagtagtaccaagaatatttatatatatatttatttatttatttattttggtaaggagaatatttatatcatgatcccaccatactttaattgttatgaaaaaattttaatttgattttcataaattttatagtttagttaagtataaaaccacaattttttttctttcaaatattatttttggagaaaacccccaaatttaaaaggaaagagaaaaaatcaaatcattcatctttgagctttcttttcttctacagaaccctaatttcatgttctaggtgtctctcgaatggttctcatctcattgattactcaatctctagggtttagtggttcatccaaattcgtaccctaatg

SEQ ID NO: 33492 - DNA, 3003 bp, Unknown; identical to SEQ ID NO: 33491
  misc_feature (1)..( 3003): 2750-1469P.txt file - cDNA_ID_3070484; gDNA_ID_1620616; Annot_ID_162049

SEQ ID NO: 33493 - DNA, 3003 bp, Unknown; identical to SEQ ID NO: 33491
  misc_feature (1)..( 3003): 2750-1469P.txt file - cDNA_ID_3070484; gDNA_ID_2926164; Annot_ID_198992

SEQ ID NO: 33494 - DNA, 3000 bp, Unknown; identical to SEQ ID NO: 2965
  misc_feature (1)..( 3000): 2750-1469P.txt file - cDNA_ID_3070544; gDNA_ID_1620618; Annot_ID_162126

SEQ ID NO: 33495 - DNA, 3003 bp, Unknown
  misc_feature (1)..( 3003): 2750-1469P.txt file - cDNA_ID_3070548; gDNA_ID_1620618; Annot_ID_46933
tgttcataccttcacaacgtcatcatcaacagttatgatcacttatcagccagatttttcaaactcgagctttgtattttagcggcaatttgtttttggtaacaaaggaacccatgcacttgtcagcgtaaagcaaacacgtgtccaaaccattaagccacgtggtcattgtccgactctacaacctctctctgtttcttctctcattcctttatatgatactacgatttaatacgctttgcattgaataacaaaaaaaaaaacagagcacaatgactagatttgcggtattgccactctctgttcttcttctcgttctcttgttcctctgcactgagtcgttggctaagtcggaggagtctgaagaatacgacgtcgctgtgccttcatgttgcgggttttcgtctcctcttctgattaagaaagatcaatggaaaccaatcttcgagacgaagtttggacagatctcaaccgttcaaatcggcaatggatgcggtggaatgggaccttacaagatacattccataacgttggagccaaacacaattttgctccctcttcttcttcattccgacatggtcttcttcgttgactctggtacataataaactgtttaaatttcttcggtttggtttacagatcagtttcggtttaggtcaaaattggattgtgatttgtataggaagtgggattctgaattgggttgacgaggaagcgaagagtaccgagatcagactaggagacgtttacaggctacgtcccggttcggttttctacttacagagcaaaccggtggatatcttccttggaaccaaacttaagctttacgcaatcttctccaacaacgatgagtgtttacatgtataagtttgatatgattctttcttttttcactttcttgacatctttttcttcttcttattgtatctgtattccatggatgcaggatccttgctttggtgcctattcgagtatcacagatctaatgtttggttttgatgagacaattctccagtcagcttttggggtatgtcttaatctgccgatgaataagttacgaattgtctatatcttacttgggaagcaagataggaattgtgtatatcttacttcccaacttactctagtagaggatattttgggttgtattaagtgatatattaaattcaatggttttaattaggttcctgaggggattatagagctgatgaggaaccgtacgaagccaccattgatcgtgagtgagacgctttgcacaccaggtgtggccaacacttggcagctccaaccgcgattactaaagctctttgctggaagtgcagacttggtggataacaagaagaagaaagagaagaaagagaagaaggagaaggtgaagaaagcgaagacattcaatgttttcgaatctgaaccggatttcgagagcccctacggtcgtactataacgattaacaggaaggatctgaaagttttaaaaggctcaatggttggagtttccatggtgaatctcactcaaggatcgatgatgggaccgcactggaatccatgggcttgcgagatttcgattgtattgaaaggagcaggaatggttagggttcttaggtcttcgatatcatcaaacacatcatcagagtgtaagaacgtgaggtttaaagtagaggaaggagatattttcgcagttccacggttacatccaatggctcaaatgtctttcaacaatgactcgttagtgttcgttgggtttactacttcagctaagaataacgagccgcagttcttagccggggaggactcggctttgcggatgcttgaccggcaagtattggctgcatcgcttaatgtgagtagtgtgacgattgatggattgttgggagctcagaaggaagctgttatcttggaatgtcattcttgtgcggaaggagagatagagaagcttaaggtggagatagagaggaagaaaatagatgatgagaggaagaggagacatgatgaaaggaagaaagaagaagaagaggcgaagagagaagaggaagagaggaggaaacgtgaagaagaagaagagaagaagcggtggccacctcaacaaccaccacaagaagaagaacttagggaacggcaactaccgatggagaaagaatgggaaatggaaggtgaagaggagagttaagccggaggagtaaaagagaaggccaacgtacgtcaagagtgtgtttggtttgttgttagtggttagaactttggttctgacctctcttgtaactttttttttccatagtcttgtttatttgttaatgtacttttgcattgtttttgttgttgccatgtttaaagttgtattgtgtttgtataatgttttgttttgtttaaatctttgtagatggtaaatgagaaataagtaaatatttccgagagactgttgagtgacgacgttacttcttgttattgataactctgtggtttattatacacttgtagtagtagtcgtacttgctaacttatgtcatttggtttacaattgtataatgtatttgtaaccctcttgctatagcttcggcatattaaagttttgaatggtgataacggaggagtcgtagataatgcaatcaacttcccatgctctgttctcttgttgttgcaagagatattggaataaaaggcaaatttatctcaaacacagattgggccatatcttgaaaaggcaaattcataaaactctcaaaaagtagatttatcccaaacacgaattgggccaactattggaccggatgcgctgaataatgggccttatcagatttggaccggcctgtttttatatgacatttacaaaaataccctcacaggaggtcccgtgttggctataaaaaaatagaataatccgtaattgccctaaaatagtttggtttctgcatccacccctttcttcgaatctcgacggctgaaacagattctaaatttatctccggtgagaaagagatagagagcgttgattccggcgaaaagatg

SEQ ID NO: 33496 - DNA, 3003 bp, Unknown; identical to SEQ ID NO: 33495
  misc_feature (1)..( 3003): 2750-1469P.txt file - cDNA_ID_3070548; gDNA_ID_1620618; Annot_ID_162113

SEQ ID NO: 33497 - DNA, 3000 bp, Unknown
  misc_feature (1)..( 3000): 2750-1469P.txt file - cDNA_ID_3070548; gDNA_ID_2926211; Annot_ID_142010
tcataccttcacaacgtcatcatcaacagttatgatcacttatcagccagatttttcaaactcgagctttgtattttagcggcaatttgtttttggtaacaaaggaacccatgcacttgtcagcgtaaagcaaacacgtgtccaaaccattaagccacgtggtcattgtccgactctacaacctctctctgtttcttctctcattcctttatatgatactacgatttaatacgctttgcattgaataacaaaaaaaaaaacagagcacaatgactagatttgcggtattgccactctctgttcttcttctcgttctcttgttcctctgcactgagtcgttggctaagtcggaggagtctgaagaatacgacgtcgctgtgccttcatgttgcgggttttcgtctcctcttctgattaagaaagatcaatggaaaccaatcttcgagacgaagtttggacagatctcaaccgttcaaatcggcaatggatgcggtggaatgggaccttacaagatacattccataacgttggagccaaacacaattttgctccctcttcttcttcattccgacatggtcttcttcgttgactctggtacataataaactgtttaaatttcttcggtttggtttacagatcagtttcggtttaggtcaaaattggattgtgatttgtataggaagtgggattctgaattgggttgacgaggaagcgaagagtaccgagatcagactaggagacgtttacaggctacgtcccggttcggttttctacttacagagcaaaccggtggatatcttccttggaaccaaacttaagctttacgcaatcttctccaacaacgatgagtgtttacatgtataagtttgatatgattctttcttttttcactttcttgacatctttttcttcttcttattgtatctgtattccatggatgcaggatccttgctttggtgcctattcgagtatcacagatctaatgtttggttttgatgagacaattctccagtcagcttttggggtatgtcttaatctgccgatgaataagttacgaattgtctatatcttacttgggaagcaagataggaattgtgtatatcttacttcccaacttactctagtagaggatattttgggttgtattaagtgatatattaaattcaatggttttaattaggttcctgaggggattatagagctgatgaggaaccgtacgaagccaccattgatcgtgagtgagacgctttgcacaccaggtgtggccaacacttggcagctccaaccgcgattactaaagctctttgctggaagtgcagacttggtggataacaagaagaagaaagagaagaaagagaagaaggagaaggtgaagaaagcgaagacattcaatgttttcgaatctgaaccggatttcgagagcccctacggtcgtactataacgattaacaggaaggatctgaaagttttaaaaggctcaatggttggagtttccatggtgaatctcactcaaggatcgatgatgggaccgcactggaatccatgggcttgcgagatttcgattgtattgaaaggagcaggaatggttagggttcttaggtcttcgatatcatcaaacacatcatcagagtgtaagaacgtgaggtttaaagtagaggaaggagatattttcgcagttccacggttacatccaatggctcaaatgtctttcaacaatgactcgttagtgttcgttgggtttactacttcagctaagaataacgagccgcagttcttagccggggaggactcggctttgcggatgcttgaccggcaagtattggctgcatcgcttaatgtgagtagtgtgacgattgatggattgttgggagctcagaaggaagctgttatcttggaatgtcattcttgtgcggaaggagagatagagaagcttaaggtggagatagagaggaagaaaatagatgatgagaggaagaggagacatgatgaaaggaagaaagaagaagaagaggcgaagagagaagaggaagagaggaggaaacgtgaagaagaagaagagaagaagcggtggccacctcaacaaccaccacaagaagaagaacttagggaacggcaactaccgatggagaaagaatgggaaatggaaggtgaagaggagagttaagccggaggagtaaaagagaaggccaacgtacgtcaagagtgtgtttggtttgttgttagtggttagaactttggttctgacctctcttgtaactttttttttccatagtcttgtttatttgttaatgtacttttgcattgtttttgttgttgccatgtttaaagttgtattgtgtttgtataatgttttgttttgtttaaatctttgtagatggtaaatgagaaataagtaaatatttccgagagactgttgagtgacgacgttacttcttgttattgataactctgtggtttattatacacttgtagtagtagtcgtacttgctaacttatgtcatttggtttacaattgtataatgtatttgtaaccctcttgctatagcttcggcatattaaagttttgaatggtgataacggaggagtcgtagataatgcaatcaacttcccatgctctgttctcttgttgttgcaagagatattggaataaaaggcaaatttatctcaaacacagattgggccatatcttgaaaaggcaaattcataaaactctcaaaaagtagatttatcccaaacacgaattgggccaactattggaccggatgcgctgaataatgggccttatcagatttggaccggcctgtttttatatgacatttacaaaaataccctcacaggaggtcccgtgttggctataaaaaaatagaataatccgtaattgccctaaaatagtttggtttctgcatccacccctttcttcgaatctcgacggctgaaacagattctaaatttatctccggtgagaaagagatagagagcgttgattccggcgaaaagatg

SEQ ID NO: 33498 - DNA, 3000 bp, Unknown; identical to SEQ ID NO: 33497
  misc_feature (1)..( 3000): 2750-1469P.txt file - cDNA_ID_3070548; gDNA_ID_2926211; Annot_ID_202656

SEQ ID NO: 33499 - DNA, 3000 bp, Unknown
  misc_feature (1)..( 3000): 2750-1469P.txt file - cDNA_ID_3070554; gDNA_ID_1620618; Annot_ID_162101
ttgttgtttaggtcccaacaaaagtgaacaaaaaagacaggccacatggtgggggtccattatcctccccgctcgtggaggtttcctttttatatcacctaactcaacacaacaaactcttaaactaatcacaataattaagaaaccaaactaaaattaaactctggtctatggaaagctaagtggatatcatattactacatccgcaaagatattaactctttacaaaccgattttttcctgtgatcaattaagatattatatatctctaagaacattatcatcatcacagtgataaattaagtataaacggagaatgtaacggtatgtttaaggttcgacccttttcgaccttcctcgaccatgcgagctccggctccaatgtactgtacaatgctgaagattttctctgttatggtccacaaggagactgatctgatcttttaccaccattttcaaactgatttcatgtttcgatttaccggtttttcagcatctggctttagtgccaccgagagtgagttcgagatcttctacgccaacttcatgaatcatttcgccttcccacggcttaactgttccattctcaaactcaaactctgcccctctcccattcattccggacattccccagtctgaccttttcatatcaatggccatagaagtttgctgaacaaggttaaatgttggtgaagtaggagcagtagattggaaattgatccaccttcctgaatcctcgatcgaatcctcctcggactcatcacattccggtattgtaggtggcgtttggtgaccagcacgacgagtctagatggagcagagatagcgaaaagcggatgtctcaaaacgtgtaaagacccgccatttggtaattgctctgaagtaagtttccgcttcgaaccacgagaagtaggagatgacaacggaggagtcacaggcgcactgttggatattctaagaggtggaaggttagcaggaatcgaagaagcgatgttgtgtaggaacggaagaagaaggtatgaagaagggtttccgtcatagcgagatggactcgggaaggatgatgagactggacttccgtggtacgaaggtgcaggacttggaaaagctgatgattgtggacttggttggattgatgaatttgtgctgaagtttgtaggagttcctgaaatatctgatgctggtggctaaacccctgtttccacaagaatcaaccattttagtgaccaagactagactaaatcaaaaccacatgatgatgcaaccgtcaaagtcaatgttttagtcaagactcaagaagcaaaagagatttccccaaaatttctcaataatcaaacttacatgatctatagaattagatgatccaaagcagaaaccatcgaattcataatcagttctaatcactacgaagaccagatttcaatccaaatagggggaaattgaaaattcaacccaatcgaacagtgaaaagtgaaatccaaatcgcaagatctcaagagtctctaacaattcgattgaattaaaacacaacaatcgcacagattcatcgattgaattatgagtaattgagagaagctcagattccgatctaaaaattgaaatccggaattttcagttttaccttgcgataagtggtgccatcgtcttcgacgatccaaccagcttcgagacagagagctttaagaacctcgttgttatcgcagtgcttaggaagcttatagttaccttgagctctaagaccagagtaaatcttagcagtgatggctcttcttcttctttctctcttcttattgttctctctctctttccacgtcggagtacgtcccgacgatgatcctcctcctcctcctcctcctccggcggccattgaagagctctgaatctctgaatctatctctaagtctttgtcagactggcgcacgagggatagagagagagagacgaagctttctttttagtttttttgtttttttttttgttttgggtgtgtgtgtgagtctgaagcggattggctgtaactttcattcattaagtataaataaattcaaatattcatttgtctccacacgtgtggtctgtttctacacgtgtgatcgatttatttctggaagtcagcttccacgtgtcctatttatgtaacgcacgagctgtggtcccttccccgttgtttccctcccgtccactgttcaatgaattcggatctttccttcttcttttttttcgtattttctttaatttaaatttgtatcttaaaaacaaaaacaaaaagcgttgtaagaattaagaatcagtataaaaactggatatactaacgattttgcattgttttttatgacgacatattgcacattttcatattgtaacgcattaatacaactcacaaaagctttacaccaaatttgatgttatttcttggagttgtcaaaacgtaattcgaaactgatctcattttcctaacataatttttaacctagtatagcatctaaagagttttaaaacggtcatattggattttagaaaatgacgaacaaattattccaaaaattacatgtttatttgattttcccaaattcattgatgtgaattaaaaaaatgtatccacataattagggaagctagctaaaacattttttagtaatattaaaaaggatggaaataagataacaaacagcaatttggctattgtggtcggagcacgtgcggttccagttaggcgtgagcaaagccaggaagcagaatcacccagctggactcatgccattattatttttttagccaactaattaatatagtactttaacaaatcctatttacatatttgttaaattttcacaaccttaaattaataaaagtaatttcataaaatgtcatttgttattattgcagacaatcaaatgaaacaaaaaaaagttcctaataattgtgtttattattttattttattaaaccacgtcttctcatttatagtcacaaatccaaaaactactaaagtttaaaatg

SEQ ID NO: 33500 - DNA, 3003 bp, Unknown; identical to SEQ ID NO: 18694
  misc_feature (1)..( 3003): 2750-1469P.txt file - cDNA_ID_3070562; gDNA_ID_1620618; Annot_ID_162093

SEQ ID NO: 33501 - DNA, 3000 bp, Unknown
  misc_feature (1)..( 3000): 2750-1469P.txt file - cDNA_ID_3070565; gDNA_ID_2926212; Annot_ID_202689
gaccatttgttatagtagctttttggatatcttgaccattttgttataatgtttttgtatatatatatataaatacataagaaaatattatacaaaacacttaattcagttcttttatgtataaggaccgtagtgttatatctctaatatttatataaatcgtagatgaacacggagtaacattttttgataaacatgtttaggagatatctgtactttgcaattaaattatgatgaatgatttattggtagtgactaaattatagaggtccccaatggaaaaaagaagcagcgaaccagtcacaccgtcgttgtaatctacaactaaaaaaatgcttgatttatttttccttatcaatatgttttcaaaatgaaaacgtgtacatataaaaaaaatggtcctaagagacatattaattttgattggtccacctggaaaaccggcaagggatggccatggccacgtgggatttgtggtccatgctgggatcaacgttcctcaatgtgccacgtgttttgatcatccagcgtgacagcctgtgttttcaacttttcatcaccaagcttcaaaatcttttttactctttttatttttatgcttaaaaataatttagaaattgatatggtcgaagagtaataataacttctcttgtcaaaagggagtaattatataatatgaaaatggatttttgtcaatacataaatttttattttctaaattaactgttttgtttttttcaacatgatttctctgttttctatttgattcaacggcgcatttttttaaaatgaaaattgtttgtagctcaatattaaagatattatcgtcaaaaattgttagacaaaaaaaaaaaaaacccagcccacaatcattatatgatatatggccactgataatacaactatctgtaactgatttaaacttaaaaattattctacaataagggttttgattcgtcggcccaaatttaccatatgggccttaagaagcctggttaaaatatatggccactggataatacaactatctttctttctttttttctttagtaatatatggcatcagtattagtgtcaatgatttatagatgtgaataaagtgaaatttttggaaagctaattgataactttgatgaccaatatataacaaataagtttgtctattgcagtactttaattcattgcttgcgtaagaagtgagtgggatcacaatttaaagaacgtcacttgattcaactactactaaaataaaacaatcagaaaaaaaaaatattaacagaggaaaataaaatatcctggagtagttgaatcatcttgctaagcacctaattttgataaaacttgcggtggcacagtaagtttgggcacctaaacaactaattgattggctaatcacaatatacacgttttttttttcacatgtggttttatattgaacccaccgaattctcttgatccttctaacaaaatttaatctcaaccacaaaaataaaataataatatatataagaaactgtaatgtacaattgtgattagcaatgggtcatctcatctaattatccagataatattgtctatatttttccaattaatttggtcgtatgtaactaaataatgcattaggttgagctaaataaagtattagataaccttacctactaacaattttcaatgatttttttcagtttctatatttctgctttgtatttttgtgtaaaattgggtttacagaccaggggatttcgaacagggtgatgtgttggacacaaaatttattccattcatgtgcgagttattattcattgaagtatattaaacttttgttttattttacttttttctattaattttaattaaaaatttgatgtgaaagaaaaaaacggtattttattgtgaatagtaaaagtcatgagcaaaatcatcaacttaggagtgttgaaaaaaggctaaagaagagtaaattagaggagagtcaaagattgtgtgtcactagtgttaatgctagtaaacatcagctcttttttttcttctctcttaatttttcaaacatttgatttctataaaccttcttaataatttcttccgtaaaataatatgattagtttttttttttgtaaacaagtgcccacttgcttgaccttcccaaccaaaaaaaacgtaacaatttccatcatcttctccataaagttcttacctttaagtgtgtttaatggagatttatcctctactcatctctctctctctattctgttccatttattaagctttcttcacgctttttaagataattaacagtcacgggttctaaaagctaaagggttttgcttcgaattcaagtgtctcccttcactttctctctctctattgctgctctgtttctgctgtcaattccctaagaaagtcctgatttttagggtgatcgagagaagttgaagaatcatgtttattgagtttccttttttgatccatagggtcatctaattttgctaattttattgtcatctccttcaggtaatttgcgatttctctttactctgtttttgacttgtacttagattccttttctttaacagtaataaacttcataaagatttcatttttcttcttatgggtatttggaatgatgaatgtagattaggttgattgttttgaggatgatgtggataatctttttctggatattattacaatttagggtcttgagattgtttgtaataagctccgtactttggtcccttattttcaattcagtctttaagatttcggtaacccttttatatttgatgcaatctccctataataataccttcttcaattgctgttttgccatttgcatattatttaactttctttgttggatcagtctgattctttcttaccaattattgtcttaatccttgattaagaaaaaacaaaaaaacaaaagacatggagtttcttctctttcttggatgtataacagtgtttctctatgcaggtaagggattgttgttgccaatg

SEQ ID NO: 33502 - DNA, 3000 bp, Unknown; identical to SEQ ID NO: 2979
  misc_feature (1)..( 3000): 2750-1469P.txt file - cDNA_ID_3070582; gDNA_ID_1620619; Annot_ID_162182

SEQ ID NO: 33503 - DNA, 3000 bp, Unknown
  misc_feature (1)..( 3000): 2750-1469P.txt file - cDNA_ID_3070585; gDNA_ID_1620619; Annot_ID_162181
cactatctcatagatttggtgaccagaacaacttatctcttgagtggttcaacctctatctctctctctttctgccatgaaaatgcaaagccaaatgtaatagttagagagggagaaaccaagaactgaaagaccatgacttccaacagaagcaacctcctgttctcattagtcctcttccactttctttttgtccccacacaactccaagctcttaacactgatggtgttcttctgcttactttcaaatactccatcctcactgaccctctctctgttctacgcaattggaactatgatgatgcaacaccatgcttgtggacaggtgtcacatgtacagagcttgggaagcctaacacaccagacatgttcagagtcacaagcttggtacttcccaacaaacaccttttgggttccatcactccggacttgttctcgattccatatctaaggatcttggatctgtctagcaatttcttcaacgggtcactcccggactcggtgttcaacgccactgagcttcagagtatctcccttggaagcaacaatctctctggtgatttgcccaagagtgtcaacagtgtgactaatctccagctcttgaatctctcagctaacgcatttactggcgaaattccgctcaacatctcacttctgaagaatctaacggtcgtttccttgtcaaaaaacaccttttcaggtgatattccaagtggtttcgaagcagcacagattcttgatctttcttcaaatcttctcaacggctctcttcccaaggatttgggaggaaaaagcctgcattacttgaacttatcacacaacaaagtcctcggcgagatttctccaaattttgcagagaagtttccagcaaatgccacagtcgatctctcctttaacaacctcacaggcccaatcccaagttccctttctttacttaaccaaaaggctgagtctttttccggtaaccaagagctttgtgggaagccattgaagatcctttgttcaattccttccactctttcaaaccctccaaatatctctgaaactacttcaccagcaatagcagttaaaccaagaagtacagctccaataaaccctttgacagaaaaaccaaatcagacaggaaaaagcaagctaaagccaagcaccattgccgcaatcacagttgcagatatagttggtctagctttcattggtctactcgtgctctacgtataccaagtcaggaaacgcagaaggtacccagaatctagcaaatttagcttcttcaagttctgtctggagaaaaacgaagccaagaaatcgaaaccaagcaccactgaggtcacagtcccagaatcaccagaggccaaaacgacatgcggttcatgcattatcttgaccggaggaaggtacgacgagacatcgacatcagagagcgacgtagagaatcaacaaaccgttcaggcattcactcgaacagatggtgggcaactgaagcagagctcccaaactcaattggttacagtcgacggcgagactcggctagatctagacactctgctaaaggcatctgcttacatattgggaaccaccggaaccgggatcgtgtataaggcggtgctggagaacggcacggcattcgcggtgaggcggatcgagacggagagctgtgcggctgcgaaacccaaggaattcgagagggaggttcgtgccatcgctaagcttcgtcacccaaatctcgtcagaattcgtgggttctgctggggagacgacgagaaacttctcatttccgattatgttcccaatggcagcctcctctgtttcttcaccgccagtaagttcctctgtttctgtaagcgcacgaaaaaaaaaacacagtatcatatctaaaatacgcaagtcatttggtacacattagcactctaaaatacgcatcactgtttttttgtccttcacaaacagctaaggcaagctcaagctcatcttcttcgtcgtcattacaaaaccctcttacttttgaagcacggctcaagatagcaagaggaatggctagaggactatcttacatcaatgagaagaaacaagtgcacggtaacatcaagcccaataacattctcttgaacgctgagaatgagcccatcatcaccgatttagggctagaccgcctcatgacaccagcgcgtgaatctcacaccactggaccaacttcgagctcaccgtaccagccaccggaatggtccacaagcctgaaaccaaaccctaaatgggacgtttactcctttggcgtcatacttttagaacttctcacaagcaaagtgttctcggtagatcatgatatagatcagttctcaaacttatccgactctgcagcggaagagaatggccggttcttgaggttaatcgacggtgcaattaggagtgatgtcgctcgccatgaggatgctgcaatggcgtgctttaggttagggattgaatgtgtctcttccttgcctcagaagcgaccatccatgaaagaattggtgcaagtgttggagaaaatttgtgttttagtttgatttcttaattcgtatagcctaagtcgttttggcaatatagaaagttatgtgttatgtatgttttagatgtgttgcttaatgcttactttaccctcgcataatactaactcttactttagagtttagaatgtgtttcactgttttgttatgttatatcacaaccaaaaagctatataaaaattagaatcttaaccgatgaagccaattaaaccaacacaacgggaatcacttaaaattaactcggtctaacttcctaaccaaacttttaaacagaccgacccaaaccggaccaagattctagtgtccacgcctcaacatcatcttctccgatcaactctgatgctcaccccaccaaactttactttctattcagacaagacatctcgatagcttatttctatggtctgatcacacgatagtgtattctgatatcatcactctaccaaagagataccaaattatg

SEQ ID NO: 33504 - DNA, 3000 bp, Unknown; identical to SEQ ID NO: 33503
  misc_feature (1)..( 3000): 2750-1469P.txt file - cDNA_ID_3070585; gDNA_ID_2926207; Annot_ID_202284

SEQ ID NO: 33505 - DNA, 3000 bp, Unknown; identical to SEQ ID NO: 33503
  misc_feature (1)..( 3000): 2750-1469P.txt file - cDNA_ID_3070585; gDNA_ID_2926238; Annot_ID_203962

SEQ ID NO: 33506 - DNA, 3000 bp, Unknown; identical to SEQ ID NO: 2980
  misc_feature (1)..( 3000): 2750-1469P.txt file - cDNA_ID_3070589; gDNA_ID_1620619; Annot_ID_162179

SEQ ID NO: 33507 - DNA, 3000 bp, Unknown; identical to SEQ ID NO: 2980
  misc_feature (1)..( 3000): 2750-1469P.txt file - cDNA_ID_3070589; gDNA_ID_2926238; Annot_ID_142809

SEQ ID NO: 33508 - DNA, 3000 bp, Unknown; identical to SEQ ID NO: 2980
  misc_feature (1)..( 3000): 2750-1469P.txt file - cDNA_ID_3070589; gDNA_ID_2926207; Annot_ID_141769

SEQ ID NO: 33509 - DNA, 3000 bp, Unknown; identical to SEQ ID NO: 2980
  misc_feature (1)..( 3000): 2750-1469P.txt file - cDNA_ID_3070589; gDNA_ID_2926207; Annot_ID_202282

SEQ ID NO: 33510 - DNA, 3000 bp, Unknown; identical to SEQ ID NO: 2980
  misc_feature (1)..( 3000): 2750-1469P.txt file - cDNA_ID_3070589; gDNA_ID_2926238; Annot_ID_203960

SEQ ID NO: 33511 - DNA, 3000 bp, Unknown; identical to SEQ ID NO: 2981
  misc_feature (1)..( 3000): 2750-1469P.txt file - cDNA_ID_3070593; gDNA_ID_1620619; Annot_ID_162177

SEQ ID NO: 33512 - DNA, 3003 bp, Unknown
  misc_feature (1)..( 3003): 2750-1469P.txt file - cDNA_ID_3070630; gDNA_ID_1620621; Annot_ID_162319
ttcaacatagaagagtgtgaaacagattcatggattgaacataagccgttgattcaagatcaagccgcgtttcactccatagacatagaaggtgtctcacaacttcagaaggttcgttcaaaccttaaggattttgataaagttgatgcaacaatgaatcaaatgctgtcatcaattggatttgttgttgatgaattacactctagttgtggaagtgctaccgtccatgtccagaagaagcctagtaagtctctcaaatcctggaagttcaaatttaaaaccagctcacaagaccaaggggatcatgaatcacttccaatagggttacatatcagattcaagtcctggaaatttaagttcgtgaatagaaatttacaaatgatgagagaacatggatatacaacacactttcagctaatgtctgataagagagaacatcaagagatgttcattgtggccaggattgttgatgtgagatgtttgcttagcatgatacttgggataacagagagtgatgcaggtcatggagaacaatttgtgtatgaccggattacaatggtaaagaggctgctgttgcaaaccagtttagtcattcaagaagtgatgagaaacaaaaagatcaagtttaccaaacggtggtggttcaagtataaatttggggaagagggtttcacgagactgaattctttcaatttgcgtatgacttatcattttgcggtttggcattgttggaagagcaagaccatggtgcatgttgaaatgagtggtgatcactggtcttggatggtcttagtcatgaaatctacaacatctagctttttgtcacttctctatgatcgaagaatgggagatccaagcagacatgaaacgggtcgggagattgtgtcacttcagggtcaaattcacactggttctcctatgattcagtgcataaagatgagcttcagcattctccttcttcagggtctgtttcagagtttgacaatgaagatgctcacatatatgcacttgtttggtagcaaaagttgtgtttcaactttgggagtgaggaaattaggcaaagattggtggtttaaatacaagacagatgcaagggctacagatttactgacaaatccgtagaaagagtaactacgaattagacaacagaggatgatgaagttgtcacaagcttggcgattcaaggtttaggacttggtaaaaggaaagctatgattcatgttgatttatgtggaagaggctacatggagttactctataaactggcaaatatgtttccatgaaccttgaggtcaaggttctctgaagaggggagatttgttataggaaaactgaagtcaagctatagcgttcaggggtcaagctggcgagctggaaatgtgaagtcagggatgttaagcaaagcacgtgttgtgagctggcgatctggaaatgtgaagtcagggatgttaagcaaagcacgtgttgtgagctggcgagctggcaatgcaaatggacgttaacggcgatcgttattaacgtggttaacgtttactttctttacctttttgtataagagcaacatgttatgctcatgctttcattatcgaataatctggttgtaatctctctctagagacttctagatttccctcatcgttttaccggagctctcgtcgagtctcttgtaggtgagaagttgatatcgcgtctctttacgaacgttgtatcaagtgtgttaatcggagtactctattttcatctctctgttctattgatttcaaactctgtttattcatttctggtttacgttaacaataatcctgcaacttggcgccttcattgattcgcgagctggtcgctccgacggcgcagctcgctcttcgtcctttaattgctatatccttctttcgctgcttcttctcgatcacgtaacatgtccgtgagacctaagatggtgagagaagcagagttgcatgctcagaaagacaaagaaaagaattgatcgacaccaagaacacagctgacacaacaatttacagcatagagaagagtcttggtgaatacagagagaagatcccaagtgaaatcgccaaggagattgaagatgctgtggcagatctaaggagcgcttcctctggggatgatctcaacgagatcaaggccaagattgaggcggcaaacaaagctgtttctaagattggggagcacatgtctggtggttctggtggaggctctgcaccaggaggaggatctgagggaggcagtgatcaagctccagaggcagagtacgaggaagtgaaaaagtgaggagatttggtaaattcttgccacttgggttttaagagatgaggtttagatcatggtgggttctatgtccaaggaacttttgccttttagaacaacgagcagtggatatgtttctggaataagcttttgtcagggaactaaacttaatgtttctctgctaaaaaacctttgttatgtaatgtgatggttaaagagaagaagttttcaaaattttgtcactttatactttatagtttattttcattggattggatattatctttctttaagcttataagttttcaaagaagcggtcacaaaactagcccgagaagaagctaccacaaaactagcgatgtaagaaccaacgacgacacagctggctagctcattgtttggttcttattctttggaacccaccaccacgccaaaacttatacggaacaactacaaccactacagtggttccgaagtttttatcacttgacttgtttgtagcactcaccggagagacccgctaaaggagccagaggtttcaataatctcattgtgaaacgtgcggataactttcgttggggaatttgtaatttacgcaattaccctctaatttattttaatttttatgaaataattagggctgatttaatcgagatcccatttcttttgttggcttacttctctcgaatttacgcaggaagatcattagcagagaattctcatctgattcagtccatg

SEQ ID NO: 33513 - DNA, 3000 bp, Unknown; identical to SEQ ID NO: 19835
  misc_feature (1)..( 3000): 2750-1469P.txt file - cDNA_ID_3070630; gDNA_ID_2926201; Annot_ID_201876

SEQ ID NO: 33514 - DNA, 3003 bp, Unknown
  misc_feature (1)..( 3003): 2750-1469P.txt file - cDNA_ID_3070637; gDNA_ID_1620686; Annot_ID_164608
aagattgccgtgaagctatctcctcgttaatgtttgcagcctctggattttccgagttgcctgagctgcgtgaattgaggcaaatgtttcacgaaaaatacacagattcacttgcattgtttgtcaaccaggaggtaaagagtttttctagtgtattcatttatttgtaagactcatcttgaaatcttatacggttaagttaaccacctgcttgtttcttgtacagcttgttgagaatatgtcatccaagcccttttctatggagaagaaagtgaagttaatggaagatgttgcattggagttctctattcgttgggattctaaagatttcgagaagaggattgtgagacagaatagtatttcagtaatggtatgacaatgactcatttgttttagggaacaactaaactgaaatatttggatagtgattgaattctgatttctttcttggacgtgaacaggagaccccaaaaagcaccaacgacaagtataagcctgtagacagaaacatggccttgccaaaaagagaagagtttgaaggttctgaaaatggggttagcttgaacagaaaaacggctgaggcatcagaaagaagagatcctttgtttcaatctgataaagaaagttatcagaatggtctcagaggaaatcagcgtgggctaacatataaagaaaggtcagagaatgttcttcacgcctctagatcggaaagcaaagacaataaggccgaaaggaaagagttttatctgcattctaagcaaaaccctgctagagaaaaacatcagcctatttttaacgaaggtgacactatagtgatgaaggtcaactatgggaatctcggtcaagggaatggacatcgacctggtgtagttgatgcgcataagaaaaccgagtttgttgcctcagaaaggaaagagttttattcgcaatctaagcaagaaccttctagagaaagacatcaacctatttttaatgatggtgacactattgtaatgaaggtcaagcatgagaaccacgttcaagggaatggacataaaaatggtgtagttgatctgcataagaaaatagaggttaatgcttcagagaaacttaagtctagcagcagcaaaagagctgacaagttagttatcggctttaaacaagagagtttctttcaagggtacaaacatgagaaaaatgaagagcatgcacatcagaaagtggaagatagtacctcaagacctccgaagccaaatagcaagtcaaagagagcggaatctatcaatccaggttcgagacatcataatgatcgggagagtaaagaaaatgcagttcttgtgggaaagagcaccgaagaagatccatctggtgataatgttaagggtggagaatacgaatatgatcatgcaaatccagcaaggaaagttgaggagcgagaaacagagagaatgaaatcacccttctacaaatcccttccacctccgtatgttaaaaaatctattgctaaagcaaggcatgaaaaagctgaagctttagataatccaaaggctcgttttgatggtgaagaaggaaatcatccagacaatggtaaaaatgtttatggggcagagagacgaaatggagcaggtcatcatgaagtgaatgacatagacaatgcatctctgaaacggcaaactaacagaagaaagcacattgtagaatcgggaggtgatgatcacataagtagccgaagaagggaaaactcaaggaaaggccttcaagtcttaattgacgaggatgagaaagacagtgaggagaagatgatggataaacttctgatgcattacagtaaaaaaccttcaagctatgaaaaggacaatgtgcaagaagaatccaaaagcagacgtacccatcttaaaaaaggtgaatctgatgaagagatgatgattcatcagccggctcggtcacggtctctacccgctgaacagttggccgggccatctgaacctgcaaaaacatttgcccgtgcagcctcgtttcagccagaacgttccagtgaagctaagcacgttcaccccaagttaccaaactatgacgatttggctgccagatttgcagagctaaaaggaaggtaaatatatgaacagttgatgcctagaaagatagaattaatgagattaaatagcctgttacacattttcttacttcttgatatagtacttgtccgatattgccccatgtatgtggtgcttgttataatagttgaaattggaagagtgacgcattgttacggagtacggaccccaagagttgttgatcatctccttgtttttggatcatcttatgtaaccatttgaaaacaaggatctgtttagaaaaagggaaagtggttaccacacagtttattactagcgagttatttgatgttaccatgatttttgcattaggtcctgaccagcactaacttacaagctagtagctaccatatacaagatataaatttacttctaaattaccatgaagtgtttaagttgatcttactgagaatattttgagtttttttttttaaatctgaacatgataataaacaaaaactattaaagggaaaagtcaacgagaaccctttttaaacgaaaaaaaaaaggtcaacgtgaactgcagagtgagcttagatgttcccaaattcgttcataaaccctaaattcaattttcccgatttatccccagcaattgtgtgatatcttctcaattctcatctttatcttcctccttacacagtaaaaaaaatacgttgtctgattactacttacactttttctcaaatctatcgctacgattccttctctcataaagcctcccaaaatcaatcatagacaatctcattaacagttttgtgttgatctctaactccatcgtcttaggagtaattaagtgaaagaacccaaattcgtttgtcatagaaaccacaatttcgagggatccacgcactttcacagtttgctacactttcaaaacaagccctggtctttgaaattggtgaaaatg

SEQ ID NO: 33515 - DNA, 3000 bp, Unknown; identical to SEQ ID NO: 3025
  misc_feature (1)..( 3000): 2750-1469P.txt file - cDNA_ID_3070637; gDNA_ID_1620621; Annot_ID_162299

SEQ ID NO: 33516 - DNA, 3003 bp, Unknown; identical to SEQ ID NO: 33514
  misc_feature (1)..( 3003): 2750-1469P.txt file - cDNA_ID_3070637; gDNA_ID_2926202; Annot_ID_201913

SEQ ID NO: 33517 - DNA, 3000 bp, Unknown; identical to SEQ ID NO: 3049
  misc_feature (1)..( 3000): 2750-1469P.txt file - cDNA_ID_3070660; gDNA_ID_1620622; Annot_ID_162361

SEQ ID NO: 33518 - DNA, 3 bp, Unknown
  misc_feature (1)..( 3): 2750-1469P.txt file - cDNA_ID_3070677; gDNA_ID_1620622; Annot_ID_162336
gaa

SEQ ID NO: 33519 - DNA, 3000 bp, Unknown; identical to SEQ ID NO: 3072
  misc_feature (1)..( 3000): 2750-1469P.txt file - cDNA_ID_3070694; gDNA_ID_1620623; Annot_ID_47081

SEQ ID NO: 33520 - DNA, 3000 bp, Unknown; identical to SEQ ID NO: 3072
  misc_feature (1)..( 3000): 2750-1469P.txt file - cDNA_ID_3070694; gDNA_ID_1620623; Annot_ID_162396

SEQ ID NO: 33521 - DNA, 3000 bp, Unknown; identical to SEQ ID NO: 3072
  misc_feature (1)..( 3000): 2750-1469P.txt file - cDNA_ID_3070694; gDNA_ID_2926200; Annot_ID_141497

SEQ ID NO: 33522 - DNA, 3000 bp, Unknown; identical to SEQ ID NO: 3072
  misc_feature (1)..( 3000): 2750-1469P.txt file - cDNA_ID_3070694; gDNA_ID_2926200; Annot_ID_201813

SEQ ID NO: 33523 - DNA, 3003 bp, Unknown
  misc_feature (1)..( 3003): 2750-1469P.txt file - cDNA_ID_3070698; gDNA_ID_1620623; Annot_ID_162387
aacaatatccaacttgaccaatatatctttattgttcgtcaactgtcatcgatctatatcactttacgtataggattaatgtggcgtaaaaagataaagaagtttggtccaaatttcaatatcaaacttctagtgatgagaaatttctatttggtctacatcggggaacagatcattccacttatgaatccccattactaattttccattcctattacagacgttttacgtagtagggaatctagtttattaatatacatatcacatagattaatcttgattgtttcgcaaattttaatggttttcggaaacaaaaagggggtacaaagtgagctttccgaaatagtgtagttcccagcatccaaatctctcaaaattccttccacaattagaacgattgttcgttcgttcgttttcacaatgtatctcgacctcttttagcaagagtttgctactaaactcgaaccaagtggaaacatgtgggttttgcaatctaaattgaatttgttttgtcaaaaaaggttcttatatttagtacactgtaaaaaatttcgtttctaataacataaatacctagtatagtgtaatggtgttcagagttagcatgcaaacttgtgttaggaaaggatatcaaaagtctcttgtttcaacaatttttattttatattcaaaaattattatgatttgatctttcaagttgattcaattcatgaagatcacataaagcttcttctctgaaatgaatgtcacatggaataattatgtattgaagagcaaaaaccgcatatagtaacctagcttaaaccgaatatacccgaagtcaagactttaatgagaatcagactaaatcctgaatttatttgaaaacaaatcatatgatttggtcttcggtccggtaaaaaaactcagataagtttgaaaacaagttttaatatttatactatatgattccgtcttaatcaaaattgtcaacttacatcaataaaatcaaaactcattttaactagattctaagaatctcatcgaacaatcgatctttgtaaatcttcatggaatagtggttagcatttgtatcattgagtttgaaagaaacggaataattaaagatgacactaaattcacaactttgaacaaacaaacaaaaaaaagtgacaagaaaaatagaggtcggtgtcggagccgcccaaggtggcaacttgttcacacctcataataaaagcttctcacaagttggaagtcgcggtcgagtccagtcaagattttgttgcccttttcccgtgtgggctcaccaccctctttgtcttcttctccccaaaaattttccacgttttttgtttcactctctcaatttatttatattttttttgtcggctcatatttaatttgtgttaattaacacttccttgattagaaagtttttttgtaccgacttaaatttatcatgcaatgtgattggtcgctttcccaaaacaatctctcaacgacaaaaaagtagtaattagtaattaaatacattatattttgttgttaaatagtactcattctatttcaaaatataaaatatttaagtaaatatcacacggttaatgaatttaaatatataactcaagtatagtactaaaaagaatactttaacaaacaaacagaaacctattgtacagtaaaatatcaatcagtgaattattaatcaaatagtaagggaaactaggatataatagaaaaagaattgccgacctacaaatcagagtcaatggtcaagcaagtcaagggaaagttcgtaattgttatggatctggagtctggacaaattaaaaaaaatttgttaaatagaagaggatataaagggaacacagatcctacatattgaaatttatgtatgacgtccaaatttttcttcagcatgggacactgccccgccgaaattattgatttttcggatctttcttctacttgcttcttttttgtttgcttttataagttttgcatagctaattcttaatttcttatcatttatttctagttggtagagacttataaattgaacgtttcaagtctttggacggtatttgagatttcttgtaatttcacttgtaattgtaccacctaacagtgactaaagcagaataaattacgattcgtatacaacaaagtattcaaatttctaaatgtggatatattattgattttattttgggaaacatgtttatgataatcacctatatctcctctatagtctactagaaacgatatttgtcaccttcatcgtacaagactataatgtataattctatccataatgaacgatctagtttttaacatgtactatagagatgaatgattacgacagtaaatttaacccatgcatacgaaaatacataccgatagatataacacaattcagaatgttttacacaatcccatatttttagccaatcagtgtgattttaatagacagctttctatgtcttgttgtgctttttcttcttctttttttcccaaagtctttaatgtcttctggactttatagaagacagctttttatatgttatcttcactttcgaacgactttccttcctaacatatcccaaaacctatctctttaatttattcctatcgtacttacagcttttattaaaaaaactttcttattttaatcactaaacaattaataaaacatttatttatgatttttcattttcgttaaagctcttttattaaaaacttaatcacaacaaatttattaatcttaaatttgaccttaggataaaatttatatattaatcttatatctgttatacattaaataaactttaatttctgcgcaacaaactaatttattatttatttcttgtctctgtctttgtagttttagtataaataaagccattttgctccgaggaacttctcattcagtcggaccaacttgtgaccgaagaaagcaaattgagactacgcaccaactagtcctttggtttgtatcttaagataaaggtttcttttatg

SEQ ID NO: 33524 - DNA, 3003 bp, Unknown; identical to SEQ ID NO: 33523
  misc_feature (1)..( 3003): 2750-1469P.txt file - cDNA_ID_3070698; gDNA_ID_2926200; Annot_ID_201805

SEQ ID NO: 33525 - DNA, 3003 bp, Unknown; identical to SEQ ID NO: 18837
  misc_feature (1)..( 3003): 2750-1469P.txt file - cDNA_ID_3070714; gDNA_ID_1620626; Annot_ID_162484

SEQ ID NO: 33526 - DNA, 3003 bp, Unknown; identical to SEQ ID NO: 27871
  misc_feature (1)..( 3003): 2750-1469P.txt file - cDNA_ID_3070718; gDNA_ID_1620626; Annot_ID_162476

SEQ ID NO: 33527 - DNA, 3000 bp, Unknown
  misc_feature (1)..( 3000): 2750-1469P.txt file - cDNA_ID_3070722; gDNA_ID_2214706; Annot_ID_189840
caacgagaagatgatcaaacctaattcgaatttcaatacaaatcccccaaatctatgggaaattgaaacaaatcgacattcaccgaaaatcataagcaatgaaatcgaaaacgaacctcgacaccttctttaccagaagcagcggcggaggcagacgtgtaaccggaatcaggatcgagacttaggtaaaggaagatagcgagacagaagaatcctaaagccatcacgaatagcagaccgataaaccagttctgctgccaaaatgggtattccggactcggtttcttcgccgcaggagctcgaacaggtgaggaagacggaggaggagatgatgaagatgatgatgatgatgataatggctttcttctcgagagagcttgttgttgcccggacgtcgacgccaccgtgaaggatcaaattgagatctcgccggagacagtaattggtagctaaattctgttaagtttccgatttgatccttcctcgtgcttttgagagggtcttcttcgtgcagtgtaaaaaaagttcattaacttcctcagtttatgttgacacgcaggtgtacgtttagatagcgaatgatattttaacacgtgtcattttgatgacatgtcgtcttatcagtggtgtatcaggttgcattgaggcacaatcaaagctaaactaattttaatggtttttttttgttgttcttttgaattcacactttagtttgatttaactttatgttttatgggtactagatccggcataaattgtgaaagaaaagtgtgaatcactttggtttgaattcataatattagaaaaatgatcgtgtcttgaatgaattgaaaattgtctaacttgattataaataaactatttccggttttatgtattcttctgatataatactccaacaacattgttataggctcatgattaaatatatagaattgatataaactcaacaagatttcaagagtattcatatgaaaaactaaaaataaaacaaaaatgaaagtatcatttaagtaaatacttttaaatcttctgtcattgcatatatccatataagagaaatgatctttgttgggtattaaaaataattaacaattaacaaaacataattaactaaaaaacagaaatccacaaaaatatttagaaaccaaacattgttgaaaatatttattttttatatgccataatctcgtaagttaattttacatcatggaaattaattttaaatgagttaaaattaataaataaaaatattctcattaaaagtaattgaaaagttaaatcctataagcagtttttctcaaaatattctattttcacttatgattacatgagttaaaaattttagaataaaacataggtatagtaacacatcaaaggatgcaagacgctccatcgtacgatgcgttaaaattcttaggttaaaacataggtattcaaaaatttattcttataattaatattttgtgttttgatttaacgaatgaaaacattatattacattgacaaatataattttatccaactaaactaatgttaaataaattatattactattttaaacttcaatggtctttttaattagtattattatccatactaaattatttaaaaaaaaaaataatatgtgctacatttaaatgatcaataatacatgtaaaaacaaatttgttaattttccttttgttgaataaaagttaaatatatatataattatatatagagacatataaattagtatatgtaaatttgtttacttttttagattttctatttttttaagagaataaaaaagttaaatttttaatgacacatgtaaacatctgatcgtttgacttgacacatgacacgatcttatgaattagtaactttgaaaaccatactttatataattcaaatactatctataaaaatatatttttatagatagtatttgaattttgtatggtaatcaatatatttttcttcatatttaatttaataattattgttttaaacaaaatttcagtcttatgtattctatttcaattatacacactcaatcttatcagtgaataagagaaatgatcgcgtattaaattatttggtaggtcttatgttttaaaagtttattatagtgtattaaaaaaatttagtcattatagagtagtgattattgttataaaaaatagtaataaaaagaatataatgaaagtagtgcttaatttattaacatatttttttgttttttatttttattttaaagaaatcaattaagagtaagattgatgatacatttaatttgcttatttaattttattaatttttagtttaaaaaaaatcgaatgacacatgtcattttatggagagagttgaccaactttcatatatataattcacaatttagactactatcaaatttatatccacaaaccaataacaaataagcagctctagatagaattactttgaagatgattaaaactttcgaatgaatagcagaataggaactgaaaatatgaatattacaacacaagaaacatgtcacttaatatcatttatctatttatagagatgtaaaactcattgacattgtttttatttaaatattattttggcttttgggcaacacctactatgacacattttaccaacattgctacgacaaaacggcaagcagtgtaaattagagaagagtaccgcgaagctcccatcgatattgttcgccggtaatattttctccgatttgcttacctctcttgatttctggtgagtttcattctcctatcatgtcgcacaataaccagaaaattaactcttgtaacccaaacctgctcaaattattcactatttcctcagttgtttcatgtaaagttcgagtttatctggagtagcttttcatattcaatagaaaagtccaatgctttaagttttgaaacctacccagaactcaatgtgaccaaattaggtgagaattgaggctaaaaccctaatgtatatgaatgttttgttgaaggaatg

SEQ ID NO: 33528 - DNA, 3000 bp, Unknown; identical to SEQ ID NO: 33527
  misc_feature (1)..( 3000): 2750-1469P.txt file - cDNA_ID_3070722; gDNA_ID_1620626; Annot_ID_162475

SEQ ID NO: 33529 - DNA, 1872 bp, Unknown; identical to SEQ ID NO: 13437
  misc_feature (1)..( 1872): 2750-1469P.txt file - cDNA_ID_3070726; gDNA_ID_2214627; Annot_ID_187852

SEQ ID NO: 33530 - DNA, 3000 bp, Unknown; identical to SEQ ID NO: 3120
  misc_feature (1)..( 3000): 2750-1469P.txt file - cDNA_ID_3070726; gDNA_ID_1620626; Annot_ID_162470

SEQ ID NO: 33531 - DNA, 3000 bp, Unknown
  misc_feature (1)..( 3000): 2750-1469P.txt file - cDNA_ID_3070754; gDNA_ID_1620627; Annot_ID_47164
ttcaacaaaatattaatcattttatttgtctttaattaagtaagtgagaccacaacgaaaggtggtaataagaatcaacatgcaaatgggtttcataagtcaatcattttcaaacgcttttttatttcaaccatacattttctgtttctcttttgataggtaaataatatttgttatattttaactttttcacatttttaatgaatccattatgtgaattgatagtataggcttataaactaaatattacttaactgaagttccctttttttaatctctaatttgcttacaatttgattaaaatatatattaactgtatgtgacaacaaaatttaataaccaatttcacttattaattatgtttttacagagaatacatcacccgaactgtttggtgtcgagtaaacaaaagttttcagatttgccaagtttagagatctcattgttggtaaaagagtttggtgtagagaaaacaagagtttagatttgtgtaagatctaagatttagcattggctgtacgtgtttgctgctaaagttctgttacatttttgtaactcgttttatttttctttgacattttctacggtggtcttgggaatgcatgaatgctatacaaaatatcaaataattgatggtacgtaatttaacccttgtgacagcaccccactttacacaaattgagtatggttttgaagccactcacaacagtatctgtcacaggttatattgtttgccaaaatgatgattttttgactgaattatttcattagatatcgaataatatattgatgtgttgatgttatatatataaccaagtatactgtatagcaattgttacgaataagaagttttacatgaaacatgttaattttcagcatatttagcaacagtgacatggtccattttgtttttgctacgcatgtaaatatcattagaaatgaacaaacaggttttacaagagttgttaacctacacaattgaatccttggcaataaaagtttaaaaacaagggagacagcaataatgtctgggagaactcttgggagagatcatggtgatatggtccatgtgccccgatcggttaatgttgcataatcgggaccgtcaagatactatatcacgccaggtgatattcgaattaatttgcatttacctaagaatctgtcttggaatgctaaaggacaatgaaagtaaattgtgactagctcattttgaccaactttgcactttatactttacataaaaacacgtaaaaatctgacggcggtcatgaggcatcacctggccatactccctcaaagtagtggtattgattacaatattcatagcttgaacttctaactcaacattttaacatgccacctttcatttccctagtgtataattactctctataagtggagtgagaagttgtattacggtaaaattaaagcttaattacaacctagacatatcatagtataattaattccaaaagcttaactagttgcatattactaatttttgttaaaattttggttcggttataaaattatattattatagaaatataaagcatgattttttaaaattagttgaagattggtgttggatacgataatatttgtgtagataataagattaacatgaaagtagtcaagtggagcatcaagaagcatgatggtgaatcttaccctatacggtttacacacgcgacagtcgcgtctaagatgaaacgcactattctttgttttatacaatttatattgtttgctttcttctcgacgcgtttatatacattatcacagggacaagatattatttgttgttatgagagctaataaaataaaattagttacggacctaattttggctgcctaatcatgaagttcaagagtgctcggagacaacataaaatatgtcacacgtggcggacacctaaacgttcatttttactggtatgatgaacaaaacgagcaaacacgcatggttaatggaacttaattcggtatgtaacgattcgggttggagatggaatgggaactagaacttttgcaatcaatatttttgctccaggagtgtattaaatttaagtgatacatgaattgaatttttatttttaaaatgagatgcatttttataaaatattcttatgttgtgtttaataatttttttttcttagttattatcaatagtagaaaacgttgaaacgtgtttatagtatatatattttacaatgcaagcttggatagtttacataacgcgcgtagttatatgatggcaacaaaaagatgtagttatatcttacatgtgtacggagaacaaatatctaaactaattaattagctagtttgagtcctggtagaatattggaaaattagattacgttttttaatacaatgatgaaaaccatcaaaattaaatatattatttatttggatggttagctagaaagctatcagccgatcaatggtttaattatattattggtcatgccaaaggaacaaattaccaataagttttaagggtttctttgcagtttagtaacgcctatattaaaagctcatttatttttatttggtttaaaggaaaaagaaaggtcacttaaatgactacgataataatataaaccaaggtttggcataaaagtttgacaccaaaataatacacgccaagagtgcataccacataaaattatcgaatattttccatttttaaaaaccatagaaatatctgagaccgtcaatctgcgatgttcttctctctcttttaccacgaaacgacgacgtccctagcatataagcatggaaccattacacatattaccatgtctctatatatagtgaaccattggcctcgctagttaattcatatcgaagaaaactcaaatagaggaatcaagagtcgaagatctctatatattttcccttctcttgtttccttattagttttctccgacactcccattcaaaagtagaaagatactgaagagctcgctcattcacaaaataaccaaaatg

SEQ ID NO: 33532 - DNA, 3000 bp, Unknown; identical to SEQ ID NO: 33531
  misc_feature (1)..( 3000): 2750-1469P.txt file - cDNA_ID_3070754; gDNA_ID_1620627; Annot_ID_162519

SEQ ID NO: 33533 - DNA, 3000 bp, Unknown; identical to SEQ ID NO: 33531
  misc_feature (1)..( 3000): 2750-1469P.txt file - cDNA_ID_3070754; gDNA_ID_2926186; Annot_ID_140808

SEQ ID NO: 33534 - DNA, 3000 bp, Unknown; identical to SEQ ID NO: 33531
  misc_feature (1)..( 3000): 2750-1469P.txt file - cDNA_ID_3070754; gDNA_ID_2926186; Annot_ID_200650

SEQ ID NO: 33535 - DNA, 3000 bp, Unknown; identical to SEQ ID NO: 3173
  misc_feature (1)..( 3000): 2750-1469P.txt file - cDNA_ID_3070797; gDNA_ID_1620629; Annot_ID_162616

SEQ ID NO: 33536 - DNA, 3000 bp, Unknown; identical to SEQ ID NO: 3168
  misc_feature (1)..( 3000): 2750-1469P.txt file - cDNA_ID_3070801; gDNA_ID_1620629; Annot_ID_162612

SEQ ID NO: 33537 - DNA, 3000 bp, Unknown
  misc_feature (1)..( 3000): 2750-1469P.txt file - cDNA_ID_3070821; gDNA_ID_1620630; Annot_ID_162661
tatgttacttacttaattttagattttatagtgctatatccttaaataatttatgaaaataggttacttttgcaattcacccattattattttcgtattagaaatagaaatcgtctacttattgtgtcgaatttgtttttaacctttaaataaaataatgggcctctaaaataaagacaattagggggctaggttgttgagcccaggaccgattctagtactactagactagttgttacaaaattagttttattataggatataattttttatatattttaaattcttaaataattaatctttcaattttttgaaaagaaaagtactaactcactcgtattaaatagctgaaaattttgaagatgagacacgtccgaatgagacacaagtacaaaggacatgattcatcatcatcccatgcataaaaaagacgacaatcaaaaaagcaaagtaaaaaacaaacactcacacgggagctggaaagagatataaatggccaaaattttaagaatatatcaaaataaaacgtggagaaagggattaaaaaagctatgtaaagatataattgcattgtaccaaaaaagaagaagatataattgcacacatacgtcatattgtttatcaaaactcaaaccaatattctttaaaaaaaaaaaaaaactcacaccaatcttatatcctaaatcattcgtgttgcgagaaatcttacattcagcttttaaattcttcattgattcttgacatgtatttctatatttggtgaaacaaatataagttgttttaagttggtctacgaagtttgtgctcgcaagagagaggatatttgcaaatttaagctgtgattttgtaggaaaatgattgtattgggggatattttgcaaattgcaatggtatgtatcaagttagagacaaaaatcacaaaagtgggctacaatatgactttgagtattaatgtcggtatcttcgagaaccatatgattcccttatctagtcagatactgcactatttatatccattcagattatgccacgtgatggtcaaactggatgttcagtcaaacctttgactcagtggatccaatatacacatgcatgtcacttaaattatgatagaaagataaatttattaccatatctataaggttagattctcttttgttgaaacaaaatttcctagctttttagtaaaattttcagtcaactaataataacatttcaaactatggcaagattagcattataaagaaggaactaaacctaataataatacttattaaatggtgaaattttggtttgtattctccaaaattctgaaaatttcatagccattattggagtcatctgcttttccttttttgttcttcatttttttttcctagtcaatagagatattttctctttcttactgcatcgatccatatcttgactgaataaatacgtcaaaagaaagcattaacgattacacactctcatacttatctcctcttaggtttctcatttctctcgtctctttggaaaataaaaattgttgatcagaaataaaggagaaaagaataaatggcagatcaaaatccaagaatcatcgtcgagcaaaacccatctcaagctcgtcttgacgaactaaagttcaagtcatggcccaagtaagatcgactcttgtttttaatccttacttgtgggtgagagatccatttggtaaagttgcatgagatagatttagaaaattgagttttggttttctttgttgttcaaggtggggatgttcaccagggaagtaccatttgaaatatgaagcagaagagatatgttacattttgaggggcaaagttaaggtttaccctaaaccaccaccatcatcatcgtcggatgcagaagttgaatggtgtgtagagtttggggcaggtgatattgtcacttttccaaagggactttcttgtacttgggatgtatctctctctgttgacaagcactacattttcctctcttcttaatttttgtaaaagttttttttattattctttattttttgtatttctaacattgtgtttcttattagttgttgtaattggtgttctgtttttttttttttagtaagaaatatagatgtgtttgcatttataatcgcataatgaaacaatgttcttcaccaatcaagcttgagcaaacctcatcaattcgaataatcctgagatgaatcttcaagaaaatataaaaattatactcattaatcctataaaaagtggggcatatacaaaagccttcaccactagaaccccaacccttttttctagattgaaattcaaattcatatgagttgttcaaatgtttggaaattaagaaacggtaaacgttggattctctttagtcaacaagaggtgatcttctttacttgtccatttacgcttctattatactactactaaatttcctttctttaagatccgctgaccagtcaactttccatcttgtttatctttaactagggtaagcagagattttaagatcaatattggaagagaaatttaatagaaagatgcatactgtaaaaatttcacacgttcaaatgttatttactcctttgttaaatcaatgctggttagcattttcaaaagccaatcgtcaacataaatgtagcattaagtccactatcataagtcataactgtttaacatgttaccattcaaaaccaacaacatgtcacataacatcatcaaaagatatgtgatcatcatgtgagatacactttggacacaaatttgacaaaagccagaagaaaaaccagttaaatgctttcaataaggaaaaaaagaaaaaagaaaaacgttccaaaaccaaaaccttctaactcatcgaaaagatttcggtccaaaccgattgaactggccggtttatgaatttaaaaacaccgtccaatcgaataacatctggattttacacacacacacacactctctcacactcgttgaccaaaaaaaaaactctctctttcactgagaaatg

SEQ ID NO: 33538 - DNA, 3000 bp, Unknown; identical to SEQ ID NO: 3180
  misc_feature (1)..( 3000): 2750-1469P.txt file - cDNA_ID_3070825; gDNA_ID_1620630; Annot_ID_162660

SEQ ID NO: 33539 - DNA, 3000 bp, Unknown; identical to SEQ ID NO: 3201
  misc_feature (1)..( 3000): 2750-1469P.txt file - cDNA_ID_3070840; gDNA_ID_1620631; Annot_ID_162690

SEQ ID NO: 33540 - DNA, 3003 bp, Unknown
  misc_feature (1)..( 3003): 2750-1469P.txt file - cDNA_ID_3070844; gDNA_ID_1620631; Annot_ID_47251
aaaaaaaaataattatctaaaaatcaagataattataagattaaaaatccattttattgtttaactaaaactaagcagaggacatatacactaagtgtataaagttcttaagacaagtaaactaaaatatgcatcctccaggtcctccaaataaaatagctcttgaccaaaattcaccaacacctaatattttttggacattataacagtttggactgcttgcgaatgtctttaaagctgaagctaacggactcgaaacttcttttgttatatcagtgattatttttaaaccattcacataggctgctttcttgaaaccctcttgtgggaaatgtccacttcccatgcttgggctcttctctttcactgaactgtacacttctcctccccaaaacacggcactcgctccatcagctaaaccttgacgtgtgaacaatgattttggccagtatccaattggctcgttatttagcacaaaccaccaatctcttgtaacatgatcctgcttaaatcaaaagttgttaacataatcttgacttttcgatattagtttgaagaaagctaatgttgtatatttatatatatacctgatatatgctgacttctagttgatattgttgaccatcataaatggaaactggttgggcgagcattccaattgcatacttggtgctcacgtgtacaaacccaggacgtagtgtattgtagcaatgagtcttattatttccatccgcctatttaaatcaaagatagtagccataatatgaatgccacatttaagagtcaagactttaagaagttttgaaaaacttacagtccagtaagtgaacaagtgactttgattattctgatttagccctggatacacctaaaaacatattttggaatgttagttccaaatttttgatttagaaaataagtaaaaatagggtctagcttgacttacaatccatccagcagaaatgctttgaaatcctttgttgcctgatacagccatagccgcaagactaaattgatcaggtgagacgtttggattccatacgttaatgtttccttttgctccatagtggtcatctttgtaactaattgtggcaaactaaaatccgaagagaaaaagaatagataatcaaaaaatattataagcattgtggacaagttacaaggcgatctcaattcaactacgtgtaataagaaatgattcttacatgatgaccagttaaatcaattttcttgtcctttgcagacacttgtcctggatagttgaatcgtaaggattgcaaacgttgagctcgtataagatcttcaagtataattcttttgacaatgactgtcccaactggacaacttatgtcatcttgtcgaaatggcagagaactagttttatgagaagcgttgttatctttggtccatttaggtatagttgtgggtttcaactgcatttatatttcaatccatccaaacattaataagaattttatttatagatattttttcgtggtttgtaggataaaccttaatagaatggttcttgagcaaaggatgatcaaaagctagctgtttttgaatgtcgatgcagtcaaatatataaccatgttcagtctgtcgaaatcaaaagcaagaaaaaattggtgtggtctgaaaataaatgtaacttgatgatagttgtaatattgttacaatagtcaacaatttttgtaatgttttatgaaaatttaagaaaagaaaggctaaatttacttggaaacttttgactgcaggtttattgagataggtaagtagcttcttcatctcttctttctcctctttcgaaggtattgttttgtgactctctccaactaaaatgagagctattgttgataaagttagcaagataattagtttattggaatacctcatgatgaatcaaggatcttaatctatatttttcaaaagaaaaaatgaagcagaacaactatatttattgtgtcacataaatctgagatcatttataaccaccaaagaacctatacacagtaaatgacaaatgtatctccctctatctctattgcccatatgtagatgctaaagtaagatttctcttttttttaatgtacttttttttgtataaagtatattccataagaaaaaggaaaagcttgtttatggatcaattgaccccaaaaaaagtttttagatcaaagcccaatataaaaaaaaaacacagtagtgacacaaaggaacttaaataaaccatgaattgatctataaacagtagagatcgataaggcgaacattttccatgtgaagtgtcttctttcatctataatatttttgacatccaataatttcctctataatatcattcacataattgatagaaacattatgttagaattgtccacatcatttgagctgtaatatattctgttttaacaaattatatggtagttgcttaatcttatgtccatcttcttctatgcatcgttttcgcgcctagttgtccagtccatttcaactacctacctctaattcttatcttaaaacaacattttttaatttaagtattatgctcaaagactaactagatagaaaaccgttattaaacattaaacgaattaaaagtcttacatggaaaatgtaggtttataaaccacgagttatgattgacaataaaaaaaatgcaaatcatcaatcaaaagagacttgagtgcgactctatatcaaccattgcaattaaaattatctatcacaaaaattttagacagattaagttaatttagtctaaattcactaatttattttctataattagtaattaactatatttatttatttacacattttctgataatttagaaatttgcatgaataacaaatataagattttggaaattagtagcaaatttaattaataattatttttgcctaaatgaaccaaactataaaacctccacatacaccagtcatcaaatttacagagacaacaaactaaagttggtggtgatagagtgagagagaaacatg

SEQ ID NO: 33541 - DNA, 3003 bp, Unknown; identical to SEQ ID NO: 33540
  misc_feature (1)..( 3003): 2750-1469P.txt file - cDNA_ID_3070844; gDNA_ID_1620631; Annot_ID_162684

SEQ ID NO: 33542 - DNA, 3003 bp, Unknown; identical to SEQ ID NO: 33540
  misc_feature (1)..( 3003): 2750-1469P.txt file - cDNA_ID_3070844; gDNA_ID_2926182; Annot_ID_140607

SEQ ID NO: 33543 - DNA, 3003 bp, Unknown; identical to SEQ ID NO: 33540
  misc_feature (1)..( 3003): 2750-1469P.txt file - cDNA_ID_3070844; gDNA_ID_2926182; Annot_ID_200329

SEQ ID NO: 33544 - DNA, 3003 bp, Unknown; identical to SEQ ID NO: 18911
  misc_feature (1)..( 3003): 2750-1469P.txt file - cDNA_ID_3070852; gDNA_ID_1620632; Annot_ID_162743

SEQ ID NO: 33545 - DNA, 3003 bp, Unknown; identical to SEQ ID NO: 18911
  misc_feature (1)..( 3003): 2750-1469P.txt file - cDNA_ID_3070852; gDNA_ID_2926154; Annot_ID_198287

SEQ ID NO: 33546 - DNA, 3003 bp, Unknown; identical to SEQ ID NO: 18913
  misc_feature (1)..( 3003): 2750-1469P.txt file - cDNA_ID_3070854; gDNA_ID_1620632; Annot_ID_162739

SEQ ID NO: 33547 - DNA, 3003 bp, Unknown; identical to SEQ ID NO: 18913
  misc_feature (1)..( 3003): 2750-1469P.txt file - cDNA_ID_3070854; gDNA_ID_2926154; Annot_ID_198283

SEQ ID NO: 33548 - DNA, 3003 bp, Unknown; identical to SEQ ID NO: 18915
  misc_feature (1)..( 3003): 2750-1469P.txt file - cDNA_ID_3070862; gDNA_ID_1620632; Annot_ID_162731

SEQ ID NO: 33549 - DNA, 3003 bp, Unknown; identical to SEQ ID NO: 18915
  misc_feature (1)..( 3003): 2750-1469P.txt file - cDNA_ID_3070862; gDNA_ID_2926154; Annot_ID_198275

SEQ ID NO: 33550 - DNA, 3000 bp, Unknown
  misc_feature (1)..( 3000): 2750-1469P.txt file - cDNA_ID_3070879; gDNA_ID_2926147; Annot_ID_197816
tatggtagaatagatatgtaattaaagaataagatggtgaaattagttagaagaaagaatgttgtttaaagagacgcgaaaattgattgtacctaggattgaaatagtaggtgatgactgatgatgaagggtacaaagaatcatcaaaggaaaaaaaacattgttagggttacaaagatgcaaaatgtagttaaactgtacattcaagctgaattaaagctatagttaccaagattttttaattttatgttaaatggacgagacaattaccttccaattccaatcgacataatatacaatacaaacacaaaagcaaataggacacgctgaatgttagcattatgagcttattattattttaaaattttaaactacgagtagagacatcagaaaaatgaattacggtgaaggatatcgatgaaaaaatactcatttttgattcaaaacataaaggttgtaaaatgtaaatgactatggtaaagagaatagataggtaaattaaacaattaatagtactctctgtttctaattaagtgtagtttaaaggttttttagttttccccgtaagtgttgttttcacttttgtatgcaaatattaaatgtatttaatagtttttaaccaattatattttacatcatatttttttttggttggattagttgtaattaatgatatatttataggaaagagataaattaaatgaaatttatatattttcttaatttgtgtgcaaaaaccttaaattacaaatattcagaaagagagagagtaccaaataattttttaaaaaatttctacatagaaatgatattatcagaaagattttttttttcaaaattttggtcttcgactcgaagtaatcttttttctaccttatttatctttttgggaatttaatgaaaaaaaacctcaactttggccagatccatttttaaaccctaaactatgtttttagtaaaacaaactctgaactaaaacctgttaataaacttaaccccacagtattaaatattaatgggatattaatttccaaaaaaaacaacaacgagacatttgtatttagcgcaaaaaccacatgatgttctttaaaactgttttgaatttattacaaaaaaaacgtttagtgttctaaatgattttgaattgcttaattagtttggattttagaagctgaaagaaagacacaacaacttaaaataatccaaagagtcatgcttaaataaatccaaccaacataactatcgaagctgttgcaacacaacaatatttgtcacaaaaaaaaacaatcgtttcagagggacaagatattttaaagtaaagacttgtcaagcattcactttgaagagaagattgtattggttgagtgatagggttctcttcatccattgttttctgttttttctttggtcgtccttgaggtttcttgggtggttttggcactgctttacgcttgcatgaacgtttgttgtgtccgacttgttgacagttgctgcaagtctaaatatgcaaagattaaattaaataatttgaaaaggaagatcttatgaaacataattcattgttctctattttaccataattatatcaatgttaagtttattaacatgtttaagtttattactgtggggttaagtttattaacaggttttagttcagcgtttgttttactaaaaacatagttcagggtttaaaaatggatctgaccaaagttgaggttttttttcattaaattccctatctttttttggttctcttatatctcgccagcctcactcatctatcaccatagacagccacaccaatggccatcgataagccaatacaaattggtgtgacgggatgcgccgaaatcgctaggaaggtctcccgtgccatccatctcgctcccaatgcctaaactttaaactggaaatcaaacctcgaattcttattattttctaaatcataaaacctacacttttaatcaaaatcaaaaatattaatttaagctctaaaagccaaatgttaaaactctaaaactctaaaccataaaagttatggcatttcttcagttttaaaacaattagcctaatgtttttttccttagtttttctaaaaatagattgaatattataacttcttgatatataagaaaaaaagttatttaaaaatgagtaaatttggaaaaatgacctatttttgggttttcatttgaaaaataccttattattttttctttttttaaacaattaattttcaatatataaaatactaaaacagcttcagtaaaattagggaataacaaaaaaaaaaacttaaaacaaaaaaaaatcataaatacaaatttgatgtaactaataattttaaagataattattatcttaaatagttttaaacaaaatgttgtccaaaaagtaaaattaaactttatcaactgatagacttttatagaaatatttgtaaatattgtttcataaaattttaatataaaaaataaataaaatgatagactttatatgaattcaaatttaatttttatcttaaatattttaaacaaattttcgtccaaaaaaataagcaaataagttttattaggtgatagactttagaatatttttccgtattattttgttaaattttataatatctaaaacaaataactttttatctcaaaaaatagttgaaaacataattaagaattcgaatttattttacttgaattttgtttttctaaatttcgaattttattttaatttattaataaaacaacgtttataatctggataaatttatcatcttatatattaagaattacaatttttatttaaaatagaaaaagatgtattttccaaatgaaaactcaaaaacaggtagttttcaaaatctcccattaacaatttatctcgtcttgttgtaacaacttcacctatttcattcgttctttatcaacaacactctctctcttctctatcaacactttctttcatctctcgccggaaaaacccataaccacaacaatg

SEQ ID NO: 33551 - DNA, 3000 bp, Unknown; identical to SEQ ID NO: 33550
  misc_feature (1)..( 3000): 2750-1469P.txt file - cDNA_ID_3070879; gDNA_ID_2926147; Annot_ID_139148

SEQ ID NO: 33552 - DNA, 3000 bp, Unknown; identical to SEQ ID NO: 33550
  misc_feature (1)..( 3000): 2750-1469P.txt file - cDNA_ID_3070879; gDNA_ID_1620633; Annot_ID_47290

SEQ ID NO: 33553 - DNA, 3000 bp, Unknown; identical to SEQ ID NO: 33550
  misc_feature (1)..( 3000): 2750-1469P.txt file - cDNA_ID_3070879; gDNA_ID_1971919; Annot_ID_177176

SEQ ID NO: 33554 - DNA, 3000 bp, Unknown; identical to SEQ ID NO: 33550
  misc_feature (1)..( 3000): 2750-1469P.txt file - cDNA_ID_3070879; gDNA_ID_1620633; Annot_ID_162755

SEQ ID NO: 33555 - DNA, 3000 bp, Unknown; identical to SEQ ID NO: 33550
  misc_feature (1)..( 3000): 2750-1469P.txt file - cDNA_ID_3070879; gDNA_ID_2926265; Annot_ID_204908

SEQ ID NO: 33556 - DNA, 3003 bp, Unknown
  misc_feature (1)..( 3003): 2750-1469P.txt file - cDNA_ID_3070911; gDNA_ID_1620634; Annot_ID_47321
aaagaaagaaagaccttgttctagtgcccttagtgttctcagcagtttctcctttccggagagccaaagcagaaggtttcagattaacctttgctctctcaataatagcttggcattgttctgcagttgcaaaattcggaaaatatatagccctaggtctccaactaagtacctgccaattttaaaccaaataatccataaagatgaagtactaaatttcactagttgactaattgctaaaaaacacaatactctcactcacactcatggtcaccacacatgaacaaaaaaacaaagttcaattagataatcaaatgcacaatcttgccctaactaatcgatttcacctaatttgccaatccaaacatcttaaaagtcaaaaaattagcaacaaaatcagacctgaaaaggaatcgatccaatagattcttctccagtaacaccatgaggcatcgagctagcttcttcttccccattctcaaccatatccaacattctcaacctgggtttaacacgaggcacattctgatcccaaacatagaaccctcgattagtcacaaaaccaagctaaagactccaatcacatctaaagagtacagagtaaaagatcagagagtttccacacctgagaaagtagagtggagccatagaaaccgaagaggaaacagagagaacagaagacgataactgtggctaaccctagcttcttcctcctgtagctcttcaatctgctcttcatcgagccttcttccttccgatcagattaagtttccgatggaaatcttcgccggcgtaaacgatcagataagtttccgatgaaaatcttcgccggcgtaacgaacctcaatatcgggacgcctttcgtcgatccaatgaagcaccacaaatttctatttactttaaaatatattgttttatagtttaatgatcagatctcgttgaccagtttgtcattttcttcactggtcaacaaatacaaaaaaatgcgccgaatttatccttttttttggttgaagtttggttgcgtagagtggtttaagttttggttcgatggaacttgaacgtttttgtgatttgaattaggtgggcttcttttgagttgttttgcttcattcaggctgtcgataatgacttggaatcgatcttagaatgtaaggtggatatgtagtccaacattgaattgtgtttatggttaaaaagtaaagaatgattatttattaattatatacagtcaaattagagagtcttaagccgagatcaatacattatccaacgaaatttcaaatgagtttattttcttaactaatagtctatattcttgcaacttctttttgataaccaaataaaatgtgtaaccattctacaaatgattttcatatagagatttgagtttagaaaagaataagcaagaagaagattcaagtagcctttgtgtcgagaagaaggttcaaggagctctctttgtgggctatagaactgttgtttaagaaagaaggtgactcatttaatgtttggttcttggggttcacagagcattgttcactgaagagagatgtgatactagagagattcttagtgagcattgacagaaataatagtagtactaattaagtttttttttgtttgatgaatcttgtatgcatcggtataatatgagtggatatgcaaatgttaaaaaaaataaaatgaatggatctatatatgttgaaaatcaccctatgatccataacaacgataaatacgcatccataatgttataaatgtaaaggtaaacatcatgatcaaaaaagttcgacaacttgggccaatgaatttccagttgcttccgcgtatatatataagtccttccacgtcaatttcttaatcccaaaatgcaaacctttttataacaaccaaataaaaatgtgccacttgtaattaaatataaattactccataagcaataatattcatcgttttaatagtatgctctagaacacagcacacaaagatttgttttgaccagaacatgttttttttcttataccggaaacggtaacgtgataataaaattaggttaataataatatagatactaagatgactagattattagcaagaaattgtattcagttgttatccgtctttcttagttgacaagcaaatatatcagctacacgttggctacaggttactcatccttacccattcattattcgctcattataacaatttcccactgatatattcaaatacaaaatatataagacacaaaatagaattaatttattgctatttgcagacgatgtaaacatttttgtagacatgaacaatttaattgattctttactcatcgtagacatgaatttatatttcaaaagggtctactatttctaaataatattcaaacattgactctgtaaatcacatataaataaatatatatattatacactacattaatataatatctcctatttcaaaaagaaataaaagtagctgttgaatttagatatttttttgttggaccgaatcagaatttaagtttttgaattgttccagaagaaagatattttagtataatatacggcaatgacgtttatgtttgggccaaaactttgtctatttattgagaaaaataaagctaaatggagaagaataacaaaaataaacaacgcgttgaaaaaaactgcaaaaaaaaagagaagggggagggcgaaattaaaacaaaacgacgcgtagtctacgtagccttctaagaaacggcacaagtacaagtcatctctatcaatattcttcttcttcttcctcacgcggttttcttttaccaccaccaactcaacacacacacgaatcccttaaaaccgatcagatcaaacaaaaacgaacgaatcaaaattcaataaaaaaaaacctttcgatttctctcatccaatcgaatcgaaaatcttgttatctctttctctctaactctactgcactcagaatctctctgtatagaaaaaccctaagtaggttgtgatg

SEQ ID NO: 33557 - DNA, 3003 bp, Unknown; identical to SEQ ID NO: 33556
  misc_feature (1)..( 3003): 2750-1469P.txt file - cDNA_ID_3070911; gDNA_ID_1620634; Annot_ID_162815

SEQ ID NO: 33558 - DNA, 3003 bp, Unknown; identical to SEQ ID NO: 33556
  misc_feature (1)..( 3003): 2750-1469P.txt file - cDNA_ID_3070911; gDNA_ID_2926206; Annot_ID_141741

SEQ ID NO: 33559 - DNA, 3003 bp, Unknown; identical to SEQ ID NO: 33556
  misc_feature (1)..( 3003): 2750-1469P.txt file - cDNA_ID_3070911; gDNA_ID_2926206; Annot_ID_202211

SEQ ID NO: 33560 - DNA, 3000 bp, Unknown
  misc_feature (1)..( 3000): 2750-1469P.txt file - cDNA_ID_3070915; gDNA_ID_1620634; Annot_ID_162814
ccctgaaacaacgcttccaagaacggctctcgagtccccaagattagcaacatacagtgtgtcattagagattgcaccaacaagacagcaagatcctacagtagccatttgcggtttcatgggaagggatcgtttaaccataccacaaaactcttcttctgtttctttgaatgcctttttgataacatctacagataatcccccatgttctcttgcaaattctgcaatcataaaaccaatcctgtaaatttcactaacaagaacatgactacaaaatcaattcaagaggcaatttacaaacctgaacatgttcacaaagaccaaaacttcatagcaaaattcgaatcttttaatattgaaatgatcagggtaatagagatctcataagttttgaccatcaaaaacgtagtcaaagagtcaaaagaagaaagaatcctaaaacaagtttagggaaggaagagtgggattataacttactgtgcatataaggaaagagatgtctgttaacgaatctagaagcttcaggtccaccatgaccatcgtatacaccgacgtaagtagcagaagaagatgtgaaaacctgactctgatcttcaagcctggaattggcttgaaccaccgcgatcgaataatcaccgccagcgtgaggtctcaattccgattgccagagtaaaccatcaccactagctctgcttcccaaacaccgttcgagaggccgtgctaaagctcgcaacatcacaacctacttagggtttttctatacagagagattctgagtgcagtagagttagagagaaagagataacaagattttcgattcgattggatgagagaaatcgaaaggtttttttttattgaattttgattcgttcgtttttgtttgatctgatcggttttaagggattcgtgtgtgtgttgagttggtggtggtaaaagaaaaccgcgtgaggaagaagaagaagaatattgatagagatgacttgtacttgtgccgtttcttagaaggctacgtagactacgcgtcgttttgttttaatttcgccctcccccttctctttttttttgcagtttttttcaacgcgttgtttatttttgttattcttctccatttagctttatttttctcaataaatagacaaagttttggcccaaacataaacgtcattgccgtatattatactaaaatatctttcttctggaacaattcaaaaacttaaattctgattcggtccaacaaaaaaatatctaaattcaacagctacttttatttctttttgaaataggagatattatattaatgtagtgtataatatatatatttatttatatgtgatttacagagtcaatgtttgaatattatttagaaatagtagacccttttgaaatataaattcatgtctacgatgagtaaagaatcaattaaattgttcatgtctacaaaaatgtttacatcgtctgcaaatagcaataaattaattctattttgtgtcttatatattttgtatttgaatatatcagtgggaaattgttataatgagcgaataatgaatgggtaaggatgagtaacctgtagccaacgtgtagctgatatatttgcttgtcaactaagaaagacggataacaactgaatacaatttcttgctaataatctagtcatcttagtatctatattattattaacctaattttattatcacgttaccgtttccggtataagaaaaaaaacatgttctggtcaaaacaaatctttgtgtgctgtgttctagagcatactattaaaacgatgaatattattgcttatggagtaatttatatttaattacaagtggcacatttttatttggttgttataaaaaggtttgcattttgggattaagaaattgacgtggaaggacttatatatatacgcggaagcaactggaaattcattggcccaagttgtcgaacttttttgatcatgatgtttacctttacatttataacattatggatgcgtatttatcgttgttatggatcatagggtgattttcaacatatatagatccattcattttattttttttaacatttgcatatccactcatattataccgatgcatacaagattcatcaaacaaaaaaaaacttaattagtactactattatttctgtcaatgctcactaagaatctctctagtatcacatctctcttcagtgaacaatgctctgtgaaccccaagaaccaaacattaaatgagtcaccttctttcttaaacaacagttctatagcccacaaagagagctccttgaaccttcttctcgacacaaaggctacttgaatcttcttcttgcttattcttttctaaactcaaatctctatatgaaaatcatttgtagaatggttacacattttatttggttatcaaaaagaagttgcaagaatatagactattagttaagaaaataaactcatttgaaatttcgttggataatgtattgatctcggcttaagactctctaatttgactgtatataattaataaataatcattctttactttttaaccataaacacaattcaatgttggactacatatccaccttacattctaagatcgattccaagtcattatcgacagcctgaatgaagcaaaacaactcaaaagaagcccacctaattcaaatcacaaaaacgttcaagttccatcgaaccaaaacttaaaccactctacgcaaccaaacttcaaccaaaaaaaaggataaattcggcgcatttttttgtatttgttgaccagtgaagaaaatgacaaactggtcaacgagatctgatcattaaactataaaacaatatattttaaagtaaatagaaatttgtggtgcttcattggatcgacgaaaggcgtcccgatattgaggttcgttacgccggcgaagattttcatcggaaacttatctgatcgtttacgccggcgaagatttccatcggaaacttaatctgatcggaaggaagaaggctcgatg

SEQ ID NO: 33561 - DNA, 3000 bp, Unknown; identical to SEQ ID NO: 3242
  misc_feature (1)..( 3000): 2750-1469P.txt file - cDNA_ID_3070924; gDNA_ID_1620634; Annot_ID_162804

SEQ ID NO: 33562 - DNA, 3003 bp, Unknown; identical to SEQ ID NO: 18943
  misc_feature (1)..( 3003): 2750-1469P.txt file - cDNA_ID_3070944; gDNA_ID_1620635; Annot_ID_162874

SEQ ID NO: 33563 - DNA, 3003 bp, Unknown; identical to SEQ ID NO: 18943
  misc_feature (1)..( 3003): 2750-1469P.txt file - cDNA_ID_3070944; gDNA_ID_2926178; Annot_ID_200027

SEQ ID NO: 33564 - DNA, 3000 bp, Unknown; identical to SEQ ID NO: 3254
  misc_feature (1)..( 3000): 2750-1469P.txt file - cDNA_ID_3070958; gDNA_ID_1620635; Annot_ID_162857

SEQ ID NO: 33565 - DNA, 3000 bp, Unknown; identical to SEQ ID NO: 3254
  misc_feature (1)..( 3000): 2750-1469P.txt file - cDNA_ID_3070958; gDNA_ID_2926178; Annot_ID_200011

SEQ ID NO: 33566 - DNA, 3003 bp, Unknown; identical to SEQ ID NO: 23878
  misc_feature (1)..( 3003): 2750-1469P.txt file - cDNA_ID_3070962; gDNA_ID_1620635; Annot_ID_162851

SEQ ID NO: 33567 - DNA, 3003 bp, Unknown
  misc_feature (1)..( 3003): 2750-1469P.txt file - cDNA_ID_3070966; gDNA_ID_1620635; Annot_ID_162849
tttactaaccgggggaccgtatatatacggacagctcatatgaattaaagttttatgggtgagtgatcctaaaaagaaaaagaagatgtaaagtttatgtactgaaaacacacatatatagatagactcattattgtaattaattattacatgatatccgttgacttggatggaatgcatcctaatgattcatctattaccttcaatgaggttgaagtatatatgctcaacgacaaaatgaatctgatcaacatcccgaacgattgtttctcctcccaaattatagctgtcaccataatgaacttattcatagtaattctgtagccacaccgacaatatatttcgatgtaaaaatctttgatccatcatatttgtcctaaaattatttctaatttatttcttatttttatttgttatctaaatatacctaatctcatagctctattaatattttgacgttaaatcattgtataataaataaattgatgtacgtaacatgttcaaatatatacatttattttcagtagacttttagacacacaatttatatgattagagtcgaatgcataaaatctcaaacgcgaaaaataagcggttaaacttttaaacacaaaataatataaaaattgagcggttaaatcccaattgcggcggttgaatagtaccgatcaaaccaaagattttggaatttgacggaacaaataaaccgtggagcattggtcaataacaacactctttactctttcttccgtttgctcgaaccatctagtctaagagaaagaaaaaatactaaagagaaagaagaagaggacttgaatacggaagcttgagagaatgaaagcgatcgtgatctcggagccaggtaagccggaggttctgcaactccgtgatgtggcagacccagaagttaaagacgatgaggttctcatcagagttctcgctactgctttgaatcgtgcagatactctccaaagacttggcctttataatccaccacctggctcaagcccttaccttggtctcgaatgttctgggaccattgaatccgtcggtaaaggcgtctctcgatggaaagtcggagaccaggtagatatatattcctgtgatttcgtttctggaaattagggactaatcctcaattttggttttagggtttggtgtctctgtgttaagttatccgagcttggatttaggatacagaacatttgaatacactgctcagtgctcacactcatgttcttaatgatttaggattcataacatctgaatttgaatgacttggtttctgtctagttgcaattcgtttacatttgtttagctgttgaggcttcttatatttttgtgttggattggatttagttttactctaggcttaagcaagtaaattacttttgaagtataaagttattgtcttggattacttctgactgtctttgtctcaggtgtgtgctcttctttctggaggaggttatgcagagaaagtttctgttcctgctggacaaattttcccaattcccgctggtatctctctaaaggatgcagcggctttccctgaagtggcatgcactgtttggtctactgtcttcatgatgggccgtctctctgttggtgaatcattcttggtatttcaacttctcttctctttttatgtataaaaacagtttctatggtctggtaaaagccaatccttttacggtcaattctagaggcttttatctattactttgctttgcatttgtcttctctcttgggctgttttgttttctttcttgtctatgtccttgctaatgtttgatagtatctgaaattttagattcatggaggttcaagtgggattgggacatttgctattcagatagctaaacatctgggagtgagagtatttgtcacagctggttggtctgagcttcaatatattgataacctttatgtacttttttccgaaattgttcaaattttcttttaactaacagggagtgatgaaaagctagctgcgtgcaaagaactcggggctgatgtttgtataaattacaaaaccgaggattttgttgcaaaggtaaaagcggaaaccgatgggaaaggagtggatgttatcttggactgcattggggcaccgtatttgcagaaaaatctcgacagcttaaactttgatggaaggttatgtattatcggtttaatgggaggagccaatgcagaaataaaactaagtagtctgcttccaaagcgtctcactgtcttaggtacttaacacaatcaatcaatcatctctcaaaatcaatactgagagtctgagacctattgataattcttgatctgttttgttcctacaggagctgcattaagaccaagaagccctgaaaacaaagcagttgttgtaagggaagtcgagaagaatgtctggccagcgatagaagcagggaaggtaaaaccagtgatttacaagtatttaccattgtcacaagcagcagaaggtcatagccttatggagagtagcaaccatattggtaagattctccttgagacttgattctctgcaaagggagaaatgttcagagacaagagtcatggtcaataatcaataaaatctggtcgattctgttcatagatatctctttacaagagttctgtttgttggcttttatgtatctctgatttggtcaaaaagacactgtaactatggaacatatatagtatcaaataagctgttgtataccaaacattgatttcgaagtagaatatgattttgtaagaagtttttatttattttgggcttaaaaagtgtatttatttttgttaattgtttgatttaataaggatttttaccacctgaggcaaagaccatgaatatcaaaggcaacaacagttttgacttctctcgttttcatcggtccgtttgtacttcttctgataaaaacaaaaattttgcaaaatctaacaacaaaatctttgattcgacaaactttgtaacaaaaaaaatcgaaactttgcaatttttacagaatg

SEQ ID NO: 33568 - DNA, 3003 bp, Unknown; identical to SEQ ID NO: 33567
  misc_feature (1)..( 3003): 2750-1469P.txt file - cDNA_ID_3070966; gDNA_ID_1620640; Annot_ID_163034

SEQ ID NO: 33569 - DNA, 3000 bp, Unknown; identical to SEQ ID NO: 3309
  misc_feature (1)..( 3000): 2750-1469P.txt file - cDNA_ID_3070980; gDNA_ID_1620637; Annot_ID_162950

SEQ ID NO: 33570 - DNA, 3000 bp, Unknown; identical to SEQ ID NO: 3309
  misc_feature (1)..( 3000): 2750-1469P.txt file - cDNA_ID_3070980; gDNA_ID_2926156; Annot_ID_198453

SEQ ID NO: 33571 - DNA, 606 bp, Unknown
  misc_feature (1)..( 606): 2750-1469P.txt file - cDNA_ID_3071019; gDNA_ID_1620639; Annot_ID_162996
ttcatttttcttctttgaatcgaaaatatacttctttaactcttttctttcttaggtatatatagatgaaatattcaagactttgatcgatgaagattaatgatctcttgaatgatacttttatagagatgcaaatttcattttggataggaattcatcatcacatagatattttactcaatacgtgttggccgacatcgtaaaagtaatatattcaattcgtaattgattaagagtcacacacacatggcaagtaagacgtcggtgtagtagtggttagcgaccgacgtaattttaacttatatgggcctgtgggcctttagatatgaaaggcccaataatgcatatcttttactaaactaaaaaacgatgtcgtttggtatgtttcttccacctttgttgttcatcttttgattttttgaaattgttagtaaagaaaggaaaaaagctttgatttcgatttctcaagctgtgtttttttatttttcttcttcgcatcaggaaggaattgaaaaaggtatgattttgaagctttagctctcatttatctctgaatcctaatgcttttttcatgctgttgtttcagatttttggtgttaaaagatg

SEQ ID NO: 33572 - DNA, 3000 bp, Unknown
  misc_feature (1)..( 3000): 2750-1469P.txt file - cDNA_ID_3071036; gDNA_ID_1620639; Annot_ID_47439
acgcgtgtgtatgattgacactgaagatctccttagtctttttctgaagaatttatatcttattattgttattatccaatctcatgtttattttacctcaaaaaatgttcgcgattcaaaatcaacaacgtttataaccatatagacaaaaaaaacagctggagggtttcaaaattaaaatgttgtgtttggttacaaaatattacacacatattcaacttttgatactaataacaaaatacttaaaaaaagacgaaactctatattaagaaaaaaagttttgggaggttcttctccgctaacatgctctttaaggatactctctgccaagtggctttggcatgctcattcttgctgacgtactccgagacaaaccctctccatcagtttgtttatggagaattttcctcacaactttctcatatgatcttatccgcaaatttgttatcgaaaaacccgaccgaccttttatttctcaccactttggacctcaattactcatttataataactttattttttatatgtaactacactatcttatagtgttcattacaaggaatccaaaaactccataatccggtcatttcggtgacggacatcaacggaaaagtcaccggaaaattggccggagtcacatatgtaaaattgagttccaacagttaactctccagagatcgaaccatcgtacgtggtctatatttataaacgtcaataattgttttttatataataaaagtgtcatggtaggttaaataatttacgccatattagtaattaattagtggctagtcaaattctgttccataaaatataatagtatgaacacacattattgtactgtattcatcaattgggactagttctttctgatgatcatatataaaggacagcagaaatcggacaaaatcagtgttattgtcttcatttatcatacgcacaaactaaaaaataaagtttggccgaaacgtgggtgttcctaatcccaaacatatatgaaaagcagagaatatactatatctactttaatcgttacattaatgttagtttaactaaaataggtttcttttgagaaaaaaaagtataaagtggtaggaaataatagaggttcataacttcatataattgaagcttatgatttgatatattggtttggttgttacacaagtatccgactttagatactacaaaacaattctaaaaaaaaaaacttcaacggaaagcgatattcttcaacaaatcaatcctacttaaaatatttaaaatgtaacaaaaaaaaattcgatacagcgttgatggaccgtaataccatatcgacacacaataatttcgagttgaattcacattattgatgcacacgttcatacccaaattaaattaaactaaaactaatgaatgatgcacgtatatagacttaaagacccgaatctctcgttaggtgaccggtgacccatgcaaccgaatgaatctaaatgggaccattagaccggtttggtccctacccatgcttagtcttattggccttcacgtgaggctccataagccaagcttcatgcaccccatccgccggaaattaaacctccggccacctaagcttgtctgctttctgattttgtcccaagtctctaatgtttgcacgtggacactttcttcctttcttctctccttcttcgccacgatttcatctccaattttccaaatctaccccttacattaaccaatctaaattactccttctaaattgcatgatgagggtatatttgtagtttcagtaagacaaataatattgcgtgagctgtgtcctgtctgattatgaacactagacgacaaaaacctaacgttacttgaagtttccgaatcacgaggctcactcattcttcttcttctttcttctatatatatataaagccccacgagtagtttgtatctctttcaaacacacagacgagatcttctctctatctttctctatctacaaactttctaaaagtcacgagtcaactcaacgagttacgtacaaagaagtactaaaacaatgggagcttgcgcttcacgtgaatctcggagaacagagacggcgaagctgatattaccagacggaacattacaagagttttcaacgccggtgaaagtgtggcagattcttcaaaagaatcctacaagctttgtttgtaactccgacgatatggatttcgacgacgccgttttagctgtccctggaagcgaggatcttcgaccaggagaattgtacttcgttttaccattaacatggcttaatcatccattgagagcagatgaaatggcggctttagcggttaaagcaagctctgcgcttgcgaaaagcggtggaggaggtttgagttacaacgatgaagatgttggtgagtgtagagttagaagagttaaaagaaacggttgcggcggaagaggttgtggtggtggtggtaaagggaggagaaagttcacggcggagttgagttcaatagctgagtagaggggttaaattggttagtcaatgtgtaaattttgtaaattgtaattagaaaatttgacttttacataatttttaccataaaaaatataaagttgatttcgttatttaatacaactaatacatagaaatgaccaaattgggagactttcacgtggatgaagtgttcaaaagctactaataaattgcatttagtcatttagtggtaaaaatatcaaatcctctctggcttttcttggtcaacaccgcgtaatggttacatgaaagacacagtgtacagttgcaaaaagtggggataaaagcccaaggcccattgttcctacgggcatagccgcatagggttgaaaaatgtagtcgctgtaagtaaggatgattttgttataataatatatttcaagggctttgattgcaaattagtttagatttcccgaccacataaatgttgctttgttttttcggttaggcaaattcgttgtggttaccaaaacgacgacgtggtgaagcaaatg

SEQ ID NO: 33573 - DNA, 3000 bp, Unknown; identical to SEQ ID NO: 33572
  misc_feature (1)..( 3000): 2750-1469P.txt file - cDNA_ID_3071036; gDNA_ID_1620639; Annot_ID_162977

SEQ ID NO: 33574 - DNA, 3000 bp, Unknown; identical to SEQ ID NO: 3313
  misc_feature (1)..( 3000): 2750-1469P.txt file - cDNA_ID_3071040; gDNA_ID_1620639; Annot_ID_162976

SEQ ID NO: 33575 - DNA, 3003 bp, Unknown; identical to SEQ ID NO: 23878
  misc_feature (1)..( 3003): 2750-1469P.txt file - cDNA_ID_3071047; gDNA_ID_1620640; Annot_ID_163036

SEQ ID NO: 33576 - DNA, 3003 bp, Unknown
  misc_feature (1)..( 3003): 2750-1469P.txt file - cDNA_ID_3071051; gDNA_ID_1620640; Annot_ID_163029
catctggtagtgataagacactcgtataccaaggacctgatagtaaacttgaaaatctggattggagagaaatgaaaggcccatttgtttcagtatggcttcataatgttccctggggtgctgagaacactttggctgctcctgacgctaaggtcagttaaacattttgaaaccacgaaaacacgatttttttggaatccttttgcgtttacttgctataaaatcttgaaagcttcatatggtctgattaacagttttctgatggcttcctggatttgattgtcatgaaagactgtcctaaactagccttgctatcacttatgacaaagttgagtgatggaacccatgtccaatcaccatatgcatcatatctgaaggtttgccatgcgaacccaattttatagttgtaatatttcatttgatgactttgatgtctcttttcgaaatgaatcggaattttatgattgactaaaaagcttacacgttggtttttactgttgaaaaggtgaaggcattcgtactggagccaggtgcacgcatagacgaaccagacaaggaaggaatcatagattcagatggagaagttttggcaagaggaagaaaatcgtacaaatgtgatcaaaaggctttgatgtcttacgacaagcttcaaataagtgttgatcaaggtttagccactctcttctctcctgaataattctgactgatacatgagatgtgatgagatgagatgaagttgtcccttgtggctataatttgattgatggacattacaatacaaaaaatgagaagatgattcgagttatatagtaaatccctaaagattaccattgagtgtattgtttattgttgtattgctgttgtattgcagttttgagttttttgttagaaagttgtgtgaactaagatattgagaagaccataaatactaaatgtgagatttttttgaactcttggtgtaaagtgtaaacatatttatgttgggggatggtagtcctaaagcttaaagctttgtggcaaatataaaatgaagattaatattgtcaactagcattagtgtgacaaaaagttgggagagattttatgaggcaagcaactaaaaaattgatgcgacatatcatataactaaaatgataaaatattgtccctggaatttaatttggacctaccatactaatgatgacttggcgttatacattgaatattttaattaaaaaaggaataaatatcatagaaaaagcggaaataaataagtaaagtaaatgttgtgagagagctttctttttcagagagtattttgtttagctgatgaggcaaaaacaaatagaagaaattaattacccgaaacaacaacacttcactatttctcctttctcagctgctttcaccattttctctttttctcctccatcaatctttctcacggttttctagggttttatatatgctttcctcttcatccatgtcatcgtcttcgttatctgctagattttgcttcaaccacgaatgttttgagttcaaactcgaccattgccgtcctggttggcgtctccgttctggcgatttcgtcgacctctgtgatcgttgcgcgtaagcaaccttttccgtacttcttttcttcgcttatttttactctccctgttccatttttttgagttgatcatttttttttttttcaagtgtgcttgtctttgattttggaaaacttacttggttgtttttttcctacttctttctttgtgtaatttgggtctgtcttagtaagatgtggcagcctgtggtaatttctgagtttttttgttgtttgctttgttttggagtatagagtccccatgtgttgactacaagccgagaaattaggagccactcttttcggatgttttggaattgtttaacagtgttgaatttaagtgactggaatatagagttttaagcattttgatgggcgtgtgaggactaattcgtttcacctgaattctttatgtggcatcgatgttgtgtaacaagtttagagtctagaggtccaaagtccaagtgacacgaaagagatagaagaagtgatactaggagacaaaataattaaagcaataggaagctactttgcattctgatccattagattcgagaatttgttcactagtggccggttttctgaatttttatattctgcttcatcaaagttagaaattagacacatgattagtttcttaggcttactatgatattttgtgaaataataaattgggtatggtaatggtttctatgtaaacaataaggtcaccttcatgggattgcaaagccttttgagtatcaggaattaactaggaatgagatacttttgctcttactacttcttgattgtaaacatgcatacatgtgttctgtctttgatgggtttatttttggaaaacatgtatcagtttgatgatataatcttcaataattttcgttcctgtatgtagatcttttcttaaaaatgctttgattctttaactatggatgcgtggagactatatagtgtatagtttccttaggcttctgtttttgttctgaaacataaacttcatcagagctgaaaaagtatagttaaagcttacaagttctagttgcattaggcattaaccaacacaaatagtctggtttttctttgtttgatttcagtactctgcagacacgattcttttacctgctctttgcatcaatttcattaacttgttagtgtattatcgattttgcaaatatctaatgattgtattctggttccagctctgcgtatgaacaaggaaagttttgtgacgtatttcaccaaagggcttctggatggaggtgttgtgagtcatgtggaaaggtaactatatgatttactagttaaaattttctatgtctccttggcatcccaaaatcatacatggggtttccagatgtgaagtctctcactaatagcatttcgtgcagcgaattcattgtggatgtattgcgtctgcttctgcttatacgttaatg

SEQ ID NO: 33577 - DNA, 3003 bp, Unknown; identical to SEQ ID NO: 19028
  misc_feature (1)..( 3003): 2750-1469P.txt file - cDNA_ID_3071059; gDNA_ID_1620640; Annot_ID_163019

SEQ ID NO: 33578 - DNA, 3003 bp, Unknown; identical to SEQ ID NO: 19030
  misc_feature (1)..( 3003): 2750-1469P.txt file - cDNA_ID_3071063; gDNA_ID_1620640; Annot_ID_163018

SEQ ID NO: 33579 - DNA, 3003 bp, Unknown
  misc_feature (1)..( 3003): 2750-1469P.txt file - cDNA_ID_3071066; gDNA_ID_1620640; Annot_ID_163017
tcatagcggatatattgagtaaaacctaaaagtttatatcttagttggcttcaataattaaacgaaaacaaaactaaagattggtggtatattttcgcatggcatgatgccatgatgtgaggaccattggccgcttatacgaaccactagtttttcgactcgtgttctctacgttattttaattttttttttttttaaactatcattattatatatttaaattatcttacttaagaaaagaaattcatttattttccttcactcatacatagtacgatttctaaatattgaatttcatgggccgaacatattattcacatagacagttatgcaaaaatctcataccttgactatataaactagctagagaatgacatagttataaactaataattgatcaaaaccttcaaattattgaaaataacaagatttgtgaataattaatttgcattgagagcaatagtcgtatgcatcactttcaaatcaataatattattaattacatatagctacggactaaatctaatgtaagcatcatgaaattatatcttaatatcttcttcttatcaatcgcaaattattaggaacatcacacatacttaaatatagctgcctgctctttataatcattgttaaggaaatcttataacctattttagcgatttttaatgaagattaatagtataaaccatccgtaatattagggttatgtctccgcgttagagattgaagaatctgtcgggtccaacgacaaatgaagtcgttacaaagtgcgaaattatgaagttgaaccaataacaaaatcagttaattacattaaaaagaataaggttgcagagtaggtaggtgttaatgctattataacatgtccaaaatctagcttggggtttgcttgcgcatgtatcatttgccacaacgagaagtccacgtgttagtacagttgaccaaatctcattagctgattagcgttttggagaattaattaatagactgattgtatacactcagtatatggactgcatgaaataatagtaataaaacttaatatgattatacaaaggattattaatctgtataaaaaactactatcttatggttagcacgaaatgatttctatcattaatttcggaaaaaaaagttgcgtacgttgattcaatggtaactggtagacagttgatgtaaaactttttttttaacagccgaacgcattcttatatacaacatactagtaactagtacttgagtttccttagaacatacaccattcttacaatagttttgttattagatgttcccgttttgtgtataatttgattcttcttctatatggtcttgtattgtggaaaacgattattggggagcaaagaaacatacaccaaaaaaaatatgatcaaaatttttagtgtgtggaacctttcgaaaaccctacgatgttcaagtaagaaattgcaattatatgagatattatatatatatgcaattgttcttagtatttaggtgtttagaatatatactttagaccgttttaagatgtttgttaaaagttagtcttcttctaattagaaacatcttcttttgtttttatgaagtaagtgataagatatacatataatttacctcgaccaagtttgaatacttgctaggttaccatgtcatgtttaatcgtccacatgagatatctgtgtgactgtgtcttcggttcgatgtggctaattttctagaacatgttatcaaaagcaaacgttgttgtaattggctgatactgaggaaaatgcagtttggcaatgacaagaaccacacatatatacaatattgatatctattgaataattatacaatattaaattcctttgcattattcatttgtttcgtataaactaaaacctttgaactctaaatagttgaaaggagcagagtcagcagacaaggaccaaagatcccttcgaccacacatataaaacgatataatttgatacgaaatcgtaatggttgtgcagttgatgttgccacttaagacacttacgtaagacttcatgcaaatataatttaatatacgtacctcttgaatttacgtgttagtttgattatatatatattggtcatttttttggtatttgctcgataatagagttgatgggaaaccttgataatattaaaaattatcatatgaattttggaggaaagacagcaacacactcgagaactctctggaaaattgcgttttcactttttttgttttccaggattagttgatctaaaatctataatatatattaataaatacaacctaataaacaaaaattatttatgtttcagttaatgtaacccattaatatagaagtaatctcgtaaatatggagttgattaaaaatatgtacttaatcaaattcatctatatatatatatatgtgtatatatatatatatatatatatatgaattatattacgatcaaattatcttagcttttaaaataaaatttttttatcttagctcttattcaaaagtctttattccatcacaaggttatgttatcttttgtatttttattttattttatacaaggacttccaagttccaacatttcaatttctaagtacatgcatatcttattaaatagtgatttaaatacacaaaaatatgaaataaattctaaacaaggtccactctataaaagaagaaaacccacaaattccaaagcccaaattaaaacaccaaaagagcccaaaatacaaactcattcttcaccactaaaatattccaaagcaaagcaacgaacataacggataagtgttatcctcatctagtcatcttcaccctctaactcaccgagaaagaaaagtaaagagagtttggtgtcactatgaacattgccattcataattaccgtcactcaaaattcatcgtaaatcctcacatagacaagacttttgcaaggactcgacaggcaagatcaaataatattacattcatgacaagtactcatggaagaagaagaacgatg

SEQ ID NO: 33580 - DNA, 3003 bp, Unknown; identical to SEQ ID NO: 33579
  misc_feature (1)..( 3003): 2750-1469P.txt file - cDNA_ID_3071066; gDNA_ID_2926178; Annot_ID_199989

SEQ ID NO: 33581 - DNA, 3003 bp, Unknown; identical to SEQ ID NO: 19084
  misc_feature (1)..( 3003): 2750-1469P.txt file - cDNA_ID_3071077; gDNA_ID_1620678; Annot_ID_164328

SEQ ID NO: 33582 - DNA, 3003 bp, Unknown; identical to SEQ ID NO: 19084
  misc_feature (1)..( 3003): 2750-1469P.txt file - cDNA_ID_3071077; gDNA_ID_1620643; Annot_ID_163100

SEQ ID NO: 33583 - DNA, 3003 bp, Unknown; identical to SEQ ID NO: 19084
  misc_feature (1)..( 3003): 2750-1469P.txt file - cDNA_ID_3071077; gDNA_ID_2926213; Annot_ID_202780

SEQ ID NO: 33584 - DNA, 3000 bp, Unknown; identical to SEQ ID NO: 23955
  misc_feature (1)..( 3000): 2750-1469P.txt file - cDNA_ID_3071096; gDNA_ID_1620714; Annot_ID_165551

SEQ ID NO: 33585 - DNA, 3000 bp, Unknown; identical to SEQ ID NO: 23955
  misc_feature (1)..( 3000): 2750-1469P.txt file - cDNA_ID_3071096; gDNA_ID_1620644; Annot_ID_163164

SEQ ID NO: 33586 - DNA, 3000 bp, Unknown; identical to SEQ ID NO: 23956
  misc_feature (1)..( 3000): 2750-1469P.txt file - cDNA_ID_3071096; gDNA_ID_2926217; Annot_ID_203062

SEQ ID NO: 33587 - DNA, 3000 bp, Unknown; identical to SEQ ID NO: 3386
  misc_feature (1)..( 3000): 2750-1469P.txt file - cDNA_ID_3071099; gDNA_ID_1620644; Annot_ID_47564

SEQ ID NO: 33588 - DNA, 3000 bp, Unknown; identical to SEQ ID NO: 3386
  misc_feature (1)..( 3000): 2750-1469P.txt file - cDNA_ID_3071099; gDNA_ID_1620644; Annot_ID_163163

SEQ ID NO: 33589 - DNA, 3000 bp, Unknown
  misc_feature (1)..( 3000): 2750-1469P.txt file - cDNA_ID_3071099; gDNA_ID_2926217; Annot_ID_142279
tttctttcctctatattcacgatcctgccattgtacacccaatcatacgctcctgagatcctcatgacttgttcttaccgtactccgcgagacatgcgattgatgattcttgactgtattcattgagaaaaactgttcgcaaaaaccttgagcttcatcatcgtccattactcacctttcagtttcagaatgcccaagcaaaaagctccaaggaagcagctcaagtcctataaactcaaacacatcaacaagagtattcaaggtacgtctgacttgttcatcctcaatttgaaattcgtggatattgaaagtgaatcgttcgatgttgttttgtggttaaaaagagggagatgctgtgttgatgcggtcgtcggagcctggaaaaccgtcgtacgtagcgagggtagaggcgatcgagacggacgcgcgtggatcgcacgcgaaagttcgtgtgaggtggtattatcgccctgaggaatctatcggagggaggagacaattccatggagccaaggaggtttttctctctgaccacttcgattttcaaagcgccgatacgattgaaggaaagtgtaaggttcacagtttcagtagctacaccaaacttgactctgttggaaacgacgacttcttctgtcgtttcgagtacaattccactaccggcgcgtttgatcctgacagagtcaccgtgtatgtgttcctacgactctctgttactttattcgagaagaaaatactgattgaatgatggaactattatcggttgaattgaggcttttttggaaattagattgtgttgctttagtgtaggcattgattgttaataattcattgatttgtcatctaaattggtttcatgaagttgtttttgcaaagagaagtaatcaattgagtttaaattgattttttctgtttgcaggttctgcaagtgtgagatgccgtataacccagatgacttgatggtgcaatgcgaggagtgttctgagtggtaagtgttcacttatttgaaactctgttttaatcttcttgagtcacaatctggaattgctcgtatgtttttcgtgtatccatgaggtcctagttgatatgctattgaggttgcttgagatgaatgcttttgtcatgctttacttcggtgatgctcttccttactcatgttcatgttttgtcttatctgatattgtggaaactgcagatgaataggaacataagctgatactctagtctgaacgtttgtaatatctgtgattaacattctaatgtatatgttgcggattttcaaattttcttacacgttactgattgagtcgctgttaaggtttgggtttttctgcagcttcttagtttgtgccttgggtctttcacccatgttagcttgctatatgacacaagtaacgtaaatgaagtcatactgaaacaaatagtgatcgtttgatcttggaagttggaactgttaagtgttaagcttaatctttttacttttttttttgtaaagagaggattaaggttttttgtttcgaatgtctttgtcagttgcctttgatgttacagcaaactaacattggctcaggtttcatccttcttgtataggaacaacaatagaggaagctaaaaagccagataacttctactgcgaagagtgttccccacaacagcagaatttgcacaactctaattcaacttccaataacagagatgctaaggtatttctctatttctcatttcagaaaatatctttagtttttgagggatggtcaaacccgttgcaaataggcttgaataaatttaaggtatttaagttgaccgttcgttccacatataaagctagccttgccaacaattgtaagctcttggactgataaaatataccaacttaaggcagaataaacacataaacccaaagtatatgtgtcattaaggtcaaagacaaccttgtgaaatgttttgtcctaactaacaggtgaatggaaagcgcagcctggaggtaactaaatcgaagaacaaacacactaagcgaccaggttaacataaacttgtaaaggctatagatatctggttggtgagtctgagtatcaatcgtgtaatctacaaaggtggttttgttttctttccctctctagttttttctttcttaaaaaatgagggtttaggtttgttggcttgattgttgtataatttatatgtatagcgtatggtggtttctcatctcctttagttgtcacatataaaatttgggtaaaatggtttgtttataataagaaaacaaaacaaacaaacaaacaaagagagtgttggttccttatttgtttgttttcattgtgaactctagaaacccttcattctttattagtttttcattctttattaattctaaaacgcatattcaaagagacatatttgatcatcgtgtcttcataatttggttcaaagtacagccaaaaaccaggaggtacactaaaaatcaataaaattacattacaaattatttttagtacactgggaacataaataaatgaatcagagaagagaaacatggcaactaccgatcatgagcttctacatttgtctcagaaaaagaggaagatagaactattttttaaagtttttagaaaagagagaattaatattatccaagacaacacggcactgctaacaacaagttgaacctatcccattccattactccatacccattcaatgattaacacgtggttctacatcattggttaactctctcctttccccttggataaggcatcttaaaataataataaataccataaatatcttccgattttttctccgactataataatgatgacaacaatatcttttaaaattatcttaaaagaaaccgaaagctaatctccaaagggaaaaagacgtgtagcagagacctatacatacacctatacattcacgttgcgtgtgataatctactgagggttctatctatattaatccttctctgcttccttcaatctaattgcaaatcaaatg

SEQ ID NO: 33590 - DNA, 3000 bp, Unknown; identical to SEQ ID NO: 33589
  misc_feature (1)..( 3000): 2750-1469P.txt file - cDNA_ID_3071099; gDNA_ID_2926217; Annot_ID_203061

SEQ ID NO: 33591 - DNA, 3003 bp, Unknown; identical to SEQ ID NO: 19095
  misc_feature (1)..( 3003): 2750-1469P.txt file - cDNA_ID_3071102; gDNA_ID_1620644; Annot_ID_163158

SEQ ID NO: 33592 - DNA, 3000 bp, Unknown; identical to SEQ ID NO: 3391
  misc_feature (1)..( 3000): 2750-1469P.txt file - cDNA_ID_3071108; gDNA_ID_1620644; Annot_ID_163150

SEQ ID NO: 33593 - DNA, 3003 bp, Unknown; identical to SEQ ID NO: 16295
  misc_feature (1)..( 3003): 2750-1469P.txt file - cDNA_ID_3071112; gDNA_ID_1620644; Annot_ID_163145

SEQ ID NO: 33594 - DNA, 2495 bp, Unknown; identical to SEQ ID NO: 4820
  misc_feature (1)..( 2495): 2750-1469P.txt file - cDNA_ID_3071116; gDNA_ID_1620734; Annot_ID_49457

SEQ ID NO: 33595 - DNA, 2495 bp, Unknown; identical to SEQ ID NO: 4820
  misc_feature (1)..( 2495): 2750-1469P.txt file - cDNA_ID_3071116; gDNA_ID_1620734; Annot_ID_166211

SEQ ID NO: 33596 - DNA, 3000 bp, Unknown; identical to SEQ ID NO: 3395
  misc_feature (1)..( 3000): 2750-1469P.txt file - cDNA_ID_3071116; gDNA_ID_1620644; Annot_ID_163141

SEQ ID NO: 33597 - DNA, 3000 bp, Unknown
  misc_feature (1)..( 3000): 2750-1469P.txt file - cDNA_ID_3071116; gDNA_ID_2926217; Annot_ID_142259
ctcttacttctcatgaaatccgtgtcttttgtttttctttgttactagtactactttagagtttacactgtcttgctcgtgtcaaaaaagaaaaaaaaaagtcgtcgtctctatcgagtttttttttactattctctctcgagaaaaaaaaaatcaaaggggagagaaaattgcggaggaaaaaagaaaagaaagagaaaatggctctgtgattctccaatttctatagagagagagagaagaagaagattgattagataagtttcttaattcaacgttgagagacagagagaaaaaaaaaaaaagattttgtcattcttcaaaatacgttctcgccatttgcgccattgattaattcaagtgcgttgaagttagaggtaaccaccaacttgcattttactctccaaagctctgatttttctgtcaaattcttttgaaaactttgatgcttgttttcttctcatcattgattcttttttgatgataggttagttctacacaaagcttgatcttttaggggttttctctagttattggagagtggtgagaattagaaactgcattatccgatctaaaaatgggtgatacagagaagtgtaacagtgatatgatccagagacttcattcatctttcggcactacttcttcttccattcccaaaaatcccatttctcagctcgatttaaaccctaatttcatccgctcatcagctcctcaattctccaagcctttcagtgacagtggcaaacgaatcggtgttcctccgtcgcaccccaacttaatcccaccgacttctccgttttctcagatcccgaccacccgacaacccggttcgcataattttaacccgggaggagctaatcattcacggtcaatgtcacagcccaactctttcttctcttttgactccttacctccgttaagcccttctccgtttcgagatcacgatgtttcaatggaggatagagattccggcgtgtttaacagcaaccattcgttgcctccatcgccgttcacgaggtgtaattcgacctcttctagctccttgagagtcggtgagagtttacctccgagaaagtctcatagacgctccaacagtgatatccccagtgggtttaattcgatgcctttgatccctccgagaccattggagaggtctttttctggtggggagtgtgctgattggtcaaagtctaatccttttgtgaagaaggaatcgagctgcgaaagggaaggtgtcggagagagagaagctatggatgatctcttctcagcatatatgaatcttgaaaacattgatgtgttgaactcctctgaagctgatgatagcaagaacggtaatgagaatagggatgatatggagagcagcagagcaagcgggaccaagactaacggtagtgatacggaaggagagagcagcagtgtcaatgagagtgccaataataatatgaattcttctggtgaaaagagagagagcgtgaagagaagagcggctggaggagatattgctcctaccaccagacattacaggagtgtttcagtggacagttgtttcatggagaagttgtcttttggtgatgaatctctaaagccgcctccttctcctggatctatgtcaaggaaagtttcccctaccaattcggttgatgggaactcgggtgctgcttttagcatcgagttcaataacggtgagtttactgcagcggaaatgaagaagatcatggcaaatgataaactagcagagatggccatgtctgaccctaaacgtgtcaaaaggtacaaatattgaatcttgactaacattaccggtttataatcaaatattctgatgtttaaggaatgatcctcttttcagaatcttagcgaaccgtcaatccgcagcacggtcaaaggagaggaagatgcggtacatagtagaattggaacacaaagtgcagactcttcagaccgaggctaccacattgtctgctcagctcacacttttgcaggtgcgttgtttacaatgttataaaagcgcctagattggtcaatttttgttttgttctaacgatcttagttactgcattatccagcgcgatatgatggggttgacaaatcagaacaatgagcttaagttccggcttcaagcaatggagcaacaagcgcgtcttcgcgatggtatacatttctcttcacattgtatcaaatttacgatattattaacatgactttaacaaaaaatggaaccagatcctatatgctttaaaaaaatctccatttttgcgcttaacgaatgtgaaatgacgatttttttcccccgctttgcagctctgaacgaagcactgaatggagaagtccagcgactgaaactggcaatcggtgagagcagtcagaacgaatcagagagatcaaagatgcaatcactcaacgctgagatgttccagcaactcaacatcagccagttaagacagcagccacaacagatgcagcaacagtctcatcagcagaaccaccagaatggaaccatggcaacaaaatctgaatcaaatgaatagagcagagaagttgttgcggtggatcaaagggttggagtttttcaacaagttacatatcaaatcaaacattatatttcatttatgtgcagagtcagttgaatttacatatatatcatataagtccaagaaatttaattttacaatatgttgttatcttagaaagaaaaaattcaatttatagtagatataggtatgaactatgaacacaagttatatgtaatgggattgattgagcttcagacaaaaagattctctgtttgttttgtttttagtttttaatttagtcttggattctgtctctttttgttggtttgtttattttaacattatgggccggtttttggcccattaaacagcatcccaaaacattgttgccttcttcgtctctctctgtgaataatatctaaaaccctaacaaacactatcactcacttcattttcgtgacgacggagcttgaccgctatg

SEQ ID NO: 33598 - DNA, 3000 bp, Unknown; identical to SEQ ID NO: 33597
  misc_feature (1)..( 3000): 2750-1469P.txt file - cDNA_ID_3071116; gDNA_ID_2926217; Annot_ID_203040

SEQ ID NO: 33599 - DNA, 3003 bp, Unknown; identical to SEQ ID NO: 19035
  misc_feature (1)..( 3003): 2750-1469P.txt file - cDNA_ID_3071141; gDNA_ID_1971811; Annot_ID_175762

SEQ ID NO: 33600 - DNA, 3003 bp, Unknown; identical to SEQ ID NO: 19035
  misc_feature (1)..( 3003): 2750-1469P.txt file - cDNA_ID_3071141; gDNA_ID_1620645; Annot_ID_163184

SEQ ID NO: 33601 - DNA, 3003 bp, Unknown; identical to SEQ ID NO: 19035
  misc_feature (1)..( 3003): 2750-1469P.txt file - cDNA_ID_3071141; gDNA_ID_2926175; Annot_ID_199787

SEQ ID NO: 33602 - DNA, 3003 bp, Unknown; identical to SEQ ID NO: 19038
  misc_feature (1)..( 3003): 2750-1469P.txt file - cDNA_ID_3071145; gDNA_ID_1620645; Annot_ID_163183

SEQ ID NO: 33603 - DNA, 3003 bp, Unknown
  misc_feature (1)..( 3003): 2750-1469P.txt file - cDNA_ID_3071158; gDNA_ID_1620646; Annot_ID_163256
tcactactcactatatatatatagaaaatgatatcaagagattcaagcattacaactaagcatatacaccacgagaaaatcaaggtttcgatgtttgttaaaataaattgatccataattcacgaatatttttcaagcttcaatctgaatttgtgttttttttaacgttaatccgaatttgttttgtgtggaaagttctcatgttttttcgatttttgtttttccggacgtggtaaatgtatggaaatgaggaaagatgttcaagaaactgtagaagcaataaaattatgggctgaactctacacaataaggcccttttcaaatagtcttcagctttatggaccaggctacacaaattcatcacatttgaagcaattggtccgatgagtttttttttcattcaatgaactttgtattgttttcgtagttgatttctatagtctcatttgcatttcctcgacaatgactttggcatgtgctcacttgatttgatgttgtgacttgtaaaatttatgtcacagtcataagttgtcatcagttgtgttgtgtatttatcgaaaagaaaacataaaactatggtttgagatagaattcatttggagctactaattaaactgaattggaagatatacattatacagagtatagaaaattcaatcgcatctttcgtttgtccttctcttatctttcagtgattttgatgcatcaacctacaaaaaatcgttaggatttacataattgaaaacttgtaacgttaatttaatcttttttgctacgtataactgtctgacttgattagctcaactactcatcaaaatttaagttttccatgtgatttataacaagtcttgttccaaagaagttaagatttcatgaaaatatatatacataaatagttaaaacttacaacagtaaccaacacactgaagttttttttctatataatgctcaattataaaatagatatacgttatttaaaataatccaatacaaggtcacgggatttcattccatggaataaagtctctctttcaatacattaaaaaagcaatactgattcttcctaataaccctcatttaccccacattgagttcatgtgtttttttttagttcacctatacaatacaaaagataagaaattatacgatatataaaatgtaaacgaatgaaactacatgaatgtgacaaagtaacataaaactacacgaatttatggtttccagtgtccggcgaattcatttattggtaagacgtaagagacaaattatatgattctaccattcaaattcaaatatcgttctaaactttgtataaaaacatatagaatgaaaaaccaagaaaaatctcgttctaaactttttttgtatcaaagatataatgaaaagatgaataaaatgggggaaaaaagttgatttaatatatcattgatgttctattctctgtcaagaacaagcgggcgtataagctattagccagattggatccacacatgatttcactttgagctttaagtagagtctcttttaaatgtgtattttactcattgattaacatgagaggaataatagttttcataagagtacaaaaaaataaagtatataacatgagaacaggccaaaaggtaacattatgctcgtggatttcatgagtggacaatactatcttttactctatgtagtctattattagtcgttttcacgaaactatcccacatttcttttgtccatctatatcctgtcgttttcctttttgctgctatatcattttttagaattctctcaaaatttacatttttttttgcaaaatacaaccttcacgtattcttttgtgtgttctaaattgtaactctgttttataaaacctcaatttgttttgtgtagttgaatttactagccaactaattaagccgagtgtttctaatcgtcaaatcatttttcagaaaaaagtcagccaacttactttctcaccaacaataagccaatttggttcttatatactcactcaatattcaactataatttacaaaatacttttactattatgaaaaaaactcatgcatagtgtcttcaatgtaagtatgtcctacaaaatgttttagagttggctggtcaataaatgatagattcagaattcgtaaagatgatgatatatagaaagagcttttacagtagcaagtacaaataattgataaccaaatgggtagaatttaactcgaagacgtggcagagaaggtgtactataaggaatttaagaacacaagtagaggattaacaaaagaagaaaaggctttggaaaaagcaaaacaaaactgatagcgaaagccaaatagcccaaaaagaacgcgagtcaaatgttgcctcccaaaatttactatttttttactctcatattaaaatcactctaaatatacatagaaaattgttctccaaaacattaaaatatgttgaaaaaataaaatgaaagcaaattccaaactcccaccgacaccaacacaaacacacaagtcagtaagtcagattcaattatcaaatatggtcaagaaattcaacaatctcatatcaatcacacaagataaagtataaaaagacttatataaatgattgaatcagtgatattaactactattaacaatcttgtcttatgagttaaatgaagtcttaaatacgttttaccaattaatgtgaatgaatctacggagaaacagaggtttttagtataataatcataaaataaacctgaattaaaatattatatactaaaaaatagtttctctctcttcataactcagagcaagcttggaatcaatctctcaatctctcactctctcactacctatccttttctttaatggcgatgtctctaactactactatccccaacacacactgttactcttcttcttcttctctgtcactgtctattctctcttttggacctttcatggctatgtttctctgcaatggaagtccaagctcgtgatcaccaacaccgacacgctaatg

SEQ ID NO: 33604 - DNA, 3000 bp, Unknown; identical to SEQ ID NO: 19127
  misc_feature (1)..( 3000): 2750-1469P.txt file - cDNA_ID_3071165; gDNA_ID_1620646; Annot_ID_163252

SEQ ID NO: 33605 - DNA, 3000 bp, Unknown; identical to SEQ ID NO: 19127
  misc_feature (1)..( 3000): 2750-1469P.txt file - cDNA_ID_3071165; gDNA_ID_2926179; Annot_ID_200093

SEQ ID NO: 33606 - DNA, 3000 bp, Unknown; identical to SEQ ID NO: 21188
  misc_feature (1)..( 3000): 2750-1469P.txt file - cDNA_ID_3071169; gDNA_ID_1620646; Annot_ID_163249

SEQ ID NO: 33607 - DNA, 3000 bp, Unknown; identical to SEQ ID NO: 21188
  misc_feature (1)..( 3000): 2750-1469P.txt file - cDNA_ID_3071169; gDNA_ID_2926179; Annot_ID_200091

SEQ ID NO: 33608 - DNA, 3000 bp, Unknown
  misc_feature (1)..( 3000): 2750-1469P.txt file - cDNA_ID_3071174; gDNA_ID_1620646; Annot_ID_163221
acttattttaagtaagtccactattataatgtttactatactaaatttaaatatcttaattaccgcttatccaacgaccaacatcaacaattttaaatttaagttatgatgtcaaaacttgacctacttatgagctgagaaatattgattaataatcttctttttgttttcttcacgtccactagactctattttattcctaaccgtgggagagctcggtcgagtcaatgagctgctaagtctaggtgggagagctcggttagcttttaggtctttgtttgctttattcaaaattgtacaaaggttaaaccgtacgatttctgtatggagtgagaacaattaaataattaatggttaagtttctatgtatctgtatctgtaaggagactcagaaagctcttgagcttgaacatcggagacaaagagaatactaaattgttcttgtacggttcccaatccgataaaattgtagacatcacataggtccaatatttaggataaaagacaaagatttgagacatcttagtgtactcatccatatttttggatcactaactaattactccagaaataattagtgatccaaaataccacataatttatttatttttagttgtaagaaagttgatttaaatttagtaaacatatcgaaacgttgattaattttacaattttctagatttcagtgttatgcataaatcattgaatggtacggacccaataaggttggtgtaggtaagatttcacttacaagttgagtttgtgatttcataacgcttttgtttgtttgtgtaattcagctgtagattagatgaagaacttaaaataaatagacaagaccactttagcaaacaaaaaaataaaaataaatagacaagtccatgcctattttcgtggtgcaaacgtcgctcgcaagtagacaattgttgggtcactatcatatcattgatatcaagcaaatattacttacgatcatttattcatctcatcgcttttgcatatctatttatgtgcaatattagacatttacatatgttcggtacttcggtattttagacggaataacggaaccagaggaaactaccgagagtttgagtaagtaataaaggctaaaaaagggtatagaaaatgtacatgtactttgactacgaatataagaaaaatgatatagtgattagtttttaactttcaatactctttgtctttttctatttgaatttagcaataaactaaagaagaaactgtttagaatgatataaaattggagacttttgcttgagttgtctaatttttaagataatctcatattacccatatgttattattaagcttaaatgcttaattatataaaaatgttaatttttagcaaaatttttattttttacaaaataaaaagctcgtcttgttcttattattatttttctctagcttctccaaatcctatttatttatttttctattttttatatttggcgaccgtaactctaattaatatttttgtaactcatttttatgtgacataaacatttcaacatcggttatatccactttttaatgctcctaaaagtatatttaggttaaactttgagtttgaatcgtttgtttacggtttcagattttgggttcattcatgaatttaattccaaaatttggtgacttctttgttgcagccattctagagacttttttttgttttgttttttatttggtgcaaaaccattctaaagacgcatgtgatgtttttagccaaatggcatacatcggttataattgacatgtcgatatactataaagtatccactcatatcttttgtttaatttttttagttctttccatagtttctgtaatatttcgcgatcatagctataaaattttaatcaaataaaatcttataatttgatcatctcatttatttttataaagtatatgatgctgtatggggcgcagtcactgaatctcaaatcttttacgtataaatcattactgttttattgataaagtaagctcagtctttcgcacgacatcaagattttatacgatatagagtttttggtaccacgatcgcaacgtataataagatagtactgtaactaacagtcacgtgatggaatttgaaattagttaaactctaaccaattaactatacgtacattttacacgtggtaaaacaaaactaaagcaagaagattcaattgtttcttttcttcacgcttgtgacactttataacccaatagtccttgtctttatagtttgattacttttgtccgttagtgttcaccttaattatggcgtttgtaaatttgcggagatggaaaagagtgaagtatctaatcttgacctacatgaaaatcatcaatccactataataaaatcctctagaccacacttaattagtcaaaatctaagtttaataagtgacatagttatgtttaaactaataaatattaatatatttgtcaattaatgtctatatatcaagaaaatattatggtcctaaatattaatttatagattttgtattgaatatatatttaatagtatttctttattagaatcatttcagttatgttctatgcaatgtgtctaaatattatattttattgcctctattacctatatagattttatttatataaatatatagtaattcacaatcgtgttttacttaatccctggatcccacccgcagtttcgtgtggccctcttcagtcttcactcatcagaccgaaagaaggaaaaaaaaagagagttaaaaagcataaaacccattttccaataagagttttctttttctcttcttcttacgtgtacgatcccaatctaacaacacaaaaagggttcagttttcttatctccattttgatcatgtcaaaaaccccacatgtccacccataattcctcctcagtctttttataaacaaaccattttcttgcttttgctcgcaaaactttaaccttaaaaaccaaaccaaaaaaaacaaactaaattaaacttatg

SEQ ID NO: 33609 - DNA, 3003 bp, Unknown; identical to SEQ ID NO: 22336
  misc_feature (1)..( 3003): 2750-1469P.txt file - cDNA_ID_3071183; gDNA_ID_1620647; Annot_ID_163299

SEQ ID NO: 33610 - DNA, 3003 bp, Unknown; identical to SEQ ID NO: 22336
  misc_feature (1)..( 3003): 2750-1469P.txt file - cDNA_ID_3071183; gDNA_ID_2926188; Annot_ID_200813

SEQ ID NO: 33611 - DNA, 3003 bp, Unknown; identical to SEQ ID NO: 19151
  misc_feature (1)..( 3003): 2750-1469P.txt file - cDNA_ID_3071196; gDNA_ID_1620647; Annot_ID_163280

SEQ ID NO: 33612 - DNA, 3003 bp, Unknown; identical to SEQ ID NO: 19151
  misc_feature (1)..( 3003): 2750-1469P.txt file - cDNA_ID_3071196; gDNA_ID_2926188; Annot_ID_200796

SEQ ID NO: 33613 - DNA, 3003 bp, Unknown; identical to SEQ ID NO: 19155
  misc_feature (1)..( 3003): 2750-1469P.txt file - cDNA_ID_3071199; gDNA_ID_1620647; Annot_ID_163275

SEQ ID NO: 33614 - DNA, 3003 bp, Unknown; identical to SEQ ID NO: 19155
  misc_feature (1)..( 3003): 2750-1469P.txt file - cDNA_ID_3071199; gDNA_ID_2926188; Annot_ID_200792

SEQ ID NO: 33615 - DNA, 3003 bp, Unknown
  misc_feature (1)..( 3003): 2750-1469P.txt file - cDNA_ID_3071205; gDNA_ID_1620628; Annot_ID_162575
ttggtgagaccttatggaccaaacctgatacattttctgcttgaactgattagattggatattaactgtaatccacctttaacagatgatgatgaaggaccagtatggaaactatgtggtgcagaagatattcgagacatgtacggctgatcagcgtttaacattgttcagccgagtgagaatgcatgcatctgcattgaagaaatacacatatgggaaacatattgttagtcgtttggaacagccctctattgaaggtatgaaattccccaatgtaagtcaagttcaaaagtgaggtgaataatcacaatctttaggaacaaaagggctttgctgttataccatataagctgaaacagggcgaagtacacaatcaaatatattttctatgctaaaaaatggtcggtgaatcgctcaagaatgacatgtcacatgtgcatatagaaatgtgtggtagcacaagactgaatagaataagatgggattggtagcacaagactgaatagaataagatgaggattggtatatggatcaggaagagttacacattgtgtttgttgtttctgcagaaaaccaagaattgaggagatgagtggctcttctgatttcaagacagtgggctgactcagattcactcaatacaattcgctttttcatgaaagctggatattcattgggaaggtcttagatgattgtgaaggacatcgatattgttgtttacttggaattttatcatagccgttgtgatgattgtgtggcatgttctgtaaatattcataactgtatcagtagtttacttcagatctgtaactggtttgtggaatttcacatggtattcgaaactttctagatactagagaatattattattgaagccaaacattacatgctaatcctgaaatagcctcctcttcctcaaatttcatgagctacagattcttatcacatttcaacactgttttgagactttctttcattcatctgacatgaggagccaaagtataggatcgaaagagaaacttgtcattactcacgaaatataattgaaagcagtgtagcatatcacacttgacaatggaagaaacaccccacacaaaaatggaaagctcaaaccaacacctccaaaatactatttcaatcttaaccaaagagatcgaatccgaagtctccttcttcctcttctgattcttctttcttcttctcatcttccttaggggcagctgcagcttcacccgcaccacctccacttgaggcagctcctccagcagagaatcctccaccaccaccaccaccaacaattacctacgccacaagaaattgattccaattgataaaaattacaatgcaaaacaggaattatacacaaatattgatttgtactagtttccggagccatgtaaactaaagtcacctactaaaacagagaaggcaaccaaaaacaaattgagtgatttagctattacaaagctgtaacctttaggtatcattgttaacctataaaacaagctacattgacgcaaaatcacatttgatgcaatgataagagaactatagtgagccatgacacttgtatcactgatcaacgaccataattactgtgaatgaatcattcatctgaaaatgcaagctctgattctcacacagtattgccaatttcaaagatgcacgatctcaaactgtaagcttgttcgagcaagagagacttatacctggaatacggcggaggtaggggagacaagagaaaacgaagactgaacgccaccggaggaatcagcggagagagatacctgaacgagcttacgctggagctcgtaggtagaagaagctgaagattcaagttctccttcgtgttgcttcgcgctccacgcgccgcctccattcttgcatacgaatgtgaatactcccatcttcttcaatgtctgctaaaatcgatggcgatagtgagagatttctggaaaaagtgacgatcgagagtggttttgtttttatatacgatgatgaacgaaagctcaaaaagaagttaagaaccctagttttttggaggtctctgagtaaaagactgttttacccatagtggacttataggtcttaaatgggccacttttgagagtaatgaatatatataggcctagagtgaatagcaacaacccaccaaggttctttcacttctttgaaaaaccaaaaaagcaaagatcaacaaaatttatcagattctacgagagtcatttcctaacacatgagatgatgagattattagagtatcacaactctcaactatgtttttccataaactatgcatcgcaccattcaccacatgatattgtaactcttaagtctaagccatgaaatcaacattgaagtaaaagaactcacatagtaaattggttttctattggtttatattttaacaaaattatactgtactcatgtcatctttatgtcaccaaatcacaaactaattttctacttttaaaacaaaacatctaccaattccaccacatatcctaaaaactgactcaaatctctcaaaatctaaaatttcctaaattccacaaaatcatccataatctttaatcctccttagttatgatatcaaaaaaccattttattttaagtatctaatttccttgccataaattttattctctagtttagctaaacttaattggaagtaaagtttattgttgctgatatataataaaatattttcatgtttaaaaatctaaatatagttgaatggactctttaacaagaaagtaaatattggcgtctataaggtcaagagatgtggcgtaatgactacttttgagcaaatcagtggacaaattaagactttccaatctttcattggtcaagtctaaatataaatgattggatttctaagtttcatttcctgtttttaggctcactcgtggactttttttaatttctttcctttgccatatttataaaataaaagagagagaaagaattttcaataattttcaacaagcaaagttcatg

SEQ ID NO: 33616 - DNA, 3003 bp, Unknown; identical to SEQ ID NO: 33615
  misc_feature (1)..( 3003): 2750-1469P.txt file - cDNA_ID_3071205; gDNA_ID_2926188; Annot_ID_200784

SEQ ID NO: 33617 - DNA, 3003 bp, Unknown; identical to SEQ ID NO: 19267
  misc_feature (1)..( 3003): 2750-1469P.txt file - cDNA_ID_3071232; gDNA_ID_1620648; Annot_ID_163362

SEQ ID NO: 33618 - DNA, 3000 bp, Unknown; identical to SEQ ID NO: 3486
  misc_feature (1)..( 3000): 2750-1469P.txt file - cDNA_ID_3071236; gDNA_ID_1620648; Annot_ID_163358

SEQ ID NO: 33619 - DNA, 3000 bp, Unknown; identical to SEQ ID NO: 3514
  misc_feature (1)..( 3000): 2750-1469P.txt file - cDNA_ID_3071240; gDNA_ID_1620648; Annot_ID_47679

SEQ ID NO: 33620 - DNA, 3000 bp, Unknown; identical to SEQ ID NO: 3487
  misc_feature (1)..( 3000): 2750-1469P.txt file - cDNA_ID_3071240; gDNA_ID_1620648; Annot_ID_163357

SEQ ID NO: 33621 - DNA, 3000 bp, Unknown; identical to SEQ ID NO: 3514
  misc_feature (1)..( 3000): 2750-1469P.txt file - cDNA_ID_3071240; gDNA_ID_2926215; Annot_ID_142163

SEQ ID NO: 33622 - DNA, 3000 bp, Unknown; identical to SEQ ID NO: 3514
  misc_feature (1)..( 3000): 2750-1469P.txt file - cDNA_ID_3071240; gDNA_ID_2926215; Annot_ID_202899

SEQ ID NO: 33623 - DNA, 3003 bp, Unknown
  misc_feature (1)..( 3003): 2750-1469P.txt file - cDNA_ID_3071244; gDNA_ID_1620648; Annot_ID_163355
gtctaatagcaacaaatgtgaagtatgaaaatgttaaaaataacatattgaaaaagccatacaaaattgaatctagcaatgttatagtctctaattttgccttgctccagaataatgatctaactccgtctctcactactgtattttctcctgttttcaggtagtgacggatctctaccgaatccatcagcagtcattgttggcatcgcacgttactgttatactggagatactctcatcaatctcatcacatgcccaccagttaaattctgatttgatattgcagaagaaagtgaggagagcgtgctctatcctggagctctctgaacctcccatgcttcatttcgaaaatgacacgtttcagaactacctggacattcttcaagccatagtgacaaataatccaggagtgtcgttggagctaaacgtagagtctcagctgatgacagtgtgtatgcaaatactgaagatgtacctgaaatgcactttgtttcagggtgatgagttggaagaaaccaggcagcccaaaaactggattctacccatgggagcagcctcgaaggaagaagcagcagcgagatctcccctagtggttgcagtgctgaaggctctgagggaactgaaaagagattcattcaagaggtatgcaccgaatttcttcccattgttggtggagcttgtgcggagcgagcacagctcttcacaagtcccacaagtcttaagcacagtgttccatacatgtatgggtgcaatgatggatgaataatagggtggttataagtgggttttgacattcgagcacctgaaggatattgattaacaagcagacacaaatcactcttttcttcttttgttttttcttctcgacggagatgcgagatttacaggttttgtgctgttgattgatagtgctgatataaagtaattgattactgtttgtagaaactaagaaaagaatggtgagattaggagggtcattgcattttgtctgcaatgcctattttcttccttccagtcgtgatcaatgtgcataatatactctcacacagctaaatgcggtccaagtaaggattgtgaaggatatattatataaaaagaaaaaagaaaagagaagacaaagatgagccactcgtggaaagtcatttatacctccttgaaatgaagtgatgatatctaatgactccaaagtcataataaagtcaccgaaagtgaatcatgatttgaagaagataaaggagtcaggagtggaactgctttccttggtatgtcattccgaagcgccaatacggaggagccacatcataagaggcaatggttttgccgcctttgagagtaacctcgaaagagagagactgtccgatgagatcgagagaggagtgccagttctgtccccagtttctggccattgggatccaagccgttgtgtggcccttcactttcacaccaaccacttccccgtcgaggcccacattgcttatcaacacctggaaaaagtgggagctcccgctcaagctgaatctcaacccgcctctccgcccacacttgaccctcctatactgtataggtatcatctcagctctggtttctgcgatccctgtgaaggcggcatgagatagttccaagtgttcctttgggaagttgcaccaacctccgtaatcggaggagagtcccgaattgggaggacagaaatcggtggcggtgaccaccacggaggggctgccttgaagacaccaacggatgtggttcacgcaccgcacttctagacaagctccgcagctgcttcccctgttgaacagcttcccgctcaggcctgcgctgtagccggcaaagctgctctgcctcagatctccatacccacaagcgcctcctatcagaaccaattagtctagttagtcctgatgaaagaagaaagaaaaataggggggagagagagaaaagagaaccagtagcgacggaggaggagccgtctctgtctctagaaagcgtggctgtggctatcttccagtcatcttcggcagtggcttgaaagaggcggcagagaatgaagaagaggcacaatgcgagttgctgaagcccagaatccatgaacaagaagtgttgttgggatcctcacagtcagtcacaggtggcagacaaaagtgatgcgtttgagagagttttgggggttccttttgatcatcaggctccgcttttcaagacttgtggggatgcgacaaaagattgctctgacatgttttgactttgacagtccgtttcagaccaattataataaaaaaacaaaaaagggaacaactatacgttttccaggcccatctcattcggaggcccactttcaatacgacacagaatcaagacaagagacgcaagacgaacttcttgagcccttttgttaattcaatgggccctcactaagaagcccataataaaataaaataagttctattttcaaacattgtactattactttttgtaccggccgtgtttattcaattctcgtatttgtaagaatttataaacaaaaagcaatgattaaaacatttacaatgacattatgacaatgaattcgaatgtacttttcaagtcactcgtaaaagaatataaattttttaagagataacataagacttttaaatcgataagtgaataacatagagtttgtcattttaatacaaatcactgccgataattagactgaaatggaagaaaatcagacggagacaatgatgtccttaaggggaagaagagtgaaatgaggtagcggtttgaggtggatgagaacatgtgtatacgatgatgactcttgtttgatgggacaaccgtgagtcgacttatccagcgtcccatctctatagacaaacacattttcgtcctcttccatgcgacgccactttctgttgttatctttggcacgttgcagcggcattcccctgcatcatcaacattcattatccatctagatgtaaatgagaaagtgggcatatatccacgtgtgtacctgacatg

SEQ ID NO: 33624 - DNA, 3003 bp, Unknown
  misc_feature (1)..( 3003): 2750-1469P.txt file - cDNA_ID_3071248; gDNA_ID_1620648; Annot_ID_163349
ctcgccgaggggaagggagctgctctctgctttgctttcagattttctttcacctctgactgaaactgtagcctacttactcttctcttccaactttttctactttcagtttataatggaaaggcccacttttaatctgttatggtttaaaatgaggcccacttttaatgtgttttaaaaataaggcctattaagttgcctttagcccgtttacttaatggtcttacgcagagtaacaaatcaattaggaaacagagcactagagcagcagtaggcactaggcaaggctggtaaaactaaactcgtgctgcttttgtctctgtttagtacagtatatcataaaactgagtaatccacaaaatcttgattgaaaaggagatggagacaatatgtgcttggaaactaagacaaaatacatgttaaataaagaatgggtgtgttaacaaggaagctaggctacaagtatccaagtagatggagaaagatacagaaaaagaagaagatagagagatacaaggtggaagaggagtgtgcattattgacattttgtgtaggaggagttggagccaatacaaatgatctgcagagagggcaagtgaggtggccacggagaagccaaggttctatgcaattgatatggaagagatgagcgcatctgggaagatgggtcaccgcatcctcagcctcaaactccaccaggcatatggggcagcaaatttcctcctccttttccttgtccccaaacatcactcccactaggttgtaaccgtcatcatcatgcgcatccgcatctccaccattcttcttcaacctccccaagggaatgcacacacatgtgtagaatactatggctgctgtgcacaaaggcgaccgcggaaacaacattgaaatcatctttctccagctttctgcttctttacctcattccttccctctcttttatagactaatatcatcgagtagggacggcgccgaccccacctcccatctcttattatattcttttgttgtttttctttaatcaagtcagcgattctcccaactccaagaaaactcttggagaggttatggtcaacatacgagatgcacatgcttccatcttaagcactacctgatacttgcatttaacaatagtaaacaatacaagaatcacatgacgccaaaagtaaacaaacaaaagatggcattcatatccagtgtattatttatatatatattaaaagtaaggagtcattcttccatcaagacaggccttgacttccgagttcacgaatataatacagccgaccaaatcaagtaaagatctccgagtgaatcataaaaactattttaatgttgactccacgcattttgtattcaatatagcgccagcttctacagaacagacctccacgtccctgagatcagcagtgcctttggaggatgatgtagttttatgcctggtgtatgtaaccaatgatactattgttcatatttgttcatgaagtcggccacatttgcaatagacagtcacatacatcattggtaatgactgataagcgtcaagcataatttgacaccctataccgccaacacaacgctattcattgaacttgcaatcaatattagaatgcatgaaaacagggaactacatctacaactacacatttttaaaggacataggaaaaaaaaaaaaactcgatacctgactccaagcagaaaaaggaagactcatattgattttcactttcaaggttgttattacaagtcaagaaaacatcttactgagacggcatacttaacagcactgcgtaagtaaatcagaagggtttctcggttggtttcttcttgaagatggcttcccaagccaaagacggaaatggagcccttttatccatgaactccttgacagccttaacattaacggcaaatcctttttggtttaaggtatcaatagcggactgggcttgttcaaccccctttactctgcacaaggcatcaaccaattcaacgaaagtggggacgttaggagagtgaccagactcaagcatctcactacagaaagcaacagcatcgtcaagcatgttgcaattatacaatccctgaaccaacacaccgtagctgaaggcattaggggcaatcccattgttctgcattttcctgaaaatcctcttagcgtcttcaattttatgagccttgcaaaaggcctcaacgacagcagtgtagataacgacctcagggattgtacccttgtcacgcatcaatccgaaaagcttcatggcctcttgtacaagcccatctttgcagaggccgtcaagcatggcgacggcgttagggatgagacctccttccttcatcttcttgaagatctcatcggaatcctcaggcggcggtaagggctcctgcgggtattgttccggtttgggggtttcccgtgaatcctgattgactccaagcttgaactgttcgaggaagccatcgtcagacagagtagtatcactctttccaaggttgtgggcttgtctagcgggtggttctctgtgagagttggaagatctctcccctcgcaagggtctgttgggtaagggctctggagggttctgctgctcgtctacttgaccattgtcgcccgttgagagaaagcgtgttgcggacatcgacggcgtcgtaacacgaatctgcttcgccatctgccttgcaaaaacgacggctttggaggaaggcaccatcgttatctgccgctgattcgaaaagttagggttttgcagattttgacggagagagaagaaggggagggtttagtcacgcgagaaggattgagggatataacagtcatttactctacagggggtataagaaagaaagaaggtcctcactcctccgtgtggataagcttctcactttcagttcaattggatagccggaaaggctctcctccaaggtaaattcctctctacttccttgttaaagctcgaatcatctctaagttaagcaaaattggtgtgttgtagtggcgtttatatg

SEQ ID NO: 33625 - DNA, 3000 bp, Unknown; identical to SEQ ID NO: 3479
  misc_feature (1)..( 3000): 2750-1469P.txt file - cDNA_ID_3071268; gDNA_ID_1620648; Annot_ID_163324

SEQ ID NO: 33626 - DNA, 3000 bp, Unknown; identical to SEQ ID NO: 3479
  misc_feature (1)..( 3000): 2750-1469P.txt file - cDNA_ID_3071268; gDNA_ID_2926214; Annot_ID_202850

SEQ ID NO: 33627 - DNA, 3000 bp, Unknown; identical to SEQ ID NO: 3480
  misc_feature (1)..( 3000): 2750-1469P.txt file - cDNA_ID_3071272; gDNA_ID_1620648; Annot_ID_163323

SEQ ID NO: 33628 - DNA, 3000 bp, Unknown; identical to SEQ ID NO: 3480
  misc_feature (1)..( 3000): 2750-1469P.txt file - cDNA_ID_3071272; gDNA_ID_2926214; Annot_ID_202849

SEQ ID NO: 33629 - DNA, 3000 bp, Unknown; identical to SEQ ID NO: 3473
  misc_feature (1)..( 3000): 2750-1469P.txt file - cDNA_ID_3071276; gDNA_ID_1620648; Annot_ID_163319

SEQ ID NO: 33630 - DNA, 3000 bp, Unknown
  misc_feature (1)..( 3000): 2750-1469P.txt file - cDNA_ID_3071301; gDNA_ID_1620649; Annot_ID_163409
tttgagattagatttcttctcaagacttgaaacacaaaagaagaagaagaagagcatttgatccacaagagtgattgagccgagccaaattattctccctgctgagatcggcagcgagaccactcttctagactctagacatgggatgcagagaaaccaactttttttatttaaacggctgcgttttaagtcatgttctcaaatgataccagttttttttttttttttttttttgctaagcacaagtttgatttgttgtttggcactttacgataacatcattttactcctatactttctcacggtaagtgattaagataaaaacatgcacatttttcgaattataagctaaatttaaagggatctattttctatctctcaataatttttaaattttactcattttctatttctcttataaattaattacttggtaatttagttttgtaatcgatactcaaaaatcgatatccaacaaaggacaatctctttgcggtcaatagtcttctcaaattacttcatacaattatcatactgtttggtaaaatttgtgaatctgcctcataaaatgtacgtggaaagtggaacaacagttaatgcttattttgaccacaagattgagaaaattttgaaaagagtatattgaccagttgctgacgttgcatgtcattctttaatgttgttgttgactgcaacaaaaaataaaatacaacatacaaagtaaaaaaataaaaataaattaattgatctttgtttctctattccccagagagctagcttttcagatctaaaatcagaatctgacggctgatatccctcgtgaaaaacaccccaaccgtccagatgcaactgcttgctgggccaatgatccattctctttcccgaaatggattaatcaatttaagccttatcacatgctggcccattttctaactcctcttttcttttttaacttacttttctttcttttaatattttagttgcagattcattttcgaaatcaacgaaatttatgtttttttaattttctgggtatcttaatcgcgagattttttattttaatatcacgctcgaatatacaattcggaatgtgcagatgttttttttgaaggcaatttagaaaaatagacaaaaatcgaacaaacatatatagaaatagagatctaaataaaaacatttattttatttcctcttggaaacaaggaaaaaatgaattggggtgggtgacgtggcagtcatacccttgccacacccttcctatacgcatataaacagcagctgcgaggagagagagatttcagagtattttctagggtttcgttttttttaaagatttagagaaaaaagtgagttattaagagattccaatcaaaatgagcggagacaacggcggtggtgagaggcgcaaaggctccgtcaagtggtttgatacccagaagggtttcggcttcatcactcctgacgacggtggcgacgatctcttcgttcaccagtcctccatcagatctgagggtttccgtagcctcgctgccgaagaagccgtagagttcgaggttgagatcgacaacaacaaccgtcccaaggccatcgatgtttctggacccgacggcgctcccgtccaaggaaacagcggtggtggttcatctggcggacgcggcggtttcggtggaggaagaggaggtggacgcggatctggaggtggatacggcggtggcggtggtggatacggaggaagaggaggtggtggtcgaggaggcagcgactgctacaagtgtggtgagcccggtcacatggcgagagactgttctgaaggcggtggaggttacggaggaggcggcggtggctacggaggtggaggcggatacggcggaggaggtggtggttacggaggtggtggccgtggaggtggtggcggcgggggaagctgctacagctgtggcgagtcgggacatttcgccagggattgcaccagcggtggacgttaaaaccaacgccggttacgcggtggagaagagtgagttggttatctcacaagtgatcggttctttctcccgccgccttctatctctctattatccactttttgcttattatgatggatctctatctttgttagttggttttttcttgatggtttcggattaggactcttcttttggttttgctacttatggttggttttatttatggtacttgtgatatgggtgaaatgctctacttgttgctctgtttcaagtgttcataatatgcgaacaaatattctgggttttgtttcagtcatctgaatgaatcgtaagatctggatacttaaatcttgagagatcatcgttttatggttgaattatttatggattatgtaacgattcccatagatacaaaatctatctgctcatgttttgcatttaatggcatttaagttccatggactggaaggaattgaatactaattgcagtctccatcattctcattattagactttttatcttcgatgtcgtttgtattttcaatcttttgtatatcttcagaaaatgtaatcttctcaacttctttccaccgtttcatcatgatcacactggcattttactgtagctcacacgattcggattggattaagtaaataaaagcagatatgggaagattttagatctgttgttgttgttgttaccttggaaatcggagtgctctctataaattatcaacttttatcatgtttgaactttcatggtccacaaccaaaataccacgtgcgcatcgctaaatggataaccgtaaaaccggttaattttcggttcaccaacccagtttggaactagaataatccggtttcggttttattgtttcaaagaaacagagaagctcttctcctctatcgactactctcactctctttctattctctcttccgccgctttttccatcgttcgaaagtaaagttgctcgctttactcgttcaagcattcaactttagaatccgatcgaatcctcctgtaacagcaatg

SEQ ID NO: 33631 - DNA, 3000 bp, Unknown; identical to SEQ ID NO: 3527
  misc_feature (1)..( 3000): 2750-1469P.txt file - cDNA_ID_3071309; gDNA_ID_1620649; Annot_ID_163402

SEQ ID NO: 33632 - DNA, 3000 bp, Unknown; identical to SEQ ID NO: 3527
  misc_feature (1)..( 3000): 2750-1469P.txt file - cDNA_ID_3071309; gDNA_ID_2926215; Annot_ID_202940

SEQ ID NO: 33633 - DNA, 3000 bp, Unknown; identical to SEQ ID NO: 3524
  misc_feature (1)..( 3000): 2750-1469P.txt file - cDNA_ID_3071317; gDNA_ID_1620649; Annot_ID_163399

SEQ ID NO: 33634 - DNA, 3000 bp, Unknown; identical to SEQ ID NO: 3524
  misc_feature (1)..( 3000): 2750-1469P.txt file - cDNA_ID_3071317; gDNA_ID_2926215; Annot_ID_202937

SEQ ID NO: 33635 - DNA, 3003 bp, Unknown; identical to SEQ ID NO: 19223
  misc_feature (1)..( 3003): 2750-1469P.txt file - cDNA_ID_3071326; gDNA_ID_1620649; Annot_ID_163387

SEQ ID NO: 33636 - DNA, 3003 bp, Unknown; identical to SEQ ID NO: 19223
  misc_feature (1)..( 3003): 2750-1469P.txt file - cDNA_ID_3071326; gDNA_ID_2926215; Annot_ID_202925

SEQ ID NO: 33637 - DNA, 43 bp, Unknown; identical to SEQ ID NO: 3516
  misc_feature (1)..( 43): 2750-1469P.txt file - cDNA_ID_3071330; gDNA_ID_1620649; Annot_ID_163384

SEQ ID NO: 33638 - DNA, 3003 bp, Unknown
  misc_feature (1)..( 3003): 2750-1469P.txt file - cDNA_ID_3071360; gDNA_ID_1620650; Annot_ID_163431
ttcagacgggtgagatgacgagctggttgagacgggcgatctgacgagttggtctttgtctctaagtgtcctcgcggaatcccccccctttgacaagacatgctattccgtatttatagccttctgcgtgtagggcactcctccagggttttgacgagcctaccctcttgacttaacattctgcttaggcctttgacttggatttgggccttgggccaagcaagcccaaatctaacccctaacagttgccccccaatcctgatgcactgttgatgacgtggatcaggatttcaagtgttcgactcttaaccgaaggaaacgaaaggtcgcgcatggggaaaacgcgatgtccagctttcttttgcatttttcgaggctccaatatctaggcgttgcatggccgttgtggcataggtgatcattacaacgctattcccataggcgtaatgagcttgtctcgggaattgcttatgcgtcttctataagtactgtcctcctttgatcgtttcacccttcaatcgctttagcagaggtacgagttctttctctcttttgtcttgttttgattcgttatttctttggtttcgatgtcgttgggttcgaattcttctcggctcgtccccggtcggactcatactggcgccctgggcgattcgtcgactcgatcggccaagtgtgaagacgacggctcgtcgttcgtctagaggtcgatctcgtcagaatttaggtacgcacttcatcaaatgagacttcacttctattacgatgctgtggcttatccgccgttgtcttttcctttgcttatagcgactcgttggaagatgggaaggataaacctagacgcgatccccaactactcgaggaaatacaaggagaagagagccgtttcggagactccgcagccgtctctttccgagggacaacagattgcagaagctacaaggagaagcctcttggatcaggtcggtcgtcgtgtgtttgagccgggatgttcgaatcctactggaatggcttctgagaagacgcgagaagaggttgaggttgtcgtcccttccgagatgcgaggcgatggtcaggttgcaaggagggagctcgtacttggtcttcagaattcgtctggcacgtttggtgcaaggagggttgctcctgaagtgggtcgtgcggatgcttctaaacgaccgcgggtaagcgaccatagatggggctttcgttacgacgatatggctgctccctttacttctaattctgtcgcttgtgctgagcttcttcgtgaaattggtcgtggctcgggtattccttcgatgcccttagacttgaaggaggagaaagttttcgccggagcggccaggaagtcgatcgaggtatgctcaccttctgggtttgattccaattttttctttgaattgcattcgcttgacacgctctttgtccaggcgatcgccgaatgggatcgtttgacttatttgtacgagcgttgtgttcggagcctttccgtagacgctactaacgcgaaagatgcccatgaggctttggccgttgaaaaggaaaaagtagctcaggcgctggccgacctggcaaggtctcaagacgacgccaaggagatgaagaggaaatatgacgagttagctggtcgcgctctttcggagatgaagaggcttcgagaacgtcgacttgaatatgctgaatttgtccggagatcggcccttgataagatggcggagctcgttcagaagcgattggatcgtattaaagctcatattgacgatacgaaggcggcagaaccaaagtttcttgaattcaaccaagtatctgggaatatcaagactctcgaggcgttggtcgaaggtggcgaagtggagatgaagtcggatgacatgatgttaagattggtagcggatgcagaggaattggaggccgaggtgaaagcttttggtatcaccgatcttatggacggcgacttcgatgttcgtactttatttgccgagctgagtcctgataatcgtaattccgttccaccgccgactgaaggggaagatctcgcggatggacgaggtgagtgcgaaggccaagctggtgaaagaatcgttggtcaaactgaagttcgagacgagatcgcggatgctagagactgatattccaggaggctaagccaaagggaagaagcggagctcagatgcctaaagagatcccaatatggcaaaacaaaaaatattctaaaaactgaataatcaacgaattttatattatgtgaccaaaaaatgaaaacagaaactatgtaacaatcatcaaatacagtgttttcagcatttatttttttctaaattttccagcaacatacaaacataacgttactactagacataaaaatactccctctgttccaagttatttgatggtttggatttttttatttgttccataagattgatgttttgtaaaaattaaatatgattattaatcttgtttgttgccaatagtgaaaggagagaggtaatagtaatattattaaactattaaaatagtaattaaaattaaatagaaaagttactttttcttaatttatgtgcgaaacttaaaacatcaaacttacagagagagtaatatataacatgatatgagatgaaactgtacggtgtcgttgcataattacataaactagttataaactcacacactgccttcatttcaggtcgagacagaacttattgtgtgatttaaatcagacaaaccttcgaactttgactttttcatcgcctcctgtcccttcgccgcaaaatactagtctaaacgctcaactcctctctcctgtcttataaacttttttttttagaaaatgagatgatcaatcgaattttgttgtgtgtgacctcaaactgacaacttccagtaattgtaatattaccaattttttttatcaaaaagatgaacttcactttagagcaatagcaatccctcgagtctcccctatataaagattccaactccttaacgattcatctaatg

SEQ ID NO: 33639 - DNA, 3003 bp, Unknown; identical to SEQ ID NO: 33638
  misc_feature (1)..( 3003): 2750-1469P.txt file - cDNA_ID_3071360; gDNA_ID_2926176; Annot_ID_199879

SEQ ID NO: 33640 - DNA, 1245 bp, Unknown
  misc_feature (1)..( 1245): 2750-1469P.txt file - cDNA_ID_3071370; gDNA_ID_1620650; Annot_ID_47710
aaccaagtatctgggaatatcaagactctcgaggcgttggtcgaaggtggcgaagtggagatgaagtcggatgacacgatgttaagattggtagcggatacagaggaattggaggccgaggtgaaagcttttggtatcaccgatcttatggacggcgacttcgatgttcgtactttatttgccgagctgagtcctgataatcgtaattccgttccaccgccgactaaaggggaagatctcgcggatggacgaggtgagtgcgaaggccaagctggtgaaagaatcgttggtcaaactgaagttcgagacgagatcgcggatgctagagactgatattccaggaggctaagccaaagggaagaagcggagctcagatgcctaaagagatcccaatatggcaaaacaaaaaatattctaaaaactgaataatcaacgaattttatattatgtgaccaaaaaatgaaaacagaaactatgtaacaatcatcaaatacagtgttttcagcatttatttttttctaaattttccagcaacatacaaacataacgttactactagacataaaaatactccctctgttccaagttatttgatggtttggatttttttatttgttccataagattgatgttttgtaaaaattaaatatgattattaatcttgtttgttgccaatagtgaaaggagagaggtaatagtaatattattaaactattaaaatagtaattaaaattaaatagaaaagttactttttcttaatttatgtgcgaaacttaaaacatcaaacttacagagagagtaatatataacatgatatgagatgaaactgtacggtgtcgttgcataattacataaactagttataaactcacacactgccttcatttcaggtcgagacagaacttattgtgtgatttaaatcagacaaaccttcgaactttgactttttcatcgcctcctgtcccttcgccgcaaaatactagtctaaacgctcaactcctctctcctgtcttataaacttttttttttagaaaatgagatgatcaatcgaattttgttgtgtgtgacctcaaactgacaacttccagtaattgtaatattaccaatttttttataaaaaagatgaacttcactttagagcaatagcaatccctcgagtctcccctatataaagattccaactccttaacgattcatctaatgaaaaaacacacacaccaaaaatatcagatatctcaaacaatg

SEQ ID NO: 33641 - DNA, 1203 bp, Unknown
  misc_feature (1)..( 1203): 2750-1469P.txt file - cDNA_ID_3071370; gDNA_ID_1620650; Annot_ID_163427
aaccaagtatctgggaatatcaagactctcgaggcgttggtcgaaggtggcgaagtggagatgaagtcggatgacacgatgttaagattggtagcggatacagaggaattggaggccgaggtgaaagcttttggtatcaccgatcttatggacggcgacttcgatgttcgtactttatttgccgagctgagtcctgataatcgtaattccgttccaccgccgactaaaggggaagatctcgcggatggacgaggtgagtgcgaaggccaagctggtgaaagaatcgttggtcaaactgaagttcgagacgagatcgcggatgctagagactgatattccaggaggctaagccaaagggaagaagcggagctcagatgcctaaagagatcccaatatggcaaaacaaaaaatattctaaaaactgaataatcaacgaattttatattatgtgaccaaaaaatgaaaacagaaactatgtaacaatcatcaaatacagtgttttcagcatttatttttttctaaattttccagcaacatacaaacataacgttactactagacataaaaatactccctctgttccaagttatttgatggtttggatttttttatttgttccataagattgatgttttgtaaaaattaaatatgattattaatcttgtttgttgccaatagtgaaaggagagaggtaatagtaatattattaaactattaaaatagtaattaaaattaaatagaaaagttactttttcttaatttatgtgcgaaacttaaaacatcaaacttacagagagagtaatatataacatgatatgagatgaaactgtacggtgtcgttgcataattacataaactagttataaactcacacactgccttcatttcaggtcgagacagaacttattgtgtgatttaaatcagacaaaccttcgaactttgactttttcatcgcctcctgtcccttcgccgcaaaatactagtctaaacgctcaactcctctctcctgtcttataaacttttttttttagaaaatgagatgatcaatcgaattttgttgtgtgtgacctcaaactgacaacttccagtaattgtaatattaccaatttttttataaaaaagatgaacttcactttagagcaatagcaatccctcgagtctcccctatataaagattccaactccttaacgattcatctaatg

SEQ ID NO: 33642 - DNA, 3003 bp, Unknown
  misc_feature (1)..( 3003): 2750-1469P.txt file - cDNA_ID_3071370; gDNA_ID_2926176; Annot_ID_140343
tgttccagtgtcgcggcgactcctactggtccaagtgccccccttgcattagcaccgccgtctctggggtaattgtgacttcaatattataaattagcagtcatatagttacatgtaaaaattacgatgagcacacacgtcggttaattttttctgtcaaatcttaaatatgtgggcaatgatcctgatactttatataaatgattgaattgagacaaaactgatagacattaaaggctagttaaaaaatactgattaaacaatgcaatattgttcttgatatatatatgtacgtatatgtatgtgacagcttcgtaggagatgtccaagaaataagggagcaataatatggtatgaccaatgtcttttaaagatatcttcagttgcctccttcaataagatagattatgagaacgatttctatttgtccaacccaaacaacatgagtgatcgggggttgttcaacaaggagacgtcggctctcctggagaagctggcatataaagcctccgatagaaacaacttggatggtaaacaattggtgttgtacgcagcaggggagaagagaattgggacaaagaaggtgtatgcaatggtgcagtgtacgaaagacttaatatttacaaagtgctttgagtgtttggaagggattttgaggaagtttccacagtgttgtgacggtaaacgaggagggagagttttcggtacgagctgtaactttaggtatgagttatatccttttcttagaaactaacagcaacaacagtacaatgagagctccatattaaatgaaagggttctagagataaacagtcttataatatacactgtgttgcattttagtacgtgaacttgagcgaataaatgtactttcctctttgtgatttttgttttttttttgtgaacttgagttattaagaggaaatcttcaagtaaagaatttatctaatagtatatacatcccacatagaataccaaatagctcagctcatacaaactctctcataatgagagaaaaaaatcctgaaataagggtaagaaaaactcttatgcctcaaggttttagtaaatctcataattttggccgaaccacaaaaagagacgtgcgaaacaaaatagtagaaaattgatttcccgaatcgacaaacatggactaaactatatgtatgatacataactggtcgtacttacaatgatgatacttggtttcacgaagacgagggagcctggagatgaatgatggtgataaggccatgtgtcatcaccaaaaggagggttgctcctgaagttttcgccggagcggccaggaagtcgatcgaggtatgctcaccttctgggtttgattccaattttttctttgaattgcattcgcttgacacgctctttgtccaggcgatcgccgaatgggatcgtttgacttatttgtacgagcgttgtgttcggagcctttccgtagaggctactaacgcgaaagatgcccatgaggctttggccgttgaaaaggaaaaagtagctcaggcgctggccgacctggcaaggtctcaagacgacgccaaggagatgaagaggaaatatgacgagttagctggtcgcgctctttcggagatgaagaggcttcgagaacgtcgacttgaatatgctgaatttgtccggagatcggcccttgataagatggcggagctcgttcagaagcgattggatcgtattaaagctcatattgacgatacgaaggcggcagaaccaaagtttcttgaattcaaccaagtatctgggaatatcaagactctcgaggcgttggtcgaaggtggcgaagtggagatgaagtcggatgacacgatgttaagattggtagcggatacagaggaattggaggccgaggtgaaagcttttggtatcaccgatcttatggacggcgacttcgatgttcgtactttatttgccgagctgagtcctgataatcgtaattccgttccaccgccgactaaaggggaagatctcgcggatggacgaggtgagtgcgaaggccaagctggtgaaagaatcgttggtcaaactgaagttcgagacgagatcgcggatgctagagactgatattccaggaggctaagccaaagggaagaagcggagctcagatgcctaaagagatcccaatatggcaaaacaaaaaatattctaaaaactgaataatcaacgaattttatattatgtgaccaaaaaatgaaaacagaaactatgtaacaatcatcaaatacagtgttttcagcatttatttttttctaaattttccagcaacatacaaacataacgttactactagacataaaaatactccctctgttccaagttatttgatggtttggatttttttatttgttccataagattgatgttttgtaaaaattaaatatgattattaatcttgtttgttgccaatagtgaaaggagagaggtaatagtaatattattaaactattaaaatagtaattaaaattaaatagaaaagttactttttcttaatttatgtgcgaaacttaaaacatcaaacttacagagagagtaatatataacatgatatgagatgaaactgtacggtgtcgttgcataattacataaactagttataaactcacacactgccttcatttcaggtcgagacagaacttattgtgtgatttaaatcagacaaaccttcgaactttgactttttcatcgcctcctgtcccttcgccgcaaaatactagtctaaacgctcaactcctctctcctgtcttataaacttttttttttagaaaatgagatgatcaatcgaattttgttgtgtgtgacctcaaactgacaacttccagtaattgtaatattaccaatttttttataaaaaagatgaacttcactttagagcaatagcaatccctcgagtctcccctatataaagattccaactccttaacgattcatctaatgaaaaaacacacacaccaaaaatatcagatatctcaaacaatg

SEQ ID NO: 33643 - DNA, 3003 bp, Unknown
  misc_feature (1)..( 3003): 2750-1469P.txt file - cDNA_ID_3071370; gDNA_ID_2926176; Annot_ID_199875
gctacaccgaagaaggtgaggatcccaataacgtctttgtcatgttccagtgtcgcggcgactcctactggtccaagtgccccccttgcattagcaccgccgtctctggggtaattgtgacttcaatattataaattagcagtcatatagttacatgtaaaaattacgatgagcacacacgtcggttaattttttctgtcaaatcttaaatatgtgggcaatgatcctgatactttatataaatgattgaattgagacaaaactgatagacattaaaggctagttaaaaaatactgattaaacaatgcaatattgttcttgatatatatatgtacgtatatgtatgtgacagcttcgtaggagatgtccaagaaataagggagcaataatatggtatgaccaatgtcttttaaagatatcttcagttgcctccttcaataagatagattatgagaacgatttctatttgtccaacccaaacaacatgagtgatcgggggttgttcaacaaggagacgtcggctctcctggagaagctggcatataaagcctccgatagaaacaacttggatggtaaacaattggtgttgtacgcagcaggggagaagagaattgggacaaagaaggtgtatgcaatggtgcagtgtacgaaagacttaatatttacaaagtgctttgagtgtttggaagggattttgaggaagtttccacagtgttgtgacggtaaacgaggagggagagttttcggtacgagctgtaactttaggtatgagttatatccttttcttagaaactaacagcaacaacagtacaatgagagctccatattaaatgaaagggttctagagataaacagtcttataatatacactgtgttgcattttagtacgtgaacttgagcgaataaatgtactttcctctttgtgatttttgttttttttttgtgaacttgagttattaagaggaaatcttcaagtaaagaatttatctaatagtatatacatcccacatagaataccaaatagctcagctcatacaaactctctcataatgagagaaaaaaatcctgaaataagggtaagaaaaactcttatgcctcaaggttttagtaaatctcataattttggccgaaccacaaaaagagacgtgcgaaacaaaatagtagaaaattgatttcccgaatcgacaaacatggactaaactatatgtatgatacataactggtcgtacttacaatgatgatacttggtttcacgaagacgagggagcctggagatgaatgatggtgataaggccatgtgtcatcaccaaaaggagggttgctcctgaagttttcgccggagcggccaggaagtcgatcgaggtatgctcaccttctgggtttgattccaattttttctttgaattgcattcgcttgacacgctctttgtccaggcgatcgccgaatgggatcgtttgacttatttgtacgagcgttgtgttcggagcctttccgtagaggctactaacgcgaaagatgcccatgaggctttggccgttgaaaaggaaaaagtagctcaggcgctggccgacctggcaaggtctcaagacgacgccaaggagatgaagaggaaatatgacgagttagctggtcgcgctctttcggagatgaagaggcttcgagaacgtcgacttgaatatgctgaatttgtccggagatcggcccttgataagatggcggagctcgttcagaagcgattggatcgtattaaagctcatattgacgatacgaaggcggcagaaccaaagtttcttgaattcaaccaagtatctgggaatatcaagactctcgaggcgttggtcgaaggtggcgaagtggagatgaagtcggatgacacgatgttaagattggtagcggatacagaggaattggaggccgaggtgaaagcttttggtatcaccgatcttatggacggcgacttcgatgttcgtactttatttgccgagctgagtcctgataatcgtaattccgttccaccgccgactaaaggggaagatctcgcggatggacgaggtgagtgcgaaggccaagctggtgaaagaatcgttggtcaaactgaagttcgagacgagatcgcggatgctagagactgatattccaggaggctaagccaaagggaagaagcggagctcagatgcctaaagagatcccaatatggcaaaacaaaaaatattctaaaaactgaataatcaacgaattttatattatgtgaccaaaaaatgaaaacagaaactatgtaacaatcatcaaatacagtgttttcagcatttatttttttctaaattttccagcaacatacaaacataacgttactactagacataaaaatactccctctgttccaagttatttgatggtttggatttttttatttgttccataagattgatgttttgtaaaaattaaatatgattattaatcttgtttgttgccaatagtgaaaggagagaggtaatagtaatattattaaactattaaaatagtaattaaaattaaatagaaaagttactttttcttaatttatgtgcgaaacttaaaacatcaaacttacagagagagtaatatataacatgatatgagatgaaactgtacggtgtcgttgcataattacataaactagttataaactcacacactgccttcatttcaggtcgagacagaacttattgtgtgatttaaatcagacaaaccttcgaactttgactttttcatcgcctcctgtcccttcgccgcaaaatactagtctaaacgctcaactcctctctcctgtcttataaacttttttttttagaaaatgagatgatcaatcgaattttgttgtgtgtgacctcaaactgacaacttccagtaattgtaatattaccaatttttttataaaaaagatgaacttcactttagagcaatagcaatccctcgagtctcccctatataaagattccaactccttaacgattcatctaatg

SEQ ID NO: 33644 - DNA, 3000 bp, Unknown; identical to SEQ ID NO: 3555
  misc_feature (1)..( 3000): 2750-1469P.txt file - cDNA_ID_3071384; gDNA_ID_1620651; Annot_ID_163471

SEQ ID NO: 33645 - DNA, 3000 bp, Unknown; identical to SEQ ID NO: 3555
  misc_feature (1)..( 3000): 2750-1469P.txt file - cDNA_ID_3071384; gDNA_ID_2926182; Annot_ID_200315

SEQ ID NO: 33646 - DNA, 3000 bp, Unknown; identical to SEQ ID NO: 3554
  misc_feature (1)..( 3000): 2750-1469P.txt file - cDNA_ID_3071392; gDNA_ID_1620651; Annot_ID_163469

SEQ ID NO: 33647 - DNA, 3000 bp, Unknown; identical to SEQ ID NO: 3554
  misc_feature (1)..( 3000): 2750-1469P.txt file - cDNA_ID_3071392; gDNA_ID_2926182; Annot_ID_200313

SEQ ID NO: 33648 - DNA, 3000 bp, Unknown; identical to SEQ ID NO: 3562
  misc_feature (1)..( 3000): 2750-1469P.txt file - cDNA_ID_3071400; gDNA_ID_1620651; Annot_ID_163467

SEQ ID NO: 33649 - DNA, 3000 bp, Unknown; identical to SEQ ID NO: 3562
  misc_feature (1)..( 3000): 2750-1469P.txt file - cDNA_ID_3071400; gDNA_ID_2926182; Annot_ID_200311

SEQ ID NO: 33650 - DNA, 3000 bp, Unknown; identical to SEQ ID NO: 3563
  misc_feature (1)..( 3000): 2750-1469P.txt file - cDNA_ID_3071404; gDNA_ID_1620651; Annot_ID_163466

SEQ ID NO: 33651 - DNA, 3003 bp, Unknown; identical to SEQ ID NO: 19245
  misc_feature (1)..( 3003): 2750-1469P.txt file - cDNA_ID_3071412; gDNA_ID_1620651; Annot_ID_163463

SEQ ID NO: 33652 - DNA, 3003 bp, Unknown; identical to SEQ ID NO: 19245
  misc_feature (1)..( 3003): 2750-1469P.txt file - cDNA_ID_3071412; gDNA_ID_2926181; Annot_ID_200296

SEQ ID NO: 33653 - DNA, 3003 bp, Unknown; identical to SEQ ID NO: 19247
  misc_feature (1)..( 3003): 2750-1469P.txt file - cDNA_ID_3071414; gDNA_ID_1620651; Annot_ID_163461

SEQ ID NO: 33654 - DNA, 3003 bp, Unknown; identical to SEQ ID NO: 19247
  misc_feature (1)..( 3003): 2750-1469P.txt file - cDNA_ID_3071414; gDNA_ID_2926181; Annot_ID_200294

SEQ ID NO: 33655 - DNA, 3003 bp, Unknown; identical to SEQ ID NO: 19249
  misc_feature (1)..( 3003): 2750-1469P.txt file - cDNA_ID_3071418; gDNA_ID_1620651; Annot_ID_163460

SEQ ID NO: 33656 - DNA, 3003 bp, Unknown; identical to SEQ ID NO: 19249
  misc_feature (1)..( 3003): 2750-1469P.txt file - cDNA_ID_3071418; gDNA_ID_2926181; Annot_ID_200293

SEQ ID NO: 33657 - DNA, 3003 bp, Unknown
  misc_feature (1)..( 3003): 2750-1469P.txt file - cDNA_ID_3071426; gDNA_ID_1620649; Annot_ID_47689
ttaagtaaggaaaccatcggaagaaagcaaaattagtgatgcggcaagcaagaaaaaaaaacaaaaggatttatgcggcagattccaactggttcgtattcgctaccaaaaaaaaggaaactttaccttgcaagatgttggaagcaactcaagttgagcaagaaaatgaatgaagagaaggatctcaagaggacggaggagatgtgggcgtggaatttcagagcttgtagatctactacgactacggatggatcaaccaaacacaaaatttatacttttatataaaaatgaacaccgatttttattattattaaattaaatataagcgagcggatgaggaagaagaagaccaattgacaaaaaaaaaaactttttaagaagaaaaaaaaatggttatcccctcagaaactaatgatctttctttcaatgtctggaaacagtgaacaatgaaggtaaaagagagagagagagagaggtcaagtcgccgaacgagacatcctccttcgacgtttttatgtaaaaaaaagaaagaaagttggagttgttttttttatcttctctctttatctctctctatagtcttaagactaagagtgattcttaccagacaagacccataaaagaccaacgatggcgaggtcggagccagcacatcaaaggtcccagctttcgggctccacttccctctcgtccttttttgcctcattagatggacaacaccaaacagtggcaaagaataatattacagtttttttagggaagaaaataaaatagttgatattattgatataataattcattcaagtctcctctttattttaaaaatattcaactcttttactttagacattatcataaactggggtcaaacggaagatttttcttcaacgtttaataaaatctcttaacacaaatcaaagaagagtaaaaatatacggtttcgataaaatttggttatgtggcggtgttacatgactacgactgataaaactacacgagtacttttgtttttctgtcaccaagatttatttcttttacttactccatgtgtttttttctttcttcgttaaaactactcctcgtaaattataatcaagattttaagcagtgtgcatataaaataaaatacatgtacagtctagaaataatatatgtggattcatgaatctttcatttttaatttccccacacaatttgtatcaaacgtttaatgcccataaaagtggtggtccaggaccctgagattaaaattttaaaaaaatatatagagaagaggcttgggcttgaagaatgaaaaattgaataacaaatatttaaaaaaatttgggacccgaaagtgattgggataaagtgagatatgtcactttacctaacattatttaattttatattaatgtatgtaccactaaatttggcccttttctccccatcgactctttgtagttatttatacttttgtagtaccaataatagaagaatcaactataaaaatttcagctcaataaagaaaaacagaactatgaattaagtgagaaactcaaaagcctgcttctaaaacatgaatacgtccacgataattatcactaagttctagataatctaattttgcgggaccaaattgatgtatatgcgaactttttcatacttttttcaccaacaaatgtatatacttcccatcatgcatgctcccatggtatctcgccgagtgtcaatatatgtgaacttacataaccaaaaattgatttataaagataacaataataagggagacctaaaaatagagaaaagggtggtgtggactgtggagaaggtccctacttacagaacatagcttccatcaatcacacaaaaatccaaccactctgaacctttcacttcaggaccaacttcgttatccaatcatctcccaatatgccaatactttcacttatatatgaacgtgtatatataaacccttcacatttacttcacaaaaatatcttttaaaaaaagatcataatcacaactactaagctagaattttttagtaaatttactactacggtaattataaacaaattatataggtttcttaaatagtagaacttaaaatataatgcaaagttatgtacgaatactatcttttaattaaaaataacgataagaatgttaaaaaagaaaaaaaaaaaatcatgttgatgatatatatgttgaagtaaaatttagttattaggtttaggtatacgtcaatcattcatgatacatggatcccaaacccataatatatcatgcatcgatctctgaaaatcaccaaagcaaaaaaaacccatgtaacatgatatactatattatgcatcatttcgccaatgtaacttctctgatgccctgaacctatttcacatatgactcatgggaaagaccgacaaagggatcgtattacccaaatatggttacgataacatccactgaatatcactcaaaatgaattattgtctcttactagatatattacggctagttgatgatttgtttgaaaagtttaatcttacaaaattattaatagatttgatgctgctcaaagtggtctcttttatttgcaccgcaaaaagccagtatatatccccattagaaaagacgtgacaaagtgtttaatagatcctttatgttttcctcggacccatgcatatataagtgtatttaaatcttttataaggtttttatagccataaataaacaaatttagttcaaaataagaataattaagtaattggaatagcgagacacgttccttgagatgataacacgagcatatattcttcatcacttttgtttgcttcatatcatatacgctaacttatgtgtgtgtgtaatatatgatctcagaactaacaagtaagaagaagaagaatgtcggagagtttcaaagtgtgcttctgttgcagcagaagctttaaggagaaaacgaggcagccaccagtgagcatcaagagactcttcgaagcttactcaagaaacggcaagatg

SEQ ID NO: 33658 - DNA, 3003 bp, Unknown; identical to SEQ ID NO: 33657
  misc_feature (1)..( 3003): 2750-1469P.txt file - cDNA_ID_3071426; gDNA_ID_1620649; Annot_ID_163394

SEQ ID NO: 33659 - DNA, 3003 bp, Unknown
  misc_feature (1)..( 3003): 2750-1469P.txt file - cDNA_ID_3071426; gDNA_ID_1620652; Annot_ID_163512
tcaattgttatgagtggcaatagaaatgaatctgtaggagattatagtgagactgattagtctagtgattgaacaatctaagaaacttgatgcaacattgaaaagttaacatctttaagtaaggaaaccatcggaagaaagcaaaattagtgatgcggcaagcaagaaaaaaaaacaaaaggatttatgcggcagattccaactggttcgtattcgctaccaaaaaaaaggaaactttaccttgcaagatgttggaagcaactcaagttgagcaagaaaatgaatgaagagaaggatctcaagaggacggaggagatgtgggcgtggaatttcagagcttgtagatctactacgactacggatggatcaaccaaacacaaaatttatacttttatataaaaatgaacaccgatttttattattattaaattaaatataagcgagcggatgaggaagaagaagaccaattgacaaaaaaaaaaactttttaagaagaaaaaaaaatggttatcccctcagaaactaatgatctttctttcaatgtctggaaacagtgaacaatgaaggtaaaagagagagagagagagaggtcaagtcgccgaacgagacatcctccttcgacgtttttatgtaaaaaaaagaaagaaagttggagttgttttttttatcttctctctttatctctctctatagtcttaagactaagagtgattcttaccagacaagacccataaaagaccaacgatggcgaggtcggagccagcacatcaaaggtcccagctttcgggctccacttccctctcgtccttttttgcctcattagatggacaacaccaaacagtggcaaagaataatattacagtttttttagggaagaaaataaaatagttgatattattgatataataattcattcaagtctcctctttattttaaaaatattcaactcttttactttagacattatcataaactggggtcaaacggaagatttttcttcaacgtttaataaaatctcttaacacaaatcaaagaagagtaaaaatatacggtttcgataaaatttggttatgtggcggtgttacatgactacgactgataaaactacacgagtacttttgtttttctgtcaccaagatttatttcttttacttactccatgtgtttttttctttcttcgttaaaactactcctcgtaaattataatcaagattttaagcagtgtgcatataaaataaaatacatgtacagtctagaaataatatatgtggattcatgaatctttcatttttaatttccccacacaatttgtatcaaacgtttaatgcccataaaagtggtggtccaggaccctgagattaaaattttaaaaaaatatatagagaagaggcttgggcttgaagaatgaaaaattgaataacaaatatttaaaaaaatttgggacccgaaagtgattgggataaagtgagatatgtcactttacctaacattatttaattttatattaatgtatgtaccactaaatttggcccttttctccccatcgactctttgtagttatttatacttttgtagtaccaataatagaagaatcaactataaaaatttcagctcaataaagaaaaacagaactatgaattaagtgagaaactcaaaagcctgcttctaaaacatgaatacgtccacgataattatcactaagttctagataatctaattttgcgggaccaaattgatgtatatgcgaactttttcatacttttttcaccaacaaatgtatatacttcccatcatgcatgctcccatggtatctcgccgagtgtcaatatatgtgaacttacataaccaaaaattgatttataaagataacaataataagggagacctaaaaatagagaaaagggtggtgtggactgtggagaaggtccctacttacagaacatagcttccatcaatcacacaaaaatccaaccactctgaacctttcacttcaggaccaacttcgttatccaatcatctcccaatatgccaatactttcacttatatatgaacgtgtatatataaacccttcacatttacttcacaaaaatatcttttaaaaaaagatcataatcacaactactaagctagaattttttagtaaatttactactacggtaattataaacaaattatataggtttcttaaatagtagaacttaaaatataatgcaaagttatgtacgaatactatcttttaattaaaaataacgataagaatgttaaaaaagaaaaaaaaaaaatcatgttgatgatatatatgttgaagtaaaatttagttattaggtttaggtatacgtcaatcattcatgatacatggatcccaaacccataatatatcatgcatcgatctctgaaaatcaccaaagcaaaaaaaacccatgtaacatgatatactatattatgcatcatttcgccaatgtaacttctctgatgccctgaacctatttcacatatgactcatgggaaagaccgacaaagggatcgtattacccaaatatggttacgataacatccactgaatatcactcaaaatgaattattgtctcttactagatatattacggctagttgatgatttgtttgaaaagtttaatcttacaaaattattaatagatttgatgctgctcaaagtggtctcttttatttgcaccgcaaaaagccagtatatatccccattagaaaagacgtgacaaagtgtttaatagatcctttatgttttcctcggacccatgcatatataagtgtatttaaatcttttataaggtttttatagccataaataaacaaatttagttcaaaataagaataattaagtaattggaatagcgagacacgttccttgagatgataacacgagcatatattcttcatcacttttgtttgcttcatatcatatacgctaacttatgtgtgtgtgtaatatatgatctcagaactaacaagtaagaagaagaagaatg

SEQ ID NO: 33660 - DNA, 3003 bp, Unknown; identical to SEQ ID NO: 33657
  misc_feature (1)..( 3003): 2750-1469P.txt file - cDNA_ID_3071426; gDNA_ID_2926215; Annot_ID_142192

SEQ ID NO: 33661 - DNA, 3003 bp, Unknown; identical to SEQ ID NO: 33657
  misc_feature (1)..( 3003): 2750-1469P.txt file - cDNA_ID_3071426; gDNA_ID_2926215; Annot_ID_202932

SEQ ID NO: 33662 - DNA, 3003 bp, Unknown; identical to SEQ ID NO: 19251
  misc_feature (1)..( 3003): 2750-1469P.txt file - cDNA_ID_3071430; gDNA_ID_1620652; Annot_ID_163502

SEQ ID NO: 33663 - DNA, 3003 bp, Unknown; identical to SEQ ID NO: 19251
  misc_feature (1)..( 3003): 2750-1469P.txt file - cDNA_ID_3071430; gDNA_ID_2926215; Annot_ID_202922

SEQ ID NO: 33664 - DNA, 3000 bp, Unknown; identical to SEQ ID NO: 3594
  misc_feature (1)..( 3000): 2750-1469P.txt file - cDNA_ID_3071434; gDNA_ID_1620652; Annot_ID_163498

SEQ ID NO: 33665 - DNA, 3000 bp, Unknown; identical to SEQ ID NO: 3594
  misc_feature (1)..( 3000): 2750-1469P.txt file - cDNA_ID_3071434; gDNA_ID_2926215; Annot_ID_202918

SEQ ID NO: 33666 - DNA, 3000 bp, Unknown; identical to SEQ ID NO: 3576
  misc_feature (1)..( 3000): 2750-1469P.txt file - cDNA_ID_3071442; gDNA_ID_1620652; Annot_ID_163493

SEQ ID NO: 33667 - DNA, 3003 bp, Unknown; identical to SEQ ID NO: 21092
  misc_feature (1)..( 3003): 2750-1469P.txt file - cDNA_ID_3071446; gDNA_ID_1620652; Annot_ID_163490

SEQ ID NO: 33668 - DNA, 3003 bp, Unknown; identical to SEQ ID NO: 21092
  misc_feature (1)..( 3003): 2750-1469P.txt file - cDNA_ID_3071446; gDNA_ID_2926215; Annot_ID_202910

SEQ ID NO: 33669 - DNA, 3003 bp, Unknown; identical to SEQ ID NO: 19269
  misc_feature (1)..( 3003): 2750-1469P.txt file - cDNA_ID_3071453; gDNA_ID_1620652; Annot_ID_163482

SEQ ID NO: 33670 - DNA, 3003 bp, Unknown; identical to SEQ ID NO: 19269
  misc_feature (1)..( 3003): 2750-1469P.txt file - cDNA_ID_3071453; gDNA_ID_2926215; Annot_ID_202903

SEQ ID NO: 33671 - DNA, 3000 bp, Unknown; identical to SEQ ID NO: 3486
  misc_feature (1)..( 3000): 2750-1469P.txt file - cDNA_ID_3071457; gDNA_ID_1620652; Annot_ID_163479

SEQ ID NO: 33672 - DNA, 3003 bp, Unknown; identical to SEQ ID NO: 19290
  misc_feature (1)..( 3003): 2750-1469P.txt file - cDNA_ID_3071473; gDNA_ID_1620653; Annot_ID_163550

SEQ ID NO: 33673 - DNA, 3003 bp, Unknown; identical to SEQ ID NO: 19292
  misc_feature (1)..( 3003): 2750-1469P.txt file - cDNA_ID_3071477; gDNA_ID_1620653; Annot_ID_163549

SEQ ID NO: 33674 - DNA, 3000 bp, Unknown; identical to SEQ ID NO: 19293
  misc_feature (1)..( 3000): 2750-1469P.txt file - cDNA_ID_3071477; gDNA_ID_2926185; Annot_ID_200577

SEQ ID NO: 33675 - DNA, 3003 bp, Unknown
  misc_feature (1)..( 3003): 2750-1469P.txt file - cDNA_ID_3071489; gDNA_ID_1620653; Annot_ID_163543
cggctaggaaaatgatagagtacattgaactcaacacgattggggtttcaaaggactcacagcttagagtagccaaggttcttaaggttgtgtcagacagttgtgggaatgtaacgggcaaatctttctttgaccatagttatgatgctatgtatgagaggtggaaactattgaaacaagcagcaaaggatactaaacgtttcagtgttcctgatttcgtctctcaacgttgcaatttctttggcagggtctttgagccacaaccaggtacgtataaagaaaaacaaaagtagaaatgattgtagaaccacttcttttgtttttcatttggtttggtgtgttttgtgcagcatttgcatggtttaagtgtgaagaagggatagtggattgtgagaagtttcttagagaggagaagaagattctaactaaaagtggaaagtacttcggagatgagctaagtaatgtgaggataagcatgttggatagagatactaactttaatattttccttcacaggattacatcttcctttaattcaactttgtaagtgcatatgcatgtgattatgatcgattgtcataacttgcaacaagtgttttgctccataaatattattggaaatttgaataatgtgaaggatcaatcaaagacctattcatcaaaccatctctgatgatatgaatgagcaaacattcattcactacgacacaaccgagagtttgttcaagcgttgtcagcattttggtctggaactttgtaatctcgaaggatcagatccaacatctcatagctttttcagtattaaattccagccttaggtaatccttcagagtcatatcaacatttttgctacggaaggatcattgtcgctaccttccattttacatttgtgtcagctttattcacagcaccgttttttagccgcatcaactttctttctttgtataattcagaagaatgaaatcatccaaaatcatttatatttcataacaaaaatgttttaaaaaagttgaacataaaaaaaaaaaaaaaaaattccaaaacaccaactaaactctcaaaaataccaaattgtgaaagttttcaaaatataatctcttgtcactcattcatcatactctaaaagtttaactttcatggtttgtatgtgaaaaaataaattaaaacattaaaataaagcttttagaaactaatatgtatccacaatatacatatggatgaggacaatggtggatgtgcacaaccacacaaaaaccattcacgtgattgtatctgcaaaattcatcatcaactttctcctgactacgccacatcatatttgtttgtggaactattccatcgtcaaacggccgttcgtcttttgtctttttccacaaatctactagctcccttctctatcaacttgatcgtctacataactctacttgtctttttccctattcacaaattagtctttttcttgagattagtaattattttgaggccaacttgatcagaatctgagtttgaattccaattatacccattcttgaatcttaattgcatgttatatttgtttccaaacctattcatatccttactcaaaacaccatgtttgttgttttcactttgtttgatgcatagctcataaaacatcagcgacacaatttcttcacacaaaaagataaaagggtttataaccaagatataagtttcaaaaccttcaccataagcaagaagcataacaacttcaacttgtatacatttttttctagttttgtactaactagatatagagacacaaaaagagagaaaacatgattaagagttggaattaatgataagttgtaaatatatctcacataaaacgtgtttgaattccattttaaggataaatgatagtacttcagatcttaaatgaatttgttgcaacttgcaccatgatttctttcaaaccaaaaaacaggtctagaccgggtggtccacagatttttggctcacaggaatattcctacatataacactacaactgtacaacatacatatagagcagtagatagtaaattataccgaataaaaaaatctagttacatttcaagtcacacgaactgttagaacggttcatgttaggctcagcatatttctaagtaataaattttgaaatcgaaaaggcttttctaagtatagccggactgaattactatatgagtcgtggacttaccggtccgacggtgaacaactattggttccgagaatggtatttctgcgttcagaattctgtgagtacggattaataatatatttatactgtcaattgtcaaagagccgatttccgatttaagaaactaatttgtttgataatgaacacaaacaagaaaccaaaattaaggccggatttatacccatgacacgttatctctacgtccaatgctcttgccatttgctgtgatccgtaagttcccaaagacactttttctttcaccacagtcccacttttgatctttttttttacagtaaagtcagaactcagaagtaccttgaacaaaaccctaaacgcacttttaatattaatcactctcaaaccaccatttaattattgtaaatcatatactccaatggaacatactttttttactgtacttttcatcaaactctaaaaaggttatggcttatgggtgttctttttggatgaaactatctatatatgaatattattctaaaacaaacaaaaaaaaacgtaaaaagttgagactcccttttattaagcggcagggtttgttgaccacactctcatcatctatctctttcttatcttcactgttttatcttttctttcggattaaattaaataattttttcctccataatttatactcttaactctcatgaattattggtctctctattatagttttttaagtaacaatctaattgtagtacggatgtctcttgagatgttcaagaattaagaaataaagaaagagggatcggagaatgaattttgaggatcaagaagaagatatg

SEQ ID NO: 33676 - DNA, 3000 bp, Unknown; identical to SEQ ID NO: 3603
  misc_feature (1)..( 3000): 2750-1469P.txt file - cDNA_ID_3071501; gDNA_ID_1620653; Annot_ID_163539

SEQ ID NO: 33677 - DNA, 3003 bp, Unknown; identical to SEQ ID NO: 19298
  misc_feature (1)..( 3003): 2750-1469P.txt file - cDNA_ID_3071501; gDNA_ID_2926186; Annot_ID_200612

SEQ ID NO: 33678 - DNA, 3000 bp, Unknown; identical to SEQ ID NO: 4062
  misc_feature (1)..( 3000): 2750-1469P.txt file - cDNA_ID_3071510; gDNA_ID_1620681; Annot_ID_164438

SEQ ID NO: 33679 - DNA, 3003 bp, Unknown
  misc_feature (1)..( 3003): 2750-1469P.txt file - cDNA_ID_3071510; gDNA_ID_1620653; Annot_ID_163526
gacaaaacacatatgttggtttagaaaaacttcaagttgcatttcttcttttagccaatcgcactatcttccgtgaaaaggtaaataatatatagctttatgacaatttcacaaaaatggttcgttagttttgacttagcattaagatttttttccagaaatctaagtattggtaaaataattctatatctactactaggtcaaaatacaattctatattatttaaaaaattgtaactgaggtaattgatcaaattaccaaaatgatgaaagagctagttaagaatttaacaatgtacaagttttagtgaaatggtcaaaactaaatatccattcttttggcccgttagcatcattaaaccaaccactcaatggagacatggaagatcaaaattcgtcaaccctagcgctttgtttctctacaaggatcaagtatggaacaacaacaaccacaagaaatcgaaatgtgctaaggtcgcatgagttcgctaggaataagtctataacatttcgttttgtcaacaaaataagattttagtatatatattatttacaattttaccagacttccattgtcaacaaatgacattattgttgttgtcgaagaaaaaacaaaggtgacactatttgctgttttactttttatttcatgaggacggaggacccatttttttaatttagtttaaaagagcaaccgtatcagttgattacggagtccagcagagaaaagcatgctcaactgtcaaaaacaacctaacaattagggaatcccgtaaaaccggcaaatcacgagggcagcattacattacattacattacatgtcccacaaatcactttccctcccatgcttttccacttccacctatcattaccaacacctattacctaaaggactttaagccagagagttttcaaatcccgtaccgtgattggtgcactatgaagtggaaaggaatacgatgaaaaacaaactgttttctcaatacattttcaccgacaccaatcatgaagcaaatagctgcaattaattttttctacgttttaagacaagaatatatattaaactacttattttcttctacatcttaattaagtagttagtattcttacaaacacttctgattatcatttttgtgttcaatatataaactcctttctatttaaaaaattccctcaacactataatatcattcagtccctatctaaaagttaggtgtccatagagatatacggatattgaaatttaaatgatatatggcggagatcatgcaaggacaattatcttcaatagaatcattacgacttattaaatgtgtgttcccgacattttattacatgattctactgttttctttctcatcatctcattccattatttgtttttctatttgtgtttctagattacttgacatgtacgttaaatcatttatcttccttttcccttgatatcccactcgaatgacatgttgctgtagtactattactatggttggaaatcttatttctctgaataataaaagtttatattcagataactgctatgatacgtaaactttccaatggttatttaattttgttttgcaattaatatatgcaactataagtaaagcctagtgaattctttggatcggagttatatgctatgtgctaataatacaaggaaccccgcaatattgatataaaatttaccaaactgtatcccacactttaaaagttgtcatcatactttatgtgaatgcaataggatccaaatcgtttggggaagattttacattttaaattcttatattccgcaagtgcccaatggtgccgcacgaattatttagtgtatcaaactattggtaggagcaattagtaaagcatatacagtgcaacaatctatttaaaagtatagaaatatctaactaaaacatattttgaagattccctcgtcctccaatcgtcttccatcatcgaaatatccctttgaagagctaagaaacttggtgggaacaaatgatgctattcgataattttcttcgattctatggtatatttggaaagattggaacataattaatatatatatcccacttgatgcataaagaatgttgtttaagaaacggagttctgaggtaactgactgacaagtgcttcgactcaaccattactacttaccaaatccacggctcttggcataccccatacacgcttagtggatatggttgaatcgctagttcccaccaccagcttctttatcttgacttaaaagagggcacgtcgatgtcttcctcccctacacgacaatgtagaacatgcatgttcaaacaatttgcaaatggaagatatattggaaatttgtgaaaggccatgaggtagatacacaattaaattcatgagttcataggtcagaacaaagctgaagcatgttctacatgcccaatcaagaaaaagtcaaacttttctcaatgccgactttactgttctaaaatgtatgaaaatacacattaatatacaattataaatacatgcaaatatatattgttataaactatataatggttacttgatatggatccttatacttaactaacttaacaccaactccctggatctataatgtatatattgggctaaacaggtcatgtggaagttatttgaaaagtacaccatatcgacctaattagattggaggctttttatttagttttttgtcaacaattagatttgagtaacggatgtaaccatattatttgttcctacctcctaggcattattatagtataaggtttttttttaactaaagatgatttaaaaaaaaaaaagtgggacctaaaccttaaaaattccaataacaaatagtatagaggtcctttttctctttatataaacccccaaaatttcctcttctctgtattctccactcaatacttatttcctctgtcttccttcgcttccctcttctctcaccacaatccgagagagagacagtactgtaatccaagtgagagagagagagaaatg

SEQ ID NO: 33680 - DNA, 3000 bp, Unknown; identical to SEQ ID NO: 4062
  misc_feature (1)..( 3000): 2750-1469P.txt file - cDNA_ID_3071510; gDNA_ID_2926186; Annot_ID_200623

SEQ ID NO: 33681 - DNA, 3000 bp, Unknown; identical to SEQ ID NO: 3639
  misc_feature (1)..( 3000): 2750-1469P.txt file - cDNA_ID_3071530; gDNA_ID_1620654; Annot_ID_163588

SEQ ID NO: 33682 - DNA, 3000 bp, Unknown; identical to SEQ ID NO: 3641
  misc_feature (1)..( 3000): 2750-1469P.txt file - cDNA_ID_3071544; gDNA_ID_1620654; Annot_ID_163575

SEQ ID NO: 33683 - DNA, 3003 bp, Unknown
  misc_feature (1)..( 3003): 2750-1469P.txt file - cDNA_ID_3071547; gDNA_ID_1620654; Annot_ID_163572
gctttaattgaaaaacggataatgcggtatgtcacttatcgttatgtaatttatttagatttaattttccgtataatgaggaataaaaagtccaaagagagtgtttggacagtgctacaagaaaacttcaaaccagaacaagacaattatagacatcgatcctcttccataatcaatgaaagcaatctataggtttttgatgcttttattcatttgtgcaaagggaagaagaaacctttcacatgattgatacaagctcatgcatatagaaacggtttacggttctgactacaaaaaccaaccaatcttgaaatgaataagttttggagaaagggcttgcattaaacaagatatacaacttaattggtttttatgctcaagcgtagcttcatctcacttggaatcaaattcgatcttcttagtatataacttaactcgattagtagcgattacttgaaaaatattagagaaacagattccagaagttatctccttcactcttcagattcgtaatgaatgtgattaagataacaaaagaaaagtaaacaaatggtagtatcaactaaaagctaccattaaattccattaaatagcttcacatgggatataactgatgctgaggtattagattttatggaaggtcaatggtagtatttgacattttgttatataattattttattttctgctaaaacaacatattcctagcttttttatattcttataatcttgtgaagcaaattcaaaaattaaagaggccactttcacaaatcatcccagtttaggctgttgtataattgccattaaagttttgaaaccctgttgcataactgtcgttaaattttttagtctataaatcattttaaatttgattgtcctcttaattgtgaaacatttaatacacgagagattcctaagttattaacagctatattatgtcctcgtgaggtctgtattttagttattggcctcttgtattaaattctagtaactgtttgtttcattttttttaatttgttactctttcgtttgctattcaaagttctaaaattcaaacgttatccctctagcttctcaaataatatatataggagattttatataattatgaaaattctacttcaaatgacggtttaaaacgcaagttacaaacgtctgtttaattgatcataataaacattttgagagtactaatcaataaatcatactcatatccagttactttccattgttcaaatgaaaatcaatggctatcttgatcgtaacaatttagaaaaatgaaagttatgcaaatatgtgaaacattaaaagtacagtaataaagtttattgtaccataacctttcgtccaaataatttcctgttttaaaataaaaagacaggaaattaaagtcaagtaatttaactaccatcattagattaatcaaaggaaatgttttttttaaaaacattaatggatatccttttattcttctaaattattgctaaacattttgtgataatttttacaatgactagtgaatctggtagttagaaacatcttaatggttttcacctttgaatatccaatttaactaccagcaagcactacttacatacatctatctacatctttcattcttttatattgtcaaaatttgtcaccaccaaaaacattgatttatattcaaaatttggaaagtaactcaaagtagttgagttttgtgggtaccttcagaatgtccatttgattatcaatcaaaaagaagtttttagctggcgcatgaaaccgtcgttggaaactttgaaacggatgcttcactgtataaacgtactattattatttaatttttaataacgaaaagtaaattgtagatgaattctttttatttgattcatttttagttagtgctagccattatttctatctttaactatattcaaaattgttttttcatactataaactattattagaccattttcttgaatgaaccatactttctagacactatttctaaaatgactataaatcacaccatgtagttctatatttgtattattgtagtttattgatttaacattgaaaatttaataaattatacaattaaaaaattaataggttttaatacgtgtaaaattataaaacaaaatttataatgaaacagagagaatagtaaaaacatttatgagaaaaatatgtattggtgtcactaaagttattttagacatattttcattcaagaaatcagttgaataatagtcttactgtgacaaacaatttaatagataaaacattgagtagtattaactaataaatgaatcaaacaaacaaagtctaattgataaaatacgccatataaataaactataagtttctttaaaatatacattaaatatacaaaacgacaaatttatgaaacaaaaaagtgaagtcataagattaaaactattgtgaaatggatgacaaattcagtttcttctttattctttaaaccctaagtttaaattctttcaaacacaaatcgtagtatttgtaaaactgttattttcttgaaatataatttaacgttacattaacaaatcaaatggatgacatattacttaaaatttagattaccaataaaaaatcataaattcttcttttaaattgtaagatttaagtcttcccctttacatttagcaataaatagtttgctgcactggtttaaatgcactaatgcattgtttactgaattgtcttttgtttcatatatttgtctctactatacttttactaactttcccacctccaattaaaaaaattattacgaaataaacaaagtcatatctctctccacaacataattactttattcaacaaatattaattcctagtcatattttagctcctcttcttccttatatattacatacatacattttctttagaagtcattaccatcaacccatcccctagaaaaacacagagaaaaacaaatacaagaatacaaaaaccctctcgacgaaaccgaagtatcgaaatg

SEQ ID NO: 33684 - DNA, 3000 bp, Unknown; identical to SEQ ID NO: 3647
  misc_feature (1)..( 3000): 2750-1469P.txt file - cDNA_ID_3071555; gDNA_ID_1620654; Annot_ID_163570

SEQ ID NO: 33685 - DNA, 3003 bp, Unknown; identical to SEQ ID NO: 28911
  misc_feature (1)..( 3003): 2750-1469P.txt file - cDNA_ID_3071577; gDNA_ID_1620655; Annot_ID_163638

SEQ ID NO: 33686 - DNA, 3003 bp, Unknown; identical to SEQ ID NO: 19310
  misc_feature (1)..( 3003): 2750-1469P.txt file - cDNA_ID_3071593; gDNA_ID_1620655; Annot_ID_163628

SEQ ID NO: 33687 - DNA, 3000 bp, Unknown; identical to SEQ ID NO: 19311
  misc_feature (1)..( 3000): 2750-1469P.txt file - cDNA_ID_3071593; gDNA_ID_2926209; Annot_ID_202463

SEQ ID NO: 33688 - DNA, 3000 bp, Unknown
  misc_feature (1)..( 3000): 2750-1469P.txt file - cDNA_ID_3071597; gDNA_ID_1620655; Annot_ID_163624
agcgtttcaatattttgacaaagatggaagcggtttcataacaattgatgagctacaacaagcgtgtgttgaacatggcatggctgatgttttccttgaagacatcatcaaagaagttgatcaaaacaatgtaagcttatatgatgatctgttccacattcctcgctaggctaatgtcgaggcatcagctgataaaaagtcttatcggttcttatgttggtctgaacaggatggaaagattgattatggtgagtttgtggagatgatgcaaaagggaaatgctggtgttggaagaaggacgatgagaaatagtctaaacattagcatgagagacgcgtagaggttgttttccccggtgtttaatatgttagtgcgatcgtgactgcgaaaatgttcttattcatggaatcaacaacctcaatgctcaccacctagaaggcgatgaaagaagaccaaaccggattcatacctgtggatggttcgagttttgtttaacgactgtgtgattaatcgtcaagtagttttggaggttttttctttacctctttgttgtttgttcattatggccattgttgaagttagtgagctttgttcatcatctgccattgttaaactttgttcacttgtatttgaaaaaaacaaaaatgtctttgtatgttgtgtgatttctaagcatttttactttgaaaatctatttcttcttttctagacgatcacgacccttcatccatatcggactacacaactcgatattgaataaatttatatgagaatagtaccaatggcctatgatgtggaagatgatgagctagcaagtctcaatcatgtaaatgaaagtgctttttctaagtaatctgtatttaaactcaaataaaaccaaaactcaaagctgttccaagcaaattattcattggccacaatctgtaatttggaacattatgcaccaaaaccatttttaatgtattttacatatacaggttttttggtacttctcctatacacatggcatattcatattaacaaaaaatatttattttggtgtcacttttcatattttattagtgtaaaataacctcttcttaagagtaacgtatggcaatttggtcagctttgttatttaaaaattatatgttaattagctaaaatacgatcatttgtacccaaattctcttaatttaaaactagtccgacttgaaagtaaaagtttagtttaaactataatcagaacaataaatatcaatacgccaccgacgatttgctgccaccgacaaatgttttgtcggccacacgcgtctcagttttatggaaccgaactctcgttaatactttgcttttttacataccatttttgttgaaaaccccacaaaatgggaaaataattcggtgaaatattttagatttttagttctacttgtatcatgaaattaagagttcttcgacatagattgttgttatcatcaattatcattatgatcattgtgtatatgaaactatacaacgaaattcagaatcataattagatagaagaatctcatgttgtttttcacattaaaaccaaaaaaaaaaaagaatctcatgttggcgcgtaaaagattaaaacgaaaataacggatttttctatataatttgcatggttattaaaatacaaaaatacaactgcacagccacaaactcgtaaccacaaataaaataaataaattgattaataataatctaggcaaattaattatagcaaaatacaacatcaagtttaaaaaaaaaaagacgaattatacattcattatactccattgcacaaaagtaaaaaaagaacagacaaatcacaaaatctcaaccttatatgaatcattttatcgttgacgcttgtatttgcaagaaagaggaagagaatcttctgaagaaggtcccatgaaattacggatctgagatcggagtttgaagaaaacgtgcattatacttcctctgttttgtgaaccaatcgatttagcttcgtctttgttaagctcaagatctctgatgaatataggttttcttgaaaggatccatgaccaaccccattcccaccattctttcacagagcttcctgcttgttctcccatggcggaaacagatttggatctcgggaatctagctgcgatcgctgctggttggtttgagaggttgagtgatagagaagagagacgacggcggatgagaccaggctcatcgtcggcggtggctgctgcattagggcgttgagaaacggggagggaagtgggtttacgaatctggagagtctccatcattgagctcataacttctttgttcttctttgtgttgagagagattgaagaagaagatgaatgtgaatgtgagagattgattagtgaacacagctctaacacaggctggggttttattccactttatttttgtggggtccatttacttttatgcccccagccaattacattcattttgttgttgctgtttgtttttgtattaaataatttgtattgttatgtttatttgttgatttgtatagttagttgttttgtgtatgaatgaatgcacctataatattggaaatataacaattttatttttagtgaatatagataaacattgttttcaggtagggttccatcacaagtcacaatacaaatttaattaaaaaaattctttgtaattttattttaaaggttattttcccagtacagaaatctgttgaaattgcattggctttgatttttttataataaaaatcagaaaaatgtagcagaatctgtccaatgtccatagccaagcaaatttatgttgacagaaaaaagaacaatcacatacaaaaatccaaaaaagaaaaaagatatcccagacgggcctaatcaggtattagactaaggcccaataaatttcaagcccaaaatcgaaattaagcactttattctttctttttttaatagctatcgagtgtgtatgttcggagaagagatcacagagatctgagagcttgaaacaatg

SEQ ID NO: 33689 - DNA, 3000 bp, Unknown; identical to SEQ ID NO: 3679
  misc_feature (1)..( 3000): 2750-1469P.txt file - cDNA_ID_3071613; gDNA_ID_1620656; Annot_ID_163680

SEQ ID NO: 33690 - DNA, 3003 bp, Unknown
  misc_feature (1)..( 3003): 2750-1469P.txt file - cDNA_ID_3071625; gDNA_ID_1620656; Annot_ID_163664
actcaaaccttagatcactactctccatctgtaatcaatcttcccaatttcgtttcttcttcgattttagtttctgtttctctttcgttattgaaattcaaaattcgctgcaaaatcctagttaccagttccagctgtttctaattttatttcaggatcatcgcaaattcagacagagatactatgaatatcttgaccatttacgagttcctgacggacctatctttctcatgatttgcggcgaaggaccttgcaatggaatcaccaataactatattagtgtaagatatttttccgtgaaacatatccatttgattgattaatttattctcataatctctgaaatttgcattggttttgtttgttaaacatgttcttcaggtgttggcaaagaagtttgatgcaggcattgtttcactcgagcatcgttactatggaaagagctcaccatttaagtcgttagccactaagaatctcaagtatctttcttccaaacaggccctttccgatttagctactttccgccaatattaccaggcaagtagtagtcttatactcttatggttattactttctctaggatcaaatgtttaagaagctgcgtttattagcatgttttgggatttgtttgtggatgcaggactctttgaatgttaagtttaatagaagcagcaatgttgagaatccgtggtttttctttggagtatcttattctggagctttaagtgcttggttccggcttaagttccctcatttgacctgtggaagcctcgctagttcagcagttgttcgtgctgtctacgaattccccgaatttgatcaacaggtattcgttacaatattcaactttaagtgaagaaatgttgtgtttcttcatatagagtttagttgctgacagaatcgagatttttataccttattgaatagatagctgagtcggctggaccggaatgtgaaactgcgctacaagagactaataaactcttggaactagggcttaaagtgaataacagggctgttaaagctctcttcaatgccacggaggtctagctttactgtttctgttttcttttgtttgaatcttaaggaagtaagaagtctatctccaatctgattaagtttctgaaatctgtagcttgatgttgatgctgatttcttatacttaatagcggatgcaggagttatggcggtaagcaggttcatttcatatttataaaattttcattttctttctagttttagatgtttatctggcagattcaatacggaaacccagataaactatgtgtaccactcgtggaagctcaaaagaatggtggtgatttagtggtaagttctttgtttttttagatcgctctttacttatgcttggtgtatatatattgacattcatcatatggtttgcaaacagaagaattgtatttggtgatacataacattggatgtgttaatgcaggaagcatatgctaaatatgttagagagttttgcatgggagttttcgggcaaagctctaaaacatatagccggaaacatctactagacactgcggtcaccctagagagtgcagataggctttggtggttccaagtttgtactgaagtggcttatttccaggtggcacctgcaaacgatagcatccggtctcatcagatcaatacagagtatgcacagacccaagcttatatatcatattcagaattctgattttgtcgtttctatttattgtcccatttacacttcttttcatttcataggtatcatttggatctatgcaagagcctctttgggaaaggtgtctaccctgaagtcgatgcaacaaacttgtactatggaagcgataaaattgctggtatgtaatatcggaaaacttctcgacgatccttttagacttgtgcacattccaacagtttcttcgcatcttcttattctcaattttgtagcgaccaagattatcttcacaaatgggtcacaggatccatggcgtcatgcatccaaacaaacctcatctcctgaccgtaagtcttcatttagtttgatcaaaatcgcatagcaataactcaggcatagcctatgtcgttatgtagcagtattcagacaaatcctttgtctgggacactaaaaagataatgtttgatgacacagtgccttcgtacatcatgacttgtcacaactgtgggcatggaagtgatcttcgaggatgcccccaatctgcaatggtcattgaaggtatattaccggcttcttctctgtttccgatgcctgaagtcaatgacaagcatcagaacaactgttaagaaaatatgatgtcccattcttttcctgtttttttcctcccatttgcaggtgatgcccagaattgcagttcaccagatgcagtgaacaaagtgaggcaacatatgataaaacacatcgacttgtggctctctgagtgtcgtggataggttaggtcgtgcagagattaggagttccatgcagagtcacacgaactgcgttctgcaaataaataaaacatcagatgtacgctccaaacttatatctgtgtaactgtaacctctgaaactgagtcacgtagcaagtccactcggtatctcgattttaagctttcatccactaaggcgaatacagtagcacgagatatggccactcgggaatggaggttcagattctatctcttaatcggtggtccatcttggcttctgcctctcattgttgaagacaatcgaccttgtgtcaagttttatctgttttgccctgttttaattgtttggttgttctgttactctgtttccatctttggttttaatttctacgacgacaaaaaaaaaaaaaaaaaaaaatttaaagtccgcgttataaaaaaaaaaatgatttttgttacaaattactaattagggaaacattattctaatcattatattgtccttgcaatttataagtaaaaacatttcttttctggtccactcgttttaacttccggcgatcgattttcacggcgagaaatg

SEQ ID NO: 33691 - DNA, 3000 bp, Unknown; identical to SEQ ID NO: 3678
  misc_feature (1)..( 3000): 2750-1469P.txt file - cDNA_ID_3071629; gDNA_ID_1620656; Annot_ID_47856

SEQ ID NO: 33692 - DNA, 3000 bp, Unknown; identical to SEQ ID NO: 3686
  misc_feature (1)..( 3000): 2750-1469P.txt file - cDNA_ID_3071629; gDNA_ID_1620656; Annot_ID_163662

SEQ ID NO: 33693 - skipped

SEQ ID NO: 33694 - DNA, 3000 bp, Unknown; identical to SEQ ID NO: 3686
  misc_feature (1)..( 3000): 2750-1469P.txt file - cDNA_ID_3071629; gDNA_ID_2926211; Annot_ID_202604

SEQ ID NO: 33695 - DNA, 3000 bp, Unknown; identical to SEQ ID NO: 3704
  misc_feature (1)..( 3000): 2750-1469P.txt file - cDNA_ID_3071649; gDNA_ID_1620658; Annot_ID_163714

SEQ ID NO: 33696 - DNA, 3000 bp, Unknown; identical to SEQ ID NO: 3704
  misc_feature (1)..( 3000): 2750-1469P.txt file - cDNA_ID_3071649; gDNA_ID_2926187; Annot_ID_200701

SEQ ID NO: 33697 - DNA, 3003 bp, Unknown
  misc_feature (1)..( 3003): 2750-1469P.txt file - cDNA_ID_3071653; gDNA_ID_1620658; Annot_ID_163711
cacttgactctgggaaagaacttgggatgccagatggagtcctcatcaatgggaagggtccttacaagtacaacagtagtgtacctgatggaattgattacttaacctttcatgttgaaccaggtatacttgtttggagtttctgagaggaatttttgttttcactttgtctcatgagacctatgaatcttctcatgtgacttttcttttcatcctttaacattttgtttgaatagttgcctgtgttgagtctccattctcagttagttgtcttgttctaagatactctttttccttactcactttgagctcttaacacatgagtaactgttgcatgtagttgaacatcttgtaaagatggtactttaaaaattcacatcttcagtctttagtataagattaagaagatttgtcgagattcagtgcaaattattacttttgtattatgctataatggtgttatattttgcagggaaaacatacagaatccgtgttcacaatgttgggatctcgacaagcttgaacttcaggattcagaaccacagtttgcttttggtagaaaccgagggtcactatacttcacaggcgaacttcactgattttgatgttcatgtaggacagtcttattctttcttggtaaccatggaccaagacgccacaagtgactactacattgttgccagtgctagatttgtgaatgaaacagtgtggcaaagagtcactggtgttgccattctccattattctaattccaaaggacctgtttctggtcctctaccagttcccaaaacagatgtttctagcccgtggtcagcaatgagccagccgaagaccatcaggtttgtttttaaacttttttggaacaagtgcatagaaatgttcccttcttgttgctacaactagatttttttccagtgaagctgactcttttgatttgcaggcaaaacacatctgccagtggagctcgtccaaatccgcagggatcatttcattatggtcaaataaacatcactaacacatacattttgagaagtttgcctccaacaataattaacggggcacttcgtgctacacttaacgggatctcatttgtgaatccaagcactccagtgaggcttgcggatcgcaataaagtgaaaggagcttataagctggacttccctgacagaccttttaatagacctcttcgtttggatagatctatgatcaacgcaacatacaagggctttatacaagttgttttccagaacaatgacaccaagatccagagcttccatgttgatggctattcatttttcgttgttgggtaagcgaaacctttgcaccttgtcatctattcttgttcattcttttaatatcctatcaaaagtctggtgttgatataccatgttatccaggatggactttggtatttggtcagaagacaaaaagggttcatataacaactgggatgccatctcaagaagcacaatcgaggttaatacaccgtagcatcactcaaaattattctgatctgcaggttttcttaatggttttcttgttatttaggtataccctgggggttggacggctgtactgatttcccttgataatgtcggagtttggaacattcgagtagagaatcttgacagatggtatcttggtgaagaaacttatatgcggatcacaaaccccgaggaggatggaaagacagagatggatcctcctgacaatgtcctatactgtggtgctcttaagaacttgcagaagtattcttcataaacttttctttcactctcttttgttatacctttcgattatgagaattttaacactcttcattgtgattgttgcagggaacaacaccactcagctgcaacatctatactaaatggacacttgaagctaatgctactaatggtgttgctcgcctcggtgttcagattttgctgagcatttttacatctttatgttgatcgacccagggaagtgaagttaaatgatttttagatttatttatcccaatggatgtgaaaaactcttggttctttcgttgttttaggccaaaatggtttagaatcttgtcaattgtaatggaaacgtctgattttgatttttctgttctttttgaatcatccacatccttcatgtttctcccatcttaaaccacattatattttcattgttggattctctctatctcgatatcattgttaaacttgccatctgttttttttttttttttaattcatatgaatctcatattcgtgtcactttgttctaaatttagaattttttgcacagcttaaattttttctttttgctgattagtattttaatgtttaaaagaaaatatgatttgtacatgagcaatttccagccattaaacacctatgtataaatcatccatcagagctgcatatcatcaattctctataatgtacatgatacgtcgacctgtctttcttaataattacagaaacattatgactaaataatatcttaaacaaaaaataagttgatgtttctccgaaataagagatctggtccacgttcatgttacatgcacatcataatatcacatcacgtgctaccttgcttaaacaccggaacgaaacttgtaataatcttcaaattttatttggacacaaaaaacttctaaatattgtttggtatataatttgagacgcctaggttttgtaaatattacaaacagataagcagacggtcgtttgatttgaaacgcccatgtttagcaaattatgacaatcttctaataattgtttacatgtcaaagcataatgattagagagaaacgagactaacatagagatgtggttagtgattgggagagaaatggaccaaacagaatgagatgtcacaaggtttccaataataaattaataatccaatgtgtctatatatacatatacacataaaccatagttcacaatttgctaaaagctagcattttctattctctctcaactccgaaagtacaaaaccccaaattaacaaaacatg

SEQ ID NO: 33698 - DNA, 3003 bp, Unknown; identical to SEQ ID NO: 33697
  misc_feature (1)..( 3003): 2750-1469P.txt file - cDNA_ID_3071653; gDNA_ID_2926187; Annot_ID_200698

SEQ ID NO: 33699 - DNA, 3003 bp, Unknown; identical to SEQ ID NO: 19377
  misc_feature (1)..( 3003): 2750-1469P.txt file - cDNA_ID_3071657; gDNA_ID_1620658; Annot_ID_163710

SEQ ID NO: 33700 - DNA, 3003 bp, Unknown; identical to SEQ ID NO: 19377
  misc_feature (1)..( 3003): 2750-1469P.txt file - cDNA_ID_3071657; gDNA_ID_2926187; Annot_ID_200697

SEQ ID NO: 33701 - DNA, 3003 bp, Unknown; identical to SEQ ID NO: 19379
  misc_feature (1)..( 3003): 2750-1469P.txt file - cDNA_ID_3071661; gDNA_ID_1620658; Annot_ID_163709

SEQ ID NO: 33702 - DNA, 3003 bp, Unknown; identical to SEQ ID NO: 19379
  misc_feature (1)..( 3003): 2750-1469P.txt file - cDNA_ID_3071661; gDNA_ID_2926187; Annot_ID_200696

SEQ ID NO: 33703 - DNA, 3003 bp, Unknown
  misc_feature (1)..( 3003): 2750-1469P.txt file - cDNA_ID_3071665; gDNA_ID_1620658; Annot_ID_163706
tgaagtacttcaaaactcctgccaccgctccaccgccaccgcttcttatcttggccttgcttacgggtgactcaggcggcgtcatgcacattgaagtcgtcggagctgagctggacagaggcgtcttcatagtcgaaagtcttccaggagacaacgcccacgccgatggtgagctggctcccggctttacccctctcgatgaagcgttactacgaggactaccacgcgtacgttgctccaagtaccgagcaaacgactctctgcttctaccgttgtttatctcttgagatcttgatgcgctgtttctcgccgggattatgttctcgccggatttagagtcggatgatccgatgggtctggaggatcttgttgtggactgtgatctggttatcatcactcgtttgcttgaattggaaggcgaagaggaagaagatgaagaagtagaagacgataacgaggcgtttaaggacactgggagagagattgaagagcttatagtccggctccggttattattgggcgatggaggacggagtctccgaccggtggttgccattttcttctttaatatatgacgacggttaactatatgactatatcatacaagacttatattcggtttcgtttctcgactcacttgcccctgtccttaagactcttatagtaaagctggaattatatggttcaaggaatcgtctagtctatatacactggtttgaacaattgtgatatataatatagttaggggtatattatatttaatctgttagataacggttggggtacttgaagatctgtaggagttgacagcacgtagaggcagaggtaagaacacttctgcatgtagtgtgtctacataataaaatatagagtgtattttttacacacaccaaaaagagagattataattaatgtattatgtcaaagcatatatgaaggtcagcttagctagagacacgtcttttgtttatctctcgactaaacaacatggcgttttaataaaatcaaaacttaaaaggtccaattcagaacggccccatagtatatagtctacgttgaataaataaacctcaagatagcgtcaaactctttagtctttacccaaaaatatttttttttaaataacgtcaaaactctaagtcttgacctcaacaccaatatatatttgccttctccaatatctgatttttttaattgtttatccgagtcttcttggtcttttcgaatgtttgcccgaaccagaccttcccacgttcggtggttggtggccgcctcggcctttggttgatttctgtccacattttggtccttttcattcatgtaccatgttctagggtcatttgacttgttgaccataaatctactaaaacaggcctaataccgatgggccgtagcccgttaataaacaagacaatttatatttgtttcacttagcttgggagccacggatctctagaaacatccagagaaatatcaatctccccacttctccagaacattcactcactgacaatatcccaccttcaacacttaactcctgtatatagtcctcccctgtctccagtttcgtcgcacacagttctcagataaatactaaactcactgttaaaactttctcaacaaagcttcctgtttctctacaaatggcatctgctctcgctcttaagagactcctatcatcctccatcgctccacgttcccgtagtgttcttcgtccagctgtttcctctcgcctcttcaacaccaacgccgttaggagctacgacgacgacggcgaaaatggagacggcgttgatttatatcgccgctctgttcctcgccgccgtggtgatttcttctcaggtaacaaaccaattgtttcgcttttcctccagatctatgtctctctgttgttaacgtagcgaaaatctagtaagaaaacaggtattagcttacactgagctcaaaatcttgacatgattgattgtgtctttgtgtagatgtgtttgatccgttttcgccgacgaggagcgttagtcaagtgctgaatctgatggaccagttcatggagaatcctctgttatcagctactcgtggcatgggagcttcaggagctcgtcgtggttgggatataaaagagaaagacgatgctctgtacctgagaatcgacatgcctgggctgagcagagaggatgtgaagctggctttggagcaggacactctggtgattagaggagaaggaaaaaacgaggaagatggtggcgaggaaggagagagcggtaatcggagattcacaagcaggattggattaccggataagatttacaagatcgatgagattaaggcggagatgaagaacggagtgttgaaagttgtgatcccgaagatgaaagaacaagagagaaatgatgttcgtcagatcgagatcaactaaaaacgtcgacgtttttttctgttctagttttgttgataggtctttgaataagaagtgtgtgtagtttggcacggtcgatgttgagtcatgtagtctctaaagactaaaaggttatatgtttctttcttgagacggtggttttttgtcttgcttaaaccaaaatttgcattccaaatcaaagcactaattaaataagttcctaatcgtgtattcttttagctaactcggtcggtttacatgcctttgtggttatgagactggagcttatggaacgtatttgggtttaaaattttctgtagactaggaactaggaagactttaagacgaattctgaggctgcgtaagttgtcgacggactggtctattaataacgcgtaaaagtgttaggcccgttcgagtagaatagcgcgttggacagcccaacttgaatgaatcgatcgacttttattaaaaaaacaaaagtagggcaaaaaacaaaaaacagaacctcgacattaacctaaacctaagagcaaagcaaatcgacggcgacgggaaaatagaaccgcagatctctgtctcctctctctctcgtaactgtttgttcgatg

SEQ ID NO: 33704 - DNA, 3003 bp, Unknown; identical to SEQ ID NO: 33703
  misc_feature (1)..( 3003): 2750-1469P.txt file - cDNA_ID_3071665; gDNA_ID_2926186; Annot_ID_200669

SEQ ID NO: 33705 - DNA, 686 bp, Unknown
  misc_feature (1)..( 686): 2750-1469P.txt file - cDNA_ID_3071665; gDNA_ID_2926187; Annot_ID_200693
attaaggcggagatgaagaacggagtgttgaaagttgtgatcccgaagatgaaagaacaagagagaaatgatgttcgtcagatcgagatcaactaaaaacgtcgacgtttttttctgttctagttttgttgataggtctttgaataagaagtgtgtgtagtttggcacggtcgatgttgagtcatgtagtctctaaagactaaaaggttatatgtttctttcttgagacggtggttttttgtcttgcttaaaccaaaatttgcattccaaatcaaagcactaattaaataagttcctaatcgtgtattcttttagctaactcggtcggtttacatgcctttgtggttatgagactggagcttatggaacgtatttgggtttaaaattttctgtagactaggaactaggaagactttaagacgaattctgaggctgcgtaagttgtcgacggactggtctattaataacgcgtaaaagtgttaggcccgttcgagtagaatagcgcgttggacagcccaacttgaatgaatcgatcgacttttattaaaaaaacaaaagtagggcaaaaaacaaaaaacagaacctcgacattaacctaaacctaagagcaaagcaaatcgacggcgacgggaaaatagaaccgcagatctctgtctcctctctctctcgtaactgtttgttcgatg

SEQ ID NO: 33706 - DNA, 3000 bp, Unknown; identical to SEQ ID NO: 3711
  misc_feature (1)..( 3000): 2750-1469P.txt file - cDNA_ID_3071668; gDNA_ID_1620658; Annot_ID_163703

SEQ ID NO: 33707 - DNA, 3000 bp, Unknown; identical to SEQ ID NO: 3711
  misc_feature (1)..( 3000): 2750-1469P.txt file - cDNA_ID_3071668; gDNA_ID_2926186; Annot_ID_200666

SEQ ID NO: 33708 - DNA, 85 bp, Unknown; identical to SEQ ID NO: 3724
  misc_feature (1)..( 85): 2750-1469P.txt file - cDNA_ID_3071685; gDNA_ID_1620659; Annot_ID_163766

SEQ ID NO: 33709 - DNA, 3000 bp, Unknown
  misc_feature (1)..( 3000): 2750-1469P.txt file - cDNA_ID_3071689; gDNA_ID_2926149; Annot_ID_197926
ttccatctagactcgtctgattgtccagcaaagatcagatcatgaatgtcttgttcttttactctcctacttgtatggtttcttttccatctcttaaaactcgttttcgacagaaagcttgtttatgtataatggagatataccttgtatgtcagacagaaaagtttgagcgttgcgtaaagatgttcagctcaaagttaaaaagaagaatacaatagcttaagagttggtacttttttttgcttgcatgtgtcctttaatgtcaatttcatgttttcagagttatctaagtgtggttgtttttcttgttgccatggaacaggacaagacaagactgctcttcttttccttttttttttccccctgaaacattattaaaccttagatcttattattggggtggatgtttgcctgcatctcctctccagctctacgagataattgagtatgatttgggttgctttaaaatgtaatttttttatcctttttactaggcttggctgttgtttctctatgctgggttagctatgctagagaacatattaagagctaaggggagcaatattcgtccatggtactcttatatgtttcctcatcgttcgattatgactgttatgatctcttaagtttttctttgctcgtgttgtcaagttctttgaatttggagtgttctttgtgtctcatgcgtcgctagtgaaggccatagaatgttatttcattgtatgtgtgtatctcagagtgatgcgtcatgctatatgttgaacgtctgtcctatgctcgaccaagcacatctgtagttttatggaagtcataggacgtacctaagtctagagaatattgggtttctaagtgttgtgtcatgttactgtgtggatcttgagttctatatccacaacgcacatgctttgcagttagcaaatgatgactattgaatgttgtaaaatatcaaatgcatcatcatgtggcatggtgattggcaaacatttggatttttccctctaaagggtctctttcattttggcatagaagcatacacatagagaactttagcatacacatatatggttttgtcaagtatttcatgattaggattagagaactttagcttccacggagtcctcaatggttgggggtgtttagtattgttattattatgcagtggatatctctatatatgtattcatgtagtggtgtttcgtttggcttatctcatctgttgggagtgaattaaactctgaacttgatttggttttgcaggtggctatatcatcactattgtgccatggctctggcccttgtcagcctcacttgggaaagcaaaggtcaaccaaactgtgtccagaaacaggtaatgatcagagttatttcttttttgtgcagattaaaagttcacatagtaaatgccatgatgaagttcaatcctcgacagagaggagtccatcttttcctacaatgggctatgatgcaagaggtgtcgccatgcttctataaaacagatatcaacgccaaagattatacactcgcattgcactaggaaaggtgccttattatgtgcaattctattcttcggtccaaacttgtattcgcttttgtaaaatagctctaaagtgtgccttgtggttaaaattcaggctaagagaatgtatgttgtatggggagaaacagctggcgttggcggacaactatggctcttatgtatgctattcatattacaggtgagcttttttttttgtgtaaatatatgaatcaagtttatgcttaaacattttaaagcgtttaatgtcttccttctttttaacaactgtgaacatttctatgtatatatttgaaagtcaatatatttaatagattatctgatgtaatgagatctcttagatggcttgtatagtagaacctctttgctttttccacaatagtcttgaggttttctgtttaacttattgggcttaacaatttgttgctaaaactcaggtgtttgaagcatacgttggactgctgttgctaagaaaaacagtaactggagttgttaatgaatggcaggtatattattttcactcttttggcattgttttcaacgggtttattcccggtataggccgacaaatcctaattcaatagtgaacagagactaaaaaataggaagtaaagtaaaataaatgttgtcgcttttcaaatgatggtttgtggcattcttctggtagtgatggctgttgggaacttcataaacacaataggaacactgatgatcacaggtctcatttgttaaaatcacttttcttttcttttttttgcaattcataaatttttgttttcgtaggccacaaaattcacatcctgtgattaaaaagaaactatgtgttatgagccaatgttttagccttagctcttgttaagggacccgttgctaaagcttaagaacaagagattgaaagataagcttcctcttaaccctaagctctcttggagattaaggttaattcttggaagttaattttattcattgtttgagtctccttttatagagaaacccttacaaccgactctaagcataattatgttaaaataccaaatctaaaaaggaaaacataggaaacaattttaagaaggatctcgagtctttggtttccttctctgatatgtaattccatatcttgtatcactatgaacatcttgaagatgatagtgttaaaaaataagacagtattcttaaaagacaagaaagacagtattcctaaacctttttttcccttaatttttttattcagcagaatcatagagtttccaaaaatcttccgcagttcttgaggcggttttgatttacccttatgattccggttcagaggcggaaaaattgagaatttactgaaatagtctcattacataacaatccagagctttctagggtttgtctcctgttcttctgtgttttttttcttgtttggttggcttgagacaaatcctaagtatttattgtgttttcttgatttttgtaaagatatg

SEQ ID NO: 33710 - DNA, 3000 bp, Unknown; identical to SEQ ID NO: 33709
  misc_feature (1)..( 3000): 2750-1469P.txt file - cDNA_ID_3071689; gDNA_ID_1620659; Annot_ID_163765

SEQ ID NO: 33711 - DNA, 3003 bp, Unknown
  misc_feature (1)..( 3003): 2750-1469P.txt file - cDNA_ID_3071695; gDNA_ID_2926149; Annot_ID_197909
actctccctttgaatttctgcgcttttcgacagtcgaaaaactttgtttagataactccaaaacacacacaatcatgtcgaatttgatcccttacctttgtgtagtatctgcaacctttctctccatcagtaacaataagcagcttaagcttatcatgcataagagacaaaacaacatcatccttctccgcatctccacgcgttagaaacgttacctcatcatcgcttacctacacatcacgaaactcgaacactaagatcatcgaaaacacgagtccggttgttacaacaaaaacaaacataccttgataatatcagcctcattccaaatacttttgatgccttctatagcagcttcagtagaaggccaaagaggcaaccgaacgttcgggtcataagagagtaagactcccgcatctttagcggttttcatcgcagccatgtgagctgttctacatggctcagagatcaagctaatggaaccatagtggaaaatcttagctttcttgataagatccttgttgagttcagattctttcaagagcatgtccgcactagggttcctgtaaaacataaactctctctcaccatctttcttcaaagtcacaaaggccaacgcggttcttgcattggtatcaaagcaaacaccttcactgttcacaccgttcttcttcaatatgttaaccaacatgtgtccaaactcatcatcaccaaactataaaagacattacacaatcacatatcacttttcaccatcagttaatagattctaacataaattatacaaaccttgccgatgaaagctgatttgccaccgagtttggtgatggcacaagcaacattagcaggagcaccaccaggggctttgagaaaaccggtggactcagctaaagaaacaccagaagtgtcagggacaaagtcgataagcatttcaccaaaggaaactatcaatggagtattagccatctttactcagacaagaaatgttcacacacataaaccaaacaaaattaacctctctttattaagctggagaattagcaacagaactgcatgaaaaatgggataagcatttaacaaaatccctaacttgtagtaaaaactcagtacaaacttttgactgtaacaaacctccaatttagggtcctaattatatcaacagaaataaatctttgtcacacacaacgtaccaaattctctgtatttatattcaaagtttaagtctttcttacttagttgcagtaactgaaaaatccgatttgaacaaatcttatgaaaagagattaatcattagttcaagactcaagagtcactttacagagcaaattctatacatttttaacctttttaagggttttaaaccctaaaagagacattatcaaaactctatgattagggttttcaaatccctccattgtccattaactaggaccccaacagctcaagtacatgactgtcctcagcgattcttcagcttgcttggtcttgttggtataatcgattgatgaggaagagagcttcttagcttgcgacacggatcttaagttgttgcgtagatactgattcgcagatcggatcacgtagttccaacgacacacgcctagttggtctttcaatgcctcaacggctccgatgcttgcagcaaccatccacgttttgcttgcagagctcatttctctttgtttctttcttgtttaagtgatttggtttcgattttgtgtttgttgatgatgaatgagaagtgaatcaaagtgggttttgtttataaaagaagagaaagcagacaaaaagtgccgtgcctttggagtttgaaagtgcagacaaaaagtgggttttgtagctgctggttttcttggtttctgctgaaactatgaatgtttagttcaatgacgattttgcccatgtttagttcatcgacttgagctgctttttttttttttaaataataatatagatcctaatttttgtgtatactagaatgatctgtatattaaatctataaaaattttaaaaattaatgtactacttgaaacgaaatttattatttataaaatgactgattaaaggataaaataaaacaaatctctatattcttttttacaatctcttttttttagtaaaatgttaaattttatatcattttaaatttttgacagaagttataaagagaactgagaacggattaaagcaatttacagaaaagtaaaataatattactactctaattgtatacgattgctcaagagcgcataccagtaaatcgcaaagaaaaacaccaattccaaatctactaaactcggaaatttgtgtggttgtcacagaaccaacattctaaaattctcattctaattgttatgagcggaaatatgtttactaatttagcggaaatatttgatgatactagttttacttttgattttttgaatactcatgttaaatggtattcatcttctgtatgaaagaaagaaaaaaaaaaaaagtaagtcatcgcaaaaccatttttcttttgattgaatttttatttatttatttacattttgtgtttaatatattttttacttttttggtcggcaaatgatttttgatattatattattattcatctccaacatgcattattctacaaggagataaagaaaacatttactatatttcaaaacttggacacaacacgaaacccaaacaagtgaacaatctcaaaaccaggtgcacatgatagcggcactcgttaatccaggaactaccagaatcccaatattaccccttatccaattcgttcttaaaaggctaacaacgtcattttactatccagacagtagtaaacaaccaaaaccaacggccacagcttctagttttaactccaactacacggcaatattgttggcttcttctctcttacataaacacaccaattcacttcactttctaaacatcatcaacaaaaacaattctcaatacacaaaacacaaaacacaaagaagtttaattctctgaagaaagatg

SEQ ID NO: 33712 - DNA, 3000 bp, Unknown; identical to SEQ ID NO: 8139
  misc_feature (1)..( 3000): 2750-1469P.txt file - cDNA_ID_3071695; gDNA_ID_1621195; Annot_ID_174704

SEQ ID NO: 33713 - DNA, 3003 bp, Unknown; identical to SEQ ID NO: 33711
  misc_feature (1)..( 3003): 2750-1469P.txt file - cDNA_ID_3071695; gDNA_ID_1620659; Annot_ID_163742

SEQ ID NO: 33714 - DNA, 3003 bp, Unknown
  misc_feature (1)..( 3003): 2750-1469P.txt file - cDNA_ID_3071698; gDNA_ID_2926148; Annot_ID_197891
ttatatcacgacttcaactcacggctgttcatatatactaatgtaagcatgctggatctcgttttaatattttaataccatatatatgaattatacatgattgacaaatcaatgatttatactcaaaatgttatatggttggattcagtcaggaggacatgggtgttataatcccttatgtccggtcggatccggaataatactagtcagtcatgaagttactcctggtttacttaccaagcacaacgatttcgaactctccataattaaggtcagtttttttccaaaaactattaaagacataactctgtgtgttttaggtatttttaagtatagtatggatatgtagtgttagtgtttttttggtgagatctagtgttagggtacttgtattccattcaatatatatatcttactttttactttttcatattagatattgcaaaaacatttgcataaaaataattaaacattgataaaaatagttattaaaattaattgtaagctttttgtctataatctttgccttttctatatggattttttttttttttttgaaatccatgaggttctgggccgaaacccataatcttctcagacccaaagccaaatcatttaacattagtttcgtcccaaacgtcactcgaatcggcgacctctaagtttcgcctagggtctttaccaattgagctaacgatacttggttttctatatggattttgttgagtacaggacaaaatatacgggcattggtggcttttgatgggtaacagtagcagctcaacttggaaagaaattgggttctggccaacacataggttcaaagaaagttttggtacaggtgtcgaatggggtggtgaagtctatagccctgcgtctacaagtcctcctatgggtaatagtcattttccgaaggggagccccaaaatagactcatatgtccgtttgatcacgacttgggacgaaaattatggtttggacatggttgtgaaaaacacagagagattttcaaacagttgttataaagtgaaagatgcacagagtcgttttggccagatgtaggtcatcttatcgtttatggaggccccaggtgtacataaactttgttagtgcgtagcattattccaaaattgtagtatctgaaaatgttcaaaataaatcaagagaattacgttcttactatgaataaaaatatataagaaaaacgtaaagaaatttaaagaacatctttatattctttttttgttatcttgtttgacttggttagaaaggagaagacaaaagaactatttatatgttccaaattttaaaaacatcttacttattacatcatatatcattagaaaattccactacattaccttaaagatatataatattttctatagagatatagttctagacaaactttacttggtgtgttaacactcttaagtttttctagaacttagacttagttaattttgagtttggtccaataattaaactcttgatcatgatcccgtgattaaacttaacccaaagtcaagtttgatctcactaccggattatttgaggtgaatcaaaatataacaatataccatgtaattggtaggcaaaataaccaaaatttgaaaaatcaatccgaaccgaaataaatggttttatttggttatggttttttcttaaaactcatttggttatcatttttcttaagtttttggtttaggtttggtttggttaaaaaccaaatgatttttttttgtttttgattaaaattaagaataaccatatatactaatatattgtccaatttatattatgattagagtatcattggattttttctttactagacttatatacagtgatctcttagtaatatctgattattcttatattatttttattctacgtttcattttatttatgcatcaaacttatactttttttttgtaaaatacatggaataaccttaaaacccgtacccaaaccaaaaccaaaccaaaccaagatacatatagttttttatatgatttcaatttttacaaaactgaaaacccgtcataaattgtaaaaccgaaccataaccaaacttaattacatacggtttctttatggtttcaagttttttgtaaaaccaaaaaaaacaaactgaaactaaactgaaaaactgcacgcccaccctaatactatatttaaaaataaatctcaattaaaatcaaaaattaaagaaattaaagaaacaaaatacttatgattttaaggaaaatctaagaataattatttttatttattattttcatttgtcattctgaataatcacacaattagttttatacaaacattgattatgtcacatcattttatttatagtacatttttcttattttaatttatttataaatataatttatacaataggattataaatgcaagagaaaaaaatactatcttcaatttacacatagaaatgtattacaaatacttaaaataaatttcttattttcagattttttttagaggaaaagttacaaatattatgccaagcttgtgttaagaagttagcattaaagatatgaataaatgtcatcaatatatcgatgtaaatttaagaagaaattatgtttgacttgtatggtccacaaataattatgtcatctttgacttgtgcatggtcaaaaataacaataaatctcttaaaagcattcatggaaattagtaattacttagtttaagaagaaattttgtttgacttctgtatggttcaaagatatatatactatatttaggtttgaaggaatttaaggaaacgtatatgtattaattattttttctaacccttagctaggtgtatattctactctagtgaatcattcagaaatattacatttcttgtgagaaggtgattatcccaaatgacttcttcaaatctttctcctattactatatctcaataataactgtatatatagaagaaaaactaattatcaaatttctctagttcacaggttaatgaaaatg

SEQ ID NO: 33715 - DNA, 3003 bp, Unknown; identical to SEQ ID NO: 33714
  misc_feature (1)..( 3003): 2750-1469P.txt file - cDNA_ID_3071698; gDNA_ID_1620659; Annot_ID_163735

SEQ ID NO: 33716 - DNA, 3000 bp, Unknown; identical to SEQ ID NO: 4391
  misc_feature (1)..( 3000): 2750-1469P.txt file - cDNA_ID_3071717; gDNA_ID_1620703; Annot_ID_165138

SEQ ID NO: 33717 - DNA, 2933 bp, Unknown; identical to SEQ ID NO: 3739
  misc_feature (1)..( 2933): 2750-1469P.txt file - cDNA_ID_3071717; gDNA_ID_1620660; Annot_ID_163801

SEQ ID NO: 33718 - DNA, 3000 bp, Unknown; identical to SEQ ID NO: 4391
  misc_feature (1)..( 3000): 2750-1469P.txt file - cDNA_ID_3071717; gDNA_ID_2926174; Annot_ID_199719

SEQ ID NO: 33719 - DNA, 3000 bp, Unknown; identical to SEQ ID NO: 3749
  misc_feature (1)..( 3000): 2750-1469P.txt file - cDNA_ID_3071720; gDNA_ID_1620660; Annot_ID_163800

SEQ ID NO: 33720 - DNA, 3000 bp, Unknown; identical to SEQ ID NO: 3749
  misc_feature (1)..( 3000): 2750-1469P.txt file - cDNA_ID_3071720; gDNA_ID_2926174; Annot_ID_199718

SEQ ID NO: 33721 - DNA, 3003 bp, Unknown
  misc_feature (1)..( 3003): 2750-1469P.txt file - cDNA_ID_3071730; gDNA_ID_1620660; Annot_ID_163792
tctcgcggcggctctagggttcttccgcttaactcgagattttgcaaacactttctttatgggtattgttatattcaccgaattgttgcatatctgtttctgattttgtgtaatatttcctggattttttttttgaaactctgttattttgtctgttgcttctttgattgtttatgtagaggaagaaactctttcaacgacatggactgtaataaggaagaagccaaaaaagcaatggatattgccgagaagaaactttcgaagaatgattacgatggagctaaaacattcatcagcaaggctcaggctttgtatccaaagctcgatggtttggaacaagtggtgatgatgatcgatgtttatatctctgcatcaaacaaaatcaacggagaagctgattggtatgggattctcggtatagatcctttagctgatgaggaagcagtgaagaaacaatacaagaagttggctcttttgcttcatccagacaagaacaggtttaatggcgcggaaggcgcgtttaagcttgtgcgacacgctagggatttattatctgaccagccttgcctaatttacaatgtgtattgcacttattgtttttgcacactgtccaaaaggtaatgtcttcctcctgtttccgtggtttcttctctttccatgaagaatcaggttcagggtcagactcagactcagaagagtcagaatcacactcgtacgcgtacttgtgtggcttacgatcataagagaaaaccaaaacaagttaaacggaagaggagcagaacgcaggatccaccaaagccacacaagtacaaatataagtacgagttccggaaaaggaacagaatgcataagccacacgagtacgcttacgagtatacttctgactcttctgagtctgaccctgaacctgattcttcatggaaacagaagaaaccacgaaaacaggaggaagacattaccttttggacagtgtgcaaaaacaataagtgcaatacacattgtaaattaggcaaggctggttatcttaacaagaccttgcattgtccaaactgccgtcaagaattcgttgcgacagaggtaattccagagatgaaatatgggaggccagtctacagctttaatgctaaatttcaaccaacaagcaaaagcacaagtgatgcttcttcttcttctacaacttcaacatctgataccgcaaatgaagcacaagatagagagtcgtcacaagaagagtttgttcctgctaatgcttcacctgctgctagaggagatgcaaacgaagcatagaggctttttaacaaggtgatgacaacaagaaatgcaaactctactctcgaagcatagaggcttttcaagtaacctatgacaaatgcgaaaataataagtaagacatgaggacttagcactctatatctctattttttattttgtgtgtcattgatagttttattttattttgatcttatgaaacttggatttacagtaatggagacacttctctttgctataaaggtaagagactgatacatcattcttttttaatttcttttcttagcttgaaaacttctaataatgatttggatcaataggtttttgaacagctaatatcattggcatcggtattggatcaatagtactacactgcactatttaaagtaaaagcattgatgttggttaaaggtgttgtctatgtgctgtgcaattgaaagtagagtaaaggcttagattttgattttgaccgtgtgcaatagctgccagacatgttttgaatatgcaaggatattttatctttaacaagaccttgccgtgtcaaaactgcgggcaagatttcgtttcgaccgagatcactccagagatggtcaatgggaggcaagacatcagactcagtactaattttcagtttacaagaaaaagagaaagtgatgcttcttctacaacttcagcatctgatagggcataggctgaaaaacaagcacaagaaacaataaaaaacatagtttgaggagtcacgaaaaaagcttgatgctgctattgctgctgctagaggaaatgcaaactctgctacatttggagaagagagactttccaagaaaccgatgaaaaactctactttcgaagaagaaaggtttatgagaactcaaaagttagtaaaacaaaagacaaatggtttatgagaagaactgaaactactaaaagaatgacgaaagtcagagagagggaaaagagaaaagaaggcgggaaagggagagaggaaaataactactacactaatagtttcccttttccgtccctaaagtctaaaattatttttatgtttgccccaattgtttttaacaaactcgaaaataacccttttgtttctagtcaaaaattacaatttttacacactggatccttcttctttaatttttcgcttctccaccgtttagggcattctgttattcaatcgcacaatgttgcttggttaagaagtgggtctccatcaaaaactgggcttttacacttattggtaagatgattttgctttgcacaagaatcccaaaagtttcttccttctatgggttttgtgtagtgtcggaatcttcaaatctattttgtaattcgtacgattactttgttgctttatatacagtaacttgagaaatctagggcttgttcttttgacttggtgatttgcatgtatggttttgcctataattaagatgttacttactagtttacacgagattcttctttttatgaattgtttttatccattcttcgattgttgtttgtgaaattgtgattgattatgtgtaattatgtagtggctttggatagagtaacttcagattcagagatctgtggctaaggacttgtttttctaacttagtgattttcatttacggttttgcttctgtttttcatccttcttaatcctttttcttttggctcctccaattggttttccatagagacaaggtgcaaaatcgtttgaaggattctttgttcaacaaagatatg

SEQ ID NO: 33722 - DNA, 3003 bp, Unknown; identical to SEQ ID NO: 19398
  misc_feature (1)..( 3003): 2750-1469P.txt file - cDNA_ID_3071742; gDNA_ID_1620660; Annot_ID_163786

SEQ ID NO: 33723 - DNA, 3003 bp, Unknown; identical to SEQ ID NO: 19398
  misc_feature (1)..( 3003): 2750-1469P.txt file - cDNA_ID_3071742; gDNA_ID_2926174; Annot_ID_199707

SEQ ID NO: 33724 - DNA, 3003 bp, Unknown; identical to SEQ ID NO: 19402
  misc_feature (1)..( 3003): 2750-1469P.txt file - cDNA_ID_3071750; gDNA_ID_1620660; Annot_ID_163782

SEQ ID NO: 33725 - DNA, 67 bp, Unknown; identical to SEQ ID NO: 4545
  misc_feature (1)..( 67): 2750-1469P.txt file - cDNA_ID_3071783; gDNA_ID_1620713; Annot_ID_165515

SEQ ID NO: 33726 - DNA, 3003 bp, Unknown
  misc_feature (1)..( 3003): 2750-1469P.txt file - cDNA_ID_3071783; gDNA_ID_1620662; Annot_ID_163843
aattaagcacgataacatattgcaccaattggctaaatctgataattaaaactgacttcaagcaaactccaaaaccaatgaccagaaaagtctctcctcaatctgaatgagcttaaactccttcctttatgtcaaacctaccaccccattaaagtttaactcctcctccaaatatcctccttaaactcaactagatggttttgactcgctattttgagccagggttatacagtcatcaatctgatgagcatccatcatccaggaagggaattactatgtttgaaacacgggtttgaaacacaagtatacaaacccgtgtttccttccatagacacaccctatgataagcagcttagaagcttctcctagtagcagaaataatcgaagaccataaaaagagcccatgttaacaaacagatcagagaattatctgtagcaatctagaccttgattgattcgtattagtcatccttccaccattataaggtctaccacgcggagtagcagaagcggctttacgagcaacggttgttgttacaggaaactggtttccttggaaattagacctcttcttagcaaaagcaccctgaaaatatgatataaatcacaacaccacaaaagaaaaaatcttctaagtgacaggaaaatgaagcttagacaacaaattcaccgagaacacaacaacactaacctgtctaacatcagaccgagagtccatataacgctgtgctttcaccgcactattcttcgcagcaccactaaatttctcctttttattctgctcaaacacaatatgccaaatgttcaataaagaatcaaagagagacataaaaatgtaagctttaacaaaccaagttactaaccaatactctctgtttcttgcccttattcacattggtattgctcttttccatcttgataatctcatctatacccacatacaaatgatcatgaagctataaactaaacaaaggatacatctttatatgagtaaataaattaaacataaacacacctaaagacatgtccattttcttctcagtgagagcaacagtctccgtagtaatcggtttctcagtcgccatctacatagaagtggacacaatttaaaccaaagatttcacaaaatcaaatacataaaccctaaaaatcattagttaaggttcaacgaattttgagtttattgaacttatgagaagcaaggagatacaaaagagataaagcaaaccctagtttttgaagattgatctgattcaagaatcgatcaaacaaaaccctcaattaaattgactcgtgtgaagaatggaggagaagctttaagagatgaaatcgtttaccgattttagaaagtcgattgtctcactgagacaaaaaaagagaggctttttatttttaatccgataacgagttaaaccaaagtgaactgagtcaaaacgtttccgatcatgtatacgtggcacattttcattggaagagatgattggttgttttgcatttttttttttcttgttctctcccttgaagttgaagagtttaacttcgctaagaggaacagagatggacttgagtttaatatgttctctgtttctaacaaatgtttttttttttgagttttcacatacaataaaaaatattaaaagttaattataatttataaatgcattattatttgtaatttacgatttaccattttctataaccttaattaatatagtatacaattatttttcttgaaatttataattcatcaataataactaataactattgcattggaaccaatttttttcctaaatatattatttaggaatagaggagtagttgtttttggcaaaatggtagattattataaatctaaagtggtagcagttaaatttgaaaaagatggatggcatagtaactaaaaattatttaccacaataccttaaaaaactatgaagaattgattaattaactaacagactaattaaaacccatatttgtcctttgaaattataattttaaataattttacgaaacctatttaagattacataatattttttttataaacaataacaccttttaaaattattaaaacttattcactatccagtttcctagtttttatatattttgaagcaataatgttgtgcttaaaatatatgacatcatagtgacaaaagagtttatttgtgaaatctcaatcactcattttgaaatgccattaatccgtttagtttccatattattaccaaagcctttcatgtaattggaaacttttgtgtttaagacttaatcttgtgttgcaggagccaaaagaaaaagaaaaaaacaaaaacaaagaaattgtaaagaagtgtaactagaaaaatcgatcactcatcttcaaatgtcattatccatcaagttgtcatattattgctagacagaagtggtcgtctagacttagttgacctgaaaaaagaatagtcaaagtcttttatatgtggacctgaaattagactttgtagtttgtacgtaagtttgtgttgctagagcctatatgagaaaaaaaaaacagtggatattggtgattggtttaatctggttaactccggttatctagatactggtttaatatcatttatcttgtgtatatataaactaaactttagtttattttgttgatgaacgttgtaacaaacacttaattctgttaataaagattcagtttaatctccgatcttttctcttcttttccgttttaccggaacttcgccggtgttaatatggtatcagagcatatcatttgagcttccgcatatcatcggagatgagtctttcattgaatcatctttctcttatgagagtttttcgattcctacaatcgtttgttgcaatttgcaatttcttcgtcagctatctaattttggttctgattcttcttctttccttcgattgaccttttgtggtgacgaatctcactttcttttcatttcgtctcactttctttgatttttctttaacaatttgttaagaatg

SEQ ID NO: 33727 - DNA, 3003 bp, Unknown; identical to SEQ ID NO: 33726
  misc_feature (1)..( 3003): 2750-1469P.txt file - cDNA_ID_3071783; gDNA_ID_2926151; Annot_ID_198102

SEQ ID NO: 33728 - DNA, 3003 bp, Unknown
  misc_feature (1)..( 3003): 2750-1469P.txt file - cDNA_ID_3071787; gDNA_ID_1621151; Annot_ID_173247
gttcccaagaaatgataatctcaagcctcttttggcaccgaaagaaatgggaaactcacaaaacaatggaaaacccacagaagccagcaagaccttaccaaaaattagtgctgccaaggggagcagtgtaaaagctgctggatcaaaactgaactcaggaaacaaacagtcggatgggcaacccaatcttacatcaagtaactctaaggaaatggttgaaaatcctgacgatctcaagaaagacaaaaggaaatgggcattgcaggttcttgcaagaaagaaagctttagctggcaacaactcaacccaagacaaagaaggctctcccgagcttaaagggaattatccattgttggtgtgtaattctcatcacttactttgtttcttttaaaaattctggttttttgagatgtcattcgtttgtttctaccatttctatcaggctcaacttccagctgatatgagaccaagccttgcaactagtcgccataataaagttcctgtggcagttaggcaggtacgtggatagctgataatcaagagaaagactattacgtagaattaactcctttaggtagaaatccccaagccgtgcttttattacatttacatacgttaaactgataatacagaaaattgaggctaatctgttattgattttcctgcaaaaacattattaacatcacaacttgtgcaatagctttacttgtttttgttcctaagcaaattgctgtttctgcagacacaattatatcgcctgacagaacatttattaaagaaagaaaaccttctgactattcgaagaagtgcagcgacagaactagccgttgctgatgctataaatatcgagaaggcgattgctgacaaatcaagtagcaaagttgtgtatctgaatctatgctcacaagaaatactgcatcattcagagagcaaaacgatggataatgctgtagaaccaaattcgtcatcaccaatggctgatagtgagtcagaacgtataagtagtaaagattcagataatccagccgtccttgaagcgctcagagcagcaggtcttgctgattcaccaccaaacagcccgacccgttcagtagaagttcttccagagaaaggagacagttccttggacaagaccagggagacaggcccatataatgtatttgacatggattctgttcctgatacagacatctttggggattttgaatatgaattggatgaagaagactatttcggtgctacaatggctaaaaaagcttcagtaatgcagccggatgaaagcttgactaaggtgaaggtagttttatccactgttcaacctggaaagtctttgaatccatccgaagtcgtagaggatgaagagacaacaactgaaaacctgaacgagaccacaaatggaaaagaagatggaaagagctttgttcctatggagcttgtacctgaggctgagggagaaggagaaggagaaggagaaggagaaggagaaggagaagggggaggtgagatcctttctgtagctgaatgtgaagaactatacggacctggtacagagaaactagttgaaagacctctcatcgaaggatttgctgagaatggtgttaaagctaaagcccctgattcagagtgcgagagcaacacacagagagagttcatcgcttcaaactttgaaatcacttgcattcaagagaaaaaacttcccagaagcattcaaaagtgcaaaccaagcgaaaagccgtctaaagaggaaaaaggcaaagctgatggctttggtaactccatcaccaagaaggtactaaaaactgtaaaagtctctgtcatgtcaaaattctcattccctttgtcttcactcttcaatggttttattgttttcgtcaggtggaagcatacatcaaagaacatattagaccactgtgcaagagcggagtgataaacgtggaacaatacagatgggcagtgactaaaaccacagaaaaagtgatgaagtatcatagcaaagccaagagtgctaacttcttgatcaaagaaggagacaagatcaagaaacttgccgagcaatacgtcgaaaccgcttcctctggagctcaccacaaggataagtgcaagtgagaaaatcagatggcgtaaataagaagatgaagtaacaagtagttcagtacaaaaacgtaaatagattttaactagtatctctcttttgtcttctccacgggttttggaaactgagtcttcttctcttagggcgagagaagcaattcttgttgtaccccgaaccagatagacctaaactgtgtctgaaactgagatttacttggtcgctgacaggtttttgaaaaaatatttagagatgaaaatgatatatttattattagttacatactttttcgtcactgtgattattaaactgaactagtaaacttaaaagctaaatgtaaaagaagatgatgatagtttgtttgggtcaaaggctcaaagcaatgaaattcttaaaatgcctattgggcctaacctgacgcatttctttatatttttgaaaattgttaaacgacgacggatctgttttctatagtgactctgacgcacttggataaacatacatgtgcaatgactataatacccttgaaacttgaggctatttcctacagtgacacattttgataaacatttgcgatggtcagttacggagttggagacaaaagagcttctgaatctctctctcttctgcgtctcgccaaatttatttcccgattcaatttgtagggtttctgcagaagaaggaaaccaccattaaaccctaagtacgtcacctttcaagctccttcttctgtaggttttttctgttcttctgattcatgtttacaaagttttttttatgtctcttctaacttcttctccttctcgccgcgtaatcagtccttattgttcttcataatcgcagtaccaatcgcaatcgttttcttcctctctcgatctgttcctcggacgagaaaactggacaacaaacctatg

SEQ ID NO: 33729 - DNA, 3000 bp, Unknown; identical to SEQ ID NO: 3753
  misc_feature (1)..( 3000): 2750-1469P.txt file - cDNA_ID_3071787; gDNA_ID_1620662; Annot_ID_163836

SEQ ID NO: 33730 - DNA, 3000 bp, Unknown; identical to SEQ ID NO: 3752
  misc_feature (1)..( 3000): 2750-1469P.txt file - cDNA_ID_3071787; gDNA_ID_1620662; Annot_ID_163837

SEQ ID NO: 33731 - DNA, 3000 bp, Unknown; identical to SEQ ID NO: 3753
  misc_feature (1)..( 3000): 2750-1469P.txt file - cDNA_ID_3071787; gDNA_ID_2926151; Annot_ID_198096

SEQ ID NO: 33732 - DNA, 3003 bp, Unknown
  misc_feature (1)..( 3003): 2750-1469P.txt file - cDNA_ID_3071798; gDNA_ID_1620662; Annot_ID_163824
ggaaggaaaggaatagcagattgcatacagttctcattacaaaaatcaagaacaatcattaggtgcaaacttgatcctctcttgctctctctagagttcaagagaactctcctaacgttatatcctttttggtcacttggtttgagttgtttcagtattagcctattaggtgttcgcaagtttggaaatatgttttcccttgcttgctttcgatgctattgtgcttatttaatggaagtttagttattttttaaataaacgttatgagtaaaaattatcatatataagaaatcatccacatatatattcaatattttattttattgttattgttatattttttatctgatctattttctgtatcataaatctgaggtttatgaattaatttcatgtatagtgtttgtatttgagtttggtgaaatactgccaagatggtgtgatgcttgtttgagtctgagaatttctttaattcaatgacctttttttatacatgttataaaatattatggatacttgcaagtcttctcctatttacttgtacaaatttgatttttgattcagctactatgtgacttgtatgacaaatacagtcgaaacttaatatgatattcggtacccaaatgacaaaaacccacgtacatcaaaagcagagaggctttataagaaatctatgactatcaattttattttttcccataaattatatgcatggtagaaatattatgaaatgagtttccttaactatggttggcaactaaaaatgtctttagtgacaaaaatatgcaacttttctacaaactgcaaatattagtttagattaaatcaaacaaatcatgccttcaaaaatctgtaaaacaaatctttttatttttaacgccggtggcaccatagacgaaatcgacaattttgaaggttggagttggatttgtctgaattttttttttattggaatttggaaagcagctgaaagatgactaaatgcgcagcaaaactcttcattcaggcttggcgtaacttgaatttgttttctttcttctatttttttagtttcattctagtttccgatcaagtcttatggttaaaatactcaattatatactcatcatttaggcatcgaaaacggtcctaacaaaacaccaaacatatattcctaggctttcacgtgtttaattcttacccgcatgatacatttccctcaaatggattgacataatgctattgttgttaactttttgtttgacacaaaatctatctagcaaattttttatagttatagatttaatatacgcaatgttagcttgattttgtttctaacttaaggaaaagttgaaggatgttttaatttgcaaggttctctttcaaaaagatttcgtgtaaattcgacaacggcctcaaacctactctaatcctgactctaaataatattataggttgaaagctttgtaattattgtttactaaaataagagaagaaaacattattacttactctcctttagaaatatatgtttgcattatgctgtatatatagatgaataaatgccataaacgtttaaatgtgtgttggtagatgtcattttacttcattcttagaggtctcttctatcaaatttagttacgtatataaatatagatgtcttgtgctttcttgcaaggaaataaacagagataatatactatttcatacacatccacacacatatagatgtctttttgtttgttgcatggatgtagacatacatccattcacatttccaagtatatacactaacctaatgacctaatgttcttgagagagacttctttcacaacctcttctagaatgtgagtttcttatatttttgttggtataaagtatttgaacatctttatcaaaagttaaaatgtttgaccatattcttggtaattcaaccggtaagtaaatgttattcttctatgacagaacccttaattttgcctgttgtatactagaggtttggttgggtgaaaagtgggcatgataaaaagaacaacatttagttttcctccttgatttttctaaattagagtttcgtatcaaaatacctaaaaaagcttgttttgtggtgcttccaatttcgaaatcggctaaactttttccacatgatttcttcttttacgatagtaagatttagaagaaaataaaaactgaataacgtcagattttccttaataaaagaagaagaaaaatctcacaacattttaagttcctttatttttttgatatgtgccctaataaatgcagtgaaataagctcacaacaaaagatgcacaacgagataaagccaaatgaaatttagtactggtatacaaattttaatgacacgttaatactctttttcgttttggttttataatcgtacttaatattcataactagcttcgaatctggtatttgtatacttaaaaagcttacatcagccaatctactatcattgaaattgtagtgagaaaatctaatataattctttagtgactgtttgtcaaaaaaaaaaaaaactcatgtctaaagtacataacaaattcaaattttgatacaaaattagttatttgtatttgttgtgaccatttctattctacattttgtttgattattagttgaattattcttagttaaatagagcaaacaaattaaattaaatgatttcttaatctataattactgtaaatacttcaaacatcttttaaatagaaacaaataaaataattactaagacatttgtccttatataagtctaataaatgtgtgttttaattcaatacctccaaaaataatttcaaaaaactagagttactgaattggtgctttcacacggtgcatgcattgtattcacacctatatgcatgtcatatattcatggtctctatgatctcgctctatataaacaccacccaatcgaccaaccttcttctctgattattttctcaaattatttaattaatttcttcttcttcatcaccaccaattacactcaaaattatg

SEQ ID NO: 33733 - DNA, 3003 bp, Unknown; identical to SEQ ID NO: 33732
  misc_feature (1)..( 3003): 2750-1469P.txt file - cDNA_ID_3071798; gDNA_ID_2926151; Annot_ID_198085

SEQ ID NO: 33734 - DNA, 3000 bp, Unknown; identical to SEQ ID NO: 3780
  misc_feature (1)..( 3000): 2750-1469P.txt file - cDNA_ID_3071828; gDNA_ID_1620664; Annot_ID_48023

SEQ ID NO: 33735 - DNA, 3000 bp, Unknown; identical to SEQ ID NO: 3764
  misc_feature (1)..( 3000): 2750-1469P.txt file - cDNA_ID_3071828; gDNA_ID_1620677; Annot_ID_164265

SEQ ID NO: 33736 - DNA, 3000 bp, Unknown; identical to SEQ ID NO: 3764
  misc_feature (1)..( 3000): 2750-1469P.txt file - cDNA_ID_3071828; gDNA_ID_1620664; Annot_ID_163877

SEQ ID NO: 33737 - DNA, 3000 bp, Unknown; identical to SEQ ID NO: 3780
  misc_feature (1)..( 3000): 2750-1469P.txt file - cDNA_ID_3071828; gDNA_ID_2926203; Annot_ID_141610

SEQ ID NO: 33738 - DNA, 3000 bp, Unknown; identical to SEQ ID NO: 3764
  misc_feature (1)..( 3000): 2750-1469P.txt file - cDNA_ID_3071828; gDNA_ID_2926203; Annot_ID_202001

SEQ ID NO: 33739 - DNA, 3000 bp, Unknown; identical to SEQ ID NO: 19457
  misc_feature (1)..( 3000): 2750-1469P.txt file - cDNA_ID_3071843; gDNA_ID_1620664; Annot_ID_163863

SEQ ID NO: 33740 - DNA, 3000 bp, Unknown; identical to SEQ ID NO: 19457
  misc_feature (1)..( 3000): 2750-1469P.txt file - cDNA_ID_3071843; gDNA_ID_2926203; Annot_ID_201987

SEQ ID NO: 33741 - DNA, 3000 bp, Unknown; identical to SEQ ID NO: 3790
  misc_feature (1)..( 3000): 2750-1469P.txt file - cDNA_ID_3071879; gDNA_ID_1620665; Annot_ID_163904

SEQ ID NO: 33742 - DNA, 3000 bp, Unknown
  misc_feature (1)..( 3000): 2750-1469P.txt file - cDNA_ID_3071894; gDNA_ID_1620695; Annot_ID_164920
ctttaatttaatctactatagggggtaaaaagtaaaaaagaaataaagatacgtttatccgcatatagtacctggaaataacagaaaataaaaacacaggtaagtactttgcctgagctagtatatgaacactaaagagatacacacacacaaaaagagagcagaaacaaaacacacacacttaaagctttcgtctttacctcttcccttctctctctctatctaaaaagagttccgagaagaagatcatcatcaatggcgacttctctcttcttcatgtcaacagatcaaaactccgtcggaaacccaaacgatcttctgagaaacacccgtcttgtcgtcaacagctccggcgagatccggacagagacactgaagagtcgtggtcggaaaccaggatcgaagacaggtcagcaaaaacagaagaaaccaacgttgagaggaatgggtgtagcaaagctcgagcgtcagagaatcgaagaagaaaagaagcaactcgccgccgccacagtcggagacacgtcatcagtagcatcgatctctaacaacgctacccgtttacccgtaccggtagacccgggtgttgtgctacaaggcttcccaagctcactcgggagcaacaggatctattgtggtggagtcgggtcgggtcaggttatgatcgacccggttatttctccatggggttttgttgagacctcctccactactcatgagctctcttcaatctcaaatcctcaaatgtttaacgcttcttccaataatcgctgtgacacttgcttcaaggtttgtttgttttttaatcgttttcatcaacatgattgatatatatatagtttttgcacttgaaaaagttttgatttttatttatgtaaaaaactgcagaagaaacgtttggatggtgatcagaataatgtagttcgatccaacggtggtggattttcgaaatacacaatgattcctcctccgatgaacggctacgatcagtatcttcttcaatcagatcatcatcagaggagccaaggtttcctttatgatcatagaatcgctagagcagcttcagtttctgcttctagtactactattaatccttatttcaacgaggcaacaaatcatacggtactaagtatagtccatttattaatactcatatataggtatatatgtatataactgttgatcttatttgatttaactggtgggtttagggaccaatggaggaatttgggagctacatggaaggaaaccctagaaatggatcaggaggtgtgaaggagtacgagttttttccggggaaatatggtgaaagagtttcagtggtggctaaaacgtcgtcactcgtaggtgattgcagtcctaataccattgatttgtccttgaagctttaaatgttttatctttctatattgatttaaacaaaatcgtctctttaaagaaaaaacattttaagtagatgaaagtaagaaacagaagaaaaaaaagagagagccttttttggtgtatgcatctgagagctgagtcgaaagaaagattcagcttttggattacccttttggttgtttattatgagattctaacctaaacactcagacatatatgttctgttctcttccttaattgttgtcatgaaacttctctctccctctctctctctaaagttgtgtcagatcttggggcttgtatccattttgtgtttctttagttaggcaatgatcctgtcatgattcatgttatcacctaattaatcctcggttttcgaaacggtgtcatgcatatctgattaatcttgttatctggtgtgagataaatgtatcaaattgctcttgtttatagcttttccaattaatgtcattgcatagcatatgggatgtacagcttcgttttcgatttataaaatttatacatgtgtttggtacgtactgttttgttttggatcagaattataaatttagtacagtataaactactttaaaaattggccaatgagaattttgagtttatcttctttttataagttgattgattttgctttgtttatttatagaaaatatgaaattttatcaattatttttgggatgcttttttattgattttagttcggctaaaattagttagatgtttaaatttattaaaacagatatgcaaaaattaactcgatggtttttttttttttttttagggggataaaaatcgaactatatagttaattaaaacttaaaatgtttttctgaacggctatttcactgattttttagtagtttaaatgtttttcaccgaaaataaaaacagaataggaaacaatactatagaagtctaaccaaaaaaagttcaatatccagtagttcaatatttctaaaaagaaaatttctacacaaagtttatggcaaaaacctaagttattatggagaaaaccaagttattgaaagttatagcgtactgtatgtacaatctttcatcgtgatttcatgtattatagataaaattattcattgtggatgtaatgcaaatagaaccatccgtaaatccatgtattacggaaaaattattcatcacaactcttatgtttgaaaatagttagattcggtcttagatcattattttaaaaatacaaataaacaaatacgatcgacaacaattgctcagcaaatttgacatactgataaagtcattgtttgacaaaacacatatgggccttaatatcaaaacacacggcccattataaaagtaaactgataagataaaacagttccctatgattcctcaataagcagctgctcagcacgttctcgtaattttcaacttcttgacaatttaatacatccattatccaaacaattagcaattaattacacttataaattaatttgtaaactaattaaaactgacaaacacggctctctcttcttcatcatcatcatcatcttcctctcgatcggaaaatagtcaaaagtttctataaattgttgaatcaaagcagagaagaagaagaagacgatcatg

SEQ ID NO: 33743 - DNA, 3000 bp, Unknown
  misc_feature (1)..( 3000): 2750-1469P.txt file - cDNA_ID_3071894; gDNA_ID_1620666; Annot_ID_163932
tttaatttaatctactatagggggtaaaaagtaaaaaagaaataaagatacgtttatccgcatatagtacctggaaataacagaaaataaaaacacaggtaagtactttgcctgagctagtatatgaacactaaagagatacacacacacaaaaagagagcagaaacaaaacacacacacttaaagctttcgtctttacctcttcccttctctctctctatctaaaaagagttccgagaagaagatcatcatcaatggcgacttctctcttcttcatgtcaacagatcaaaactccgtcggaaacccaaacgatcttctgagaaacacccgtcttgtcgtcaacagctccggcgagatccggacagagacactgaagagtcgtggtcggaaaccaggatcgaagacaggtcagcaaaaacagaagaaaccaacgttgagaggaatgggtgtagcaaagctcgagcgtcagagaatcgaagaagaaaagaagcaactcgccgccgccacagtcggagacacgtcatcagtagcatcgatctctaacaacgctacccgtttacccgtaccggtagacccgggtgttgtgctacaaggcttcccaagctcactcgggagcaacaggatctattgtggtggagtcgggtcgggtcaggttatgatcgacccggttatttctccatggggttttgttgagacctcctccactactcatgagctctcttcaatctcaaatcctcaaatgtttaacgcttcttccaataatcgctgtgacacttgcttcaaggtttgtttgttttttaatcgttttcatcaacatgattgatatatatatagtttttgcacttgaaaaagttttgatttttatttatgtaaaaaactgcagaagaaacgtttggatggtgatcagaataatgtagttcgatccaacggtggtggattttcgaaatacacaatgattcctcctccgatgaacggctacgatcagtatcttcttcaatcagatcatcatcagaggagccaaggtttcctttatgatcatagaatcgctagagcagcttcagtttctgcttctagtactactattaatccttatttcaacgaggcaacaaatcatacggtactaagtatagtccatttattaatactcatatataggtatatatgtatataactgttgatcttatttgatttaactggtgggtttagggaccaatggaggaatttgggagctacatggaaggaaaccctagaaatggatcaggaggtgtgaaggagtacgagttttttccggggaaatatggtgaaagagtttcagtggtggctaaaacgtcgtcactcgtaggtgattgcagtcctaataccattgatttgtccttgaagctttaaatgttttatctttctatattgatttaaacaaaatcgtctctttaaagaaaaaacattttaagtagatgaaagtaagaaacagaagaaaaaaaagagagagccttttttggtgtatgcatctgagagctgagtcgaaagaaagattcagcttttggattacccttttggttgtttattatgagattctaacctaaacactcagacatatatgttctgttctcttccttaattgttgtcatgaaacttctctctccctctctctctctaaagttgtgtcagatcttggggcttgtatccattttgtgtttctttagttaggcaatgatcctgtcatgattcatgttatcacctaattaatcctcggttttcgaaacggtgtcatgcatatctgattaatcttgttatctggtgtgagataaatgtatcaaattgctcttgtttatagcttttccaattaatgtcattgcatagcatatgggatgtacagcttcgttttcgatttataaaatttatacatgtgtttggtacgtactgttttgttttggatcagaattataaatttagtacagtataaactactttaaaaattggccaatgagaattttgagtttatcttctttttataagttgattgattttgctttgtttatttatagaaaatatgaaattttatcaattatttttgggatgcttttttattgattttagttcggctaaaattagttagatgtttaaatttattaaaacagatatgcaaaaattaactcgatggttttttttttttttttttagggggataaaaatcgaactatatagttaattaaaacttaaaatgtttttctgaacggctatttcactgattttttagtagtttaaatgtttttcaccgaaaataaaaacagaataggaaacaatactatagaagtctaaccaaaaaaagttcaatatccagtagttcaatatttctaaaaagaaaatttctacacaaagtttatggcaaaaacctaagttattatggagaaaaccaagttattgaaagttatagcgtactgtatgtacaatctttcatcgtgatttcatgtattatagataaaattattcattgtggatgtaatgcaaatagaaccatccgtaaatccatgtattacggaaaaattattcatcacaactcttatgtttgaaaatagttagattcggtcttagatcattattttaaaaatacaaataaacaaatacgatcgacaacaattgctcagcaaatttgacatactgataaagtcattgtttgacaaaacacatatgggccttaatatcaaaacacacggcccattataaaagtaaactgataagataaaacagttccctatgattcctcaataagcagctgctcagcacgttctcgtaattttcaacttcttgacaatttaatacatccattatccaaacaattagcaattaattacacttataaattaatttgtaaactaattaaaactgacaaacacggctctctcttcttcatcatcatcatcatcttcctctcgatcggaaaatagtcaaaagtttctataaattgttgaatcaaagcagagaagaagaagaagacgatcatg

SEQ ID NO: 33744 - DNA, 3000 bp, Unknown; identical to SEQ ID NO: 33742
  misc_feature (1)..( 3000): 2750-1469P.txt file - cDNA_ID_3071894; gDNA_ID_2926190; Annot_ID_200990

SEQ ID NO: 33745 - DNA, 3003 bp, Unknown; identical to SEQ ID NO: 19476
  misc_feature (1)..( 3003): 2750-1469P.txt file - cDNA_ID_3071912; gDNA_ID_1620666; Annot_ID_163948

SEQ ID NO: 33746 - DNA, 3003 bp, Unknown; identical to SEQ ID NO: 19476
  misc_feature (1)..( 3003): 2750-1469P.txt file - cDNA_ID_3071912; gDNA_ID_2926191; Annot_ID_201032

SEQ ID NO: 33747 - DNA, 3003 bp, Unknown
  misc_feature (1)..( 3003): 2750-1469P.txt file - cDNA_ID_3071923; gDNA_ID_1620667; Annot_ID_163989
ttgtcatttactgttgaaatttacttttgcttcaggttaaaggtgaagccaacatttcttacatctgctcacgattctaccgtgcacccgagctcatatttggtgccactgagtacacaacttctattgatatctggtctgctggttgtgttcttgctgagcttcttcttggtcaggtaaacaattctttcagtaaccagcttattcaatctccatgtgtatatttgcattaggactcattgtgactatatcatgttcttatgcagccattatttcccggagaaaatgctgtggatcagctcgttgaaattataaaagtaagaatctttaaacgatgattccttgcaaattacattctttggctacaaaatcctcactgtatagttgttgtacacaggttcttggtacaccaactcgagaagaaatccgttgtatgaatccacattacacagatttcaggtttccacagataaaggcacatccctggcacaaggttagtgtcttttctctttttgcatgtgttcttgtttcagtttctttcttcacacatcaactgatcataattacgttttggtttagatcttccacaaaaggatgcccccagaagcgattgattttgcatcaaggctgcttcaatactctccaagtctaagatgcacagcggtaagcattggtcttgaggtttcttcagtctctaagaatccaactgaatccttactatatattttgtttcctcgtatttcagctcgaagcttgtgcacatccgttctttgatgaactcagagaaccaaacgctcgtttaccaaatggacggcctttcccgcctctcttcaacttcaaacaagaagtagctggatcatcacctgaactggtcaacaagttgattccagaccatatcaagagacaattgggtctaagcttcttgaatcaatctggaacttaaaagggatcctgcaaaagacaactacttttttatatataatgtaccattacacgagccacaaggtcgtagttgaaggcaaacgtggaggacacaattcaaagtttttcctcctcaaactcgttcagacaaagccagctgctagcaaaaccaactcccccaaatctgcgaaaacaaaaactctccagtgttgtatctgcttatttctcttctcttttcaagtttggtgaaaaacacagtctcctctttgcttcatttcttctttctttcccccttatgtaaatgagtttagtcagaagtttttttatatagtaaagtttgggcagaaggtgaagaatgtaatcaaagtgatactctttcaacgaggagcttctttcaaacactttttttttttttcaaacacttcatgaatggatacatggttttgctttaagcataagtatatttgtattaaattttcactcaatttaattgcacgaatcattacaaaaataatatctcgctactcatataaataccctataaataaataagtgaattttttttatctctcatggaaatttgatttatgtatttatatgttttaagattcgaagaaatttttaaataatgaaaatttacaaatatataattcttaattcagaatttcagatattgaattacttattggatttttaaaacaaaaagaaaattacatgactttttttttcttttttttttttaaatatctgttagttcaagttaaaagaccatacattttctaaaggcgggacctatatcaggttaaattcatctccttttagaaaaaaaatatatttgggaaaggctttgatagcaagcaattaaagtatccgaaactaacaaaacctatctggtcttggactcttagtctttatataaacaacatcagatagatcgagagaccatacgcaacaatttactaatttctcttctccttcgttgcttttgaaaccctagttattatcgagagatcaaacacgtacgtacacaaaagaccgatcaaacagagaaggatgcagaagcgtgagttcatggagttgttcgaggcagcacttagagcggctaagtctgtgaaaggtgatgagaattctccagaggtatcgaggtttgtcgatgccatgaatcgtttgaaggaagcacccaagtcacttgtttgtgacgtggtctgcaaaacctccatggggcagggtttggaattcttcatcgatcacaaaaaccctaaaattcgatcggaaggaaggattcttcgggatctttggatgaagtttttttacgcttcaggtagagaaaagagccgtgataatagagaagctgcggtgaagatcccgacgcacgcaacgatgaagaagactggagattcaaagcgagacaaagtgcgtgagattctacaaacatctttggctaaagtcgcttctgaggttgttgacacggagatgaagacacgagtgactgcttgtgatccttgggttgtggctgtatctgtggaaactgcaatgtttgagaacttaggttgtttcatgggacctcaaaaagcaaagtaccggtctattctgttcaacatgggagatagtaacaatccagatttgaggaggaaagtgttacttggtgagattagtggggagagattagtgaagatggagaaggaagagatggggagtgagaagattcagaaggaggttcaaaggattaaagagagagcaagatttaaggaagagagtcgcgtgaagatgctttcatcagcagatatgatcatcatttagttagctgcagagatttagtcatgagtttcattattgtatagaatcagtattcgtgtcaattttctatcacaaactcgagatattagtagattgtaatttcaatacgatgatcgttttcaagttgcttcattgaatggtgtttctaaatctgcgtttaaagaatctagtcaaagtgtttcgtttcataagagggagctctgcagtttatgcagtttaaggggtctttggttttttcttttgaatgtttgtcttctattcgcattaggactcattgttcttatg

SEQ ID NO: 33748 - DNA, 3003 bp, Unknown; identical to SEQ ID NO: 33747
  misc_feature (1)..( 3003): 2750-1469P.txt file - cDNA_ID_3071923; gDNA_ID_2926171; Annot_ID_199503

SEQ ID NO: 33749 - DNA, 3003 bp, Unknown; identical to SEQ ID NO: 19484
  misc_feature (1)..( 3003): 2750-1469P.txt file - cDNA_ID_3071935; gDNA_ID_1620667; Annot_ID_164000

SEQ ID NO: 33750 - DNA, 3003 bp, Unknown; identical to SEQ ID NO: 19484
  misc_feature (1)..( 3003): 2750-1469P.txt file - cDNA_ID_3071935; gDNA_ID_2926171; Annot_ID_199512

SEQ ID NO: 33751 - DNA, 3000 bp, Unknown; identical to SEQ ID NO: 3838
  misc_feature (1)..( 3000): 2750-1469P.txt file - cDNA_ID_3071987; gDNA_ID_1620669; Annot_ID_164034

SEQ ID NO: 33752 - DNA, 3000 bp, Unknown; identical to SEQ ID NO: 3838
  misc_feature (1)..( 3000): 2750-1469P.txt file - cDNA_ID_3071987; gDNA_ID_2926170; Annot_ID_199461

SEQ ID NO: 33753 - DNA, 3000 bp, Unknown; identical to SEQ ID NO: 3853
  misc_feature (1)..( 3000): 2750-1469P.txt file - cDNA_ID_3072039; gDNA_ID_1620670; Annot_ID_164069

SEQ ID NO: 33754 - DNA, 3003 bp, Unknown
  misc_feature (1)..( 3003): 2750-1469P.txt file - cDNA_ID_3072066; gDNA_ID_1620671; Annot_ID_164105
ttcttcttcattccgcgccgccgtcccgcgttttttctttatttgactcttctcttcgaaacgaccgtggttttggtgtttattgaaacgacatcgttttgttcttcttcttcctcagttttgattctcaaaatccacaaccctaaatccacgcttcttctctgctcttcttactcaattcttctgcctctttcttggtccttgtccactaatcgtttgttcgtctcacggcacgaattcaaatttgtaagttgagctcgtcgaattagtgaaacccgagaatagtagaattcagcagagagatgaagattgcaattgaaggttgtatgcatggagacctagacaatgtgtataaaacaattcaacattacgaacagattcacaacactaaagtcgatctcctcctctgctgcggcgattttcaggtaatcgtttgtttttttttaccttgaaaataaaaatccattcgattctgcttcctaagtctgaaaagattcgttctttgtggaaaacattaggctgttagaaatgagaaagacatggatagccttaacgtacctagaaaatacagagagatgaaatctttctggaagtactactccggccaagaagttgctccgattcccacaattttcattggtgggaatcatgaggcttctaactacttatgggaattgtaagttatctagtatttgagtttaggattccgaggcttaaaaaatgtgttcttgatggttgctggttgttgtgctataggtattatgggggttgggctgccaccaatatttactttttgggttttgctggagttgtcaagtttggtaatgtgcgaattggtggcctttctggtatatacaatgagcgtcattaccgttcaggtttgtttcttcttcatctctctgacaaagtaccaatttttcagcttttgaaatgggagaaagttggatttctgagttagtgtctatagtggaaatgtatagattagggaattcgtttgatttgtttggtgtcaataaagtgagaatcagtcatttgtgtgagtaggacactttgagcggccaccatataacgagagcaccatcagatcggtctatcatgttcgtgactatgatgtccagaagttgatgcaacttgaagagccgcttgatatatttctatcacatgattggcctgttggaatcactgattatggagactcagaatcacttatgcggcaaaaaccatactttcgtcaagaggtaaatctgtgggaacatgattctacttcttcattttggttttgagaggttttcaattgatttgaccaaaatttattacagatcgaggaaaaaactcttggaagtaaaccagcggctctactgctagaaaaactgaagcctcaatattggttttcagctcatttacattgcaaatttgctgctgctgttcaacacgggaatgatgggtcagtgacaaaatttcttgccctcgataaatgccttccagggaaaaagtttttacaggttctctttctttcctgtccacaacattatgctttgttcttttgaaacaaaaaggatatcttttaatttctttggatgttcattagattattgaaatcgaatcagagcctggaccctttgaggtcctatacgatgaagagtggctagcaatcacacgaaagttcaattctattttcccgctaacaaggagatacacaaacgtcaggtataccatcccgaacaagctacctactaagaaatgtttatatatcttccatttatctttctacctaccgtcccacttacgtattgttttactacaatagcactgctggaactatacaagagagccgtgagtgggtgaggaagaagctagaagaaaggcaatttaaaccttttgagtttgcgagaacagtacctgcatataacccatcacaacgtgtatttgattccattcctggtatgttaatagtgtactggatatagaggattataaaaagttgatggatcgattaaaagtgttttattcatatggcattttgtagagatcccgcagaatccccagacgctgtctttgttagagctccttggtctcccatatctccttgattcatcaccagtaacaggggaaagaaccgatatccctgcttcactggctccatcaggtatgacgatagttttctttgtagatgaggacttggtttgggattatcagatacatattctgtgaagttgttcatttactctttctatctgcctattgtcatgaaactgcatcaagcaccaatgacagagatgtttagtgcagtgtcaagaatcaaacatgtcttgttgtgtattgcagatcttccgacatatgatagcgaagaaatcccaattgatgacattgatgaaatagaagagatggaggaagcaaaagcagatgatcatacaagagacgatgcatgaatatctccattccagtggtcagaatatattttatcttgctaatatctgactgcttcatcgtcaagctggaaaacaaccacattagttgggattctgtgattagaaaaccaagttttcttgttcattttttagaatcagcataagttttatttgtgatattaaagaaaagtgaatcataaaaatgtcttggagaaataaaaagttagatattaatgtttcatccagtattcaagaaagttgatcaccttttcttccacaagttctctggcatgcattggcttgggaagttactcgccgacaaaacccatagataagtatgtcggattcacttaaaaccatggatgatgctgggaatgttggattcaactaaacacgaccatcaatgattcttcattgaatgcgttgactcaacttcatcacctcaactaattttctatctctgacactaacatcaaatgcaaattatgaagtgaacagttgcagtttattacaacaaccttcaagattcctctcattctcctttctattttcattgtcactttattcgagtcaaaacacagagacaataaaaatg

SEQ ID NO: 33755 - DNA, 3000 bp, Unknown
  misc_feature (1)..( 3000): 2750-1469P.txt file - cDNA_ID_3072066; gDNA_ID_2926200; Annot_ID_201801
ttcttcattccgcgccgccgtcccgcgttttttctttatttgactcttctcttcgaaacgaccgtggttttggtgtttattgaaacgacatcgttttgttcttcttcttcctcagttttgattctcaaaatccacaaccctaaatccacgcttcttctctgctcttcttactcaattcttctgcctctttcttggtccttgtccactaatcgtttgttcgtctcacggcacgaattcaaatttgtaagttgagctcgtcgaattagtgaaacccgagaatagtagaattcagcagagagatgaagattgcaattgaaggttgtatgcatggagacctagacaatgtgtataaaacaattcaacattacgaacagattcacaacactaaagtcgatctcctcctctgctgcggcgattttcaggtaatcgtttgtttttttttaccttgaaaataaaaatccattcgattctgcttcctaagtctgaaaagattcgttctttgtggaaaacattaggctgttagaaatgagaaagacatggatagccttaacgtacctagaaaatacagagagatgaaatctttctggaagtactactccggccaagaagttgctccgattcccacaattttcattggtgggaatcatgaggcttctaactacttatgggaattgtaagttatctagtatttgagtttaggattccgaggcttaaaaaatgtgttcttgatggttgctggttgttgtgctataggtattatgggggttgggctgccaccaatatttactttttgggttttgctggagttgtcaagtttggtaatgtgcgaattggtggcctttctggtatatacaatgagcgtcattaccgttcaggtttgtttcttcttcatctctctgacaaagtaccaatttttcagcttttgaaatgggagaaagttggatttctgagttagtgtctatagtggaaatgtatagattagggaattcgtttgatttgtttggtgtcaataaagtgagaatcagtcatttgtgtgagtaggacactttgagcggccaccatataacgagagcaccatcagatcggtctatcatgttcgtgactatgatgtccagaagttgatgcaacttgaagagccgcttgatatatttctatcacatgattggcctgttggaatcactgattatggagactcagaatcacttatgcggcaaaaaccatactttcgtcaagaggtaaatctgtgggaacatgattctacttcttcattttggttttgagaggttttcaattgatttgaccaaaatttattacagatcgaggaaaaaactcttggaagtaaaccagcggctctactgctagaaaaactgaagcctcaatattggttttcagctcatttacattgcaaatttgctgctgctgttcaacacgggaatgatgggtcagtgacaaaatttcttgccctcgataaatgccttccagggaaaaagtttttacaggttctctttctttcctgtccacaacattatgctttgttcttttgaaacaaaaaggatatcttttaatttctttggatgttcattagattattgaaatcgaatcagagcctggaccctttgaggtcctatacgatgaagagtggctagcaatcacacgaaagttcaattctattttcccgctaacaaggagatacacaaacgtcaggtataccatcccgaacaagctacctactaagaaatgtttatatatcttccatttatctttctacctaccgtcccacttacgtattgttttactacaatagcactgctggaactatacaagagagccgtgagtgggtgaggaagaagctagaagaaaggcaatttaaaccttttgagtttgcgagaacagtacctgcatataacccatcacaacgtgtatttgattccattcctggtatgttaatagtgtactggatatagaggattataaaaagttgatggatcgattaaaagtgttttattcatatggcattttgtagagatcccgcagaatccccagacgctgtctttgttagagctccttggtctcccatatctccttgattcatcaccagtaacaggggaaagaaccgatatccctgcttcactggctccatcaggtatgacgatagttttctttgtagatgaggacttggtttgggattatcagatacatattctgtgaagttgttcatttactctttctatctgcctattgtcatgaaactgcatcaagcaccaatgacagagatgtttagtgcagtgtcaagaatcaaacatgtcttgttgtgtattgcagatcttccgacatatgatagcgaagaaatcccaattgatgacattgatgaaatagaagagatggaggaagcaaaagcagatgatcatacaagagacgatgcatgaatatctccattccagtggtcagaatatattttatcttgctaatatctgactgcttcatcgtcaagctggaaaacaaccacattagttgggattctgtgattagaaaaccaagttttcttgttcattttttagaatcagcataagttttatttgtgatattaaagaaaagtgaatcataaaaatgtcttggagaaataaaaagttagatattaatgtttcatccagtattcaagaaagttgatcaccttttcttccacaagttctctggcatgcattggcttgggaagttactcgccgacaaaacccatagataagtatgtcggattcacttaaaaccatggatgatgctgggaatgttggattcaactaaacacgaccatcaatgattcttcattgaatgcgttgactcaacttcatcacctcaactaattttctatctctgacactaacatcaaatgcaaattatgaagtgaacagttgcagtttattacaacaaccttcaagattcctctcattctcctttctattttcattgtcactttattcgagtcaaaacacagagacaataaaaatg

SEQ ID NO: 33756 - DNA, 3000 bp, Unknown; identical to SEQ ID NO: 3865
  misc_feature (1)..( 3000): 2750-1469P.txt file - cDNA_ID_3072070; gDNA_ID_1620671; Annot_ID_164100

SEQ ID NO: 33757 - DNA, 3003 bp, Unknown; identical to SEQ ID NO: 19529
  misc_feature (1)..( 3003): 2750-1469P.txt file - cDNA_ID_3072075; gDNA_ID_1620672; Annot_ID_164136

SEQ ID NO: 33758 - DNA, 3000 bp, Unknown; identical to SEQ ID NO: 3891
  misc_feature (1)..( 3000): 2750-1469P.txt file - cDNA_ID_3072079; gDNA_ID_2926150; Annot_ID_197989

SEQ ID NO: 33759 - DNA, 3000 bp, Unknown; identical to SEQ ID NO: 3891
  misc_feature (1)..( 3000): 2750-1469P.txt file - cDNA_ID_3072079; gDNA_ID_1620672; Annot_ID_164135

SEQ ID NO: 33760 - DNA, 3000 bp, Unknown; identical to SEQ ID NO: 27349
  misc_feature (1)..( 3000): 2750-1469P.txt file - cDNA_ID_3072089; gDNA_ID_1620673; Annot_ID_164169

SEQ ID NO: 33761 - DNA, 3000 bp, Unknown; identical to SEQ ID NO: 27349
  misc_feature (1)..( 3000): 2750-1469P.txt file - cDNA_ID_3072089; gDNA_ID_2926200; Annot_ID_201783

SEQ ID NO: 33762 - DNA, 3003 bp, Unknown; identical to SEQ ID NO: 15927
  misc_feature (1)..( 3003): 2750-1469P.txt file - cDNA_ID_3072093; gDNA_ID_1620673; Annot_ID_164167

SEQ ID NO: 33763 - DNA, 3003 bp, Unknown; identical to SEQ ID NO: 19747
  misc_feature (1)..( 3003): 2750-1469P.txt file - cDNA_ID_3072104; gDNA_ID_1971819; Annot_ID_176096

SEQ ID NO: 33764 - DNA, 3003 bp, Unknown; identical to SEQ ID NO: 19747
  misc_feature (1)..( 3003): 2750-1469P.txt file - cDNA_ID_3072104; gDNA_ID_1620673; Annot_ID_164152

SEQ ID NO: 33765 - DNA, 3003 bp, Unknown; identical to SEQ ID NO: 19747
  misc_feature (1)..( 3003): 2750-1469P.txt file - cDNA_ID_3072104; gDNA_ID_2926200; Annot_ID_201767

SEQ ID NO: 33766 - DNA, 3000 bp, Unknown
  misc_feature (1)..( 3000): 2750-1469P.txt file - cDNA_ID_3072108; gDNA_ID_1971819; Annot_ID_176095
gaatttcatcttgaatattccatgactgattagaaccggacttccttttcagctgcatttggtaaccaatgtcagaatgaataagggtaaatttgagagagccattgaaaatacatataacggtatgcaacttttctttaggaatagctggaaatagtgtcccacaaattcctcgtggttatctaacataaacaatagaagttaagcagagaattttatctcataaaccaagatgaaacgacttcagactttcaaacaacatttgaccaaaagaaaagtatgcactgctggagaacttaaaattctaaccttggatgaggaaaagtttccagcgctataaggaaggggtgtcccttgcactcttgctgatgatggtgatcgaaaatctaaattattcgcagctggagatccccatggcagacgagctcgcatataagacttggccacgtccacaggcgatccagcaccatcttcagttgcctggagatttaaactaatggctgagatggtgatcatcatttaaagtacaatggaaaaagaatactgtgaagcgaagctatcagaagttgaccaaaatcatgtaagtaaatggtcttcatagtcaaaagaagagcaacaatatggatcttttgcattttaagcggacaaaaaggtatttcccaatcaggacatttcagaattaacgtcaccagatggccacacgcagaattctgaacaacctacttttgcaagagagctttaagttgctgatcacatggattggcatataacaatcaaatcattttacccaaacagaagatgtctccttctataataataatggcttagagcacggagacaagatatcacaaaaaagttgatacctgcaggctgcagcaattagaacagttaagaagcaagtttccagaacttactttatactttgaacttgatcctgatttcttctcctccaaccattttcttgcttccatgacagctgtattggacatttcacccacattcacgtctagaaataaaatagaaaagaagacgttatcacatagactaatccggtctacttgcacagtctaccatcagtaacataccgcttgtcaatccatagtcatcatgactcgtctcaatagcagaggggacgctgggatgatctacaaccctagccttgatgatatctattaacctatcaccctcttccctgaaacaacatacacatgaatgaataagcaggatacaagatcagcttagatttggtaactacacacgtctcagaaagattctttaagctatgaggtgtaaataataagaatagtcgaggaggctgctacttatgatgtccaaaaagccaggcagagaaataccttgcaaatgtttcttgcaagagaagctgctcaattacacgcttagaactgagtcgttgaatgcttggttgctgggcactcagaaggtcctattcacacaagcacaaaaactgaaattatgcttttataaaaaaaactctcagttgaaaacgtgttagcttcacgaactttacttcaaacaattatcataggactacagtggcatagcaatcaccaaaacgaacaaggtggttagtacctcttcagtaaaatcgggattgttcttctcaacatcctcatcaccatcaatatctgcaaacaaagaagaaaacatataaaaatccatacattaaaagaataagacacaacaaagctggttggtattctcaatcccagaactacattatatgaataaaaattagagctttagaattagtatgaagtttatagcttagaagtaacctaactaaatagagtacaacaatgcttaactgctcttaagtcccacatattaaaggaaagagaaaatgggaaagctttaagtcaaacttcacatttcaaacgaaacggtagctttcagattcgaccagacaataaaccaaaaattcaaattaatcctatctaaactgaaataaatggtacaaacctgaagatgaatcctcgtcctcctccgaagatgaggaagagtcggagaagacgacggaagaaatgaattttccggcgccggaagcaattacgctggcgggtttgtaaacgagcctggagatccaactagggttttgctgaggaggatctcgggatctctgaacggggcgctcacacggcgtcctgacaacagcggtgcgtcgtggtcgaacaattttcccaccgactcgaggctgacctgctccggcggcgtaaccggagacggaatccatggtgaaagtgagaggaggagggagaagttcgttgtaggaaataatgaaagtgttgaggaaaaattggtaatttctcgttatttgtcgtcttcttgtttttttttttaattgggggtgaatagttagtttcctaaattacaggcctgcggttaaaatttcttccactaataaaattaggcaaaaacaaaacattgcgattaaaaaaaattaatcgtagtaaaatcatgtattatattcttctcttttcatattttgaacatatcacatgatgtttagatcttataaatgcagtaatttaatagagagattagaatttggaagaaaaaaaagttacatgattaaacgaagtaattaatcaagttgtaagtagttattttaaaaacaatattagaaaaatgttttttggttactcatacagtaatacttaattcgtcaactgtgtcagtgttacaaaaaggctaaaagaatgggccaaatgggctactcttgtatcgggtcaggaacgggtcagttccaacccgatcggatctaaaatgggcggggcgccttccttttcattttgatggcaatcaatcatcatcaatcgacgcttttttagagacaaacacgatcgccgatccatttacgagccgtcgttgctctacacatatcaacaacaaatcttatcctcccaactatcttttctctgattttcttttcttctccagtttccatttctagaatcgatcgatattgaaggagagaagatg

SEQ ID NO: 33767 - DNA, 3000 bp, Unknown; identical to SEQ ID NO: 33766
  misc_feature (1)..( 3000): 2750-1469P.txt file - cDNA_ID_3072108; gDNA_ID_1620673; Annot_ID_164151

SEQ ID NO: 33768 - DNA, 3000 bp, Unknown; identical to SEQ ID NO: 33766
  misc_feature (1)..( 3000): 2750-1469P.txt file - cDNA_ID_3072108; gDNA_ID_2926200; Annot_ID_201766

SEQ ID NO: 33769 - DNA, 3000 bp, Unknown; identical to SEQ ID NO: 4477
  misc_feature (1)..( 3000): 2750-1469P.txt file - cDNA_ID_3072158; gDNA_ID_1620708; Annot_ID_165372

SEQ ID NO: 33770 - DNA, 2037 bp, Unknown; identical to SEQ ID NO: 3918
  misc_feature (1)..( 2037): 2750-1469P.txt file - cDNA_ID_3072158; gDNA_ID_1620674; Annot_ID_164213

SEQ ID NO: 33771 - DNA, 3000 bp, Unknown; identical to SEQ ID NO: 20095
  misc_feature (1)..( 3000): 2750-1469P.txt file - cDNA_ID_3072158; gDNA_ID_2926210; Annot_ID_202559

SEQ ID NO: 33772 - DNA, 3000 bp, Unknown; identical to SEQ ID NO: 3925
  misc_feature (1)..( 3000): 2750-1469P.txt file - cDNA_ID_3072168; gDNA_ID_1620708; Annot_ID_165363

SEQ ID NO: 33773 - DNA, 3000 bp, Unknown; identical to SEQ ID NO: 3925
  misc_feature (1)..( 3000): 2750-1469P.txt file - cDNA_ID_3072168; gDNA_ID_1620674; Annot_ID_164204

SEQ ID NO: 33774 - DNA, 3003 bp, Unknown
  misc_feature (1)..( 3003): 2750-1469P.txt file - cDNA_ID_3072175; gDNA_ID_1620674; Annot_ID_164198
tcaaagacaccatcctgaatgttctggaggatcttggcagcagtctctatgaaggcctgttggaatccagaaaaagaagacaaaagtctccatgtgattacagccaaataacaggatggggaaaaagagttgcaaggaagaaatgtcacctcctcaacgttttgagcagttcttgcagatgcttctaagaatagcaggccatgttctttggcaaactgttgaccttcctctttgctaacagctctcttgtgagcaagatcacatttgttcccaatcagcataatactcatgttaggatttgcatgttgccgagcatcctccaaccagcttgccagatggttaaacgtctctctcctgcaacccaaagaaccaagaattttgagcttcagaaagatcaaagcatgaaaaacctcaatgataaaactcttgcaattcttcatgtccttcataactttcaaaattccaaaacaatggaggaaaaatatctattttagcaagaatttaagatggatggttaacttaacatcctcccaaacaagcattgccaatattatagccaaggattttgttcagataaaagtaacttcccaatttccaaaacctttccaacagtctaggtttatcaaatcacaaatacagaaccaatcacttccaaaaccttgctggggaattcagaagttcgagctgatatatattgtcgcaaggcaaaaactaacctggtgatgtcataaaccagtaaagctccggctgctcctctgtagtatgatctggtgatggatctaaaagattcttgtccagcctaaaaaatatcatacgaaactttaatcagaaagcacaactccaacacatacatcatctaatggaagaactattgaccagaagaaatcacaacaaggaatgcactggtgaactcagcttctattacaataagcctatgaaacttaatcaagaaccgtgcaatgattaacttttttgaaattttaccccactttgagtctctggacatgattttcaaacataatttttggtattggcaattctaatgaggcattgtttatataaaaacgaagaaattgaattgattatgacaattaatcttcttaatcacatcctgccttagggagaaaaaaaaaacaatcctaatcgataaaacgtgattagttccctgatgacctaattacgaccaagagaagagagaggaagcgtacggtgtcccaaatttggagtttgatggggcgtccatcgacggtgaccatccgagcaccgaactcaacaccaatggtgagatcgtggactggttggaacctcttatcagtaaattgcagaagcagacacgattttcccacacctgaaacgacaaaaaaaacaacaacgaaaacacatgaaaatcggcacgaaatggatttaacccagaaaaataaaacaattgggaattaagaaaggtgaaagatcggtctctcacctgtgtctccgatgattatgtacttgaagagataatcgtaagacatggttgatgaatttgagcaaggtcgatgatgaattagcgcaggtcgatgggttcgagagaaggagatgtgaaagagaggaagaagagattgaagagtacaagtcaccgacgtgctttttgatttcgaggtttctcgatgaagaagctatcttctccttctcatcttttataatctttttacttaattactaaaattaaagggatctaatgacgaattatctgaataattgtttttcttttgtatccttaagtttcaacagtaaataaaaatccacacaaaatactctatagtataatttattaattattatagtcgttttagttaattatttaaaaacagagggaccagatgaaaaatatctgggaaacaaattaaagcttaaaatccatctctgcctttggctccgtccactctgactcgactagtgcatcatccattgttgggcatttgatagtttaaagtgggcttttttatttttttataatgtgggcttttttctttgatgttgaatggcttggttagtggatttcgagaccagcataagtttcttttttctattcatctgaagcatggcgcagtccataatcgctaaattgatgatacaaaagaacttgcacatcaaaactgtgaacttaccagaaatttgcattagcaaaagcttcttttattatatgatggggaatacacacgtaccttgatacaaggctactaatatcaattgtgtccggattatcacggtagtatgctctgtttcatatctcttatggaaattacataactgtgtttaagatgaatgttctagtgggaagataagaagaactcaaatcctacattagagatgagttccttacaaatgcttatagtctacaatggcaaattcgagaagcaaattcgaaacagagttccatccattagagaacaggggatgttatttcatcccaaactcaaaccgatcttagttatgttatttcgtatttttttgggtattttaccttcaaattatttgattaatttcatgctttaaggagaatttgattaaaatgaatatacaagagttatgaatttgattatattctcttattctactaatcacgaaatatttagagaatatgtaattatcgtttaaagaactatcgttttattcataaaaactctgtaaattaccaatttgatatacttctatcaaattatttatattttttagttgtgttaattcgttttttttgggtgtatttatcttaaaaagatgggattaaatttcatgatttaaggagaagaatcttttgagagattcgaaaccgcgatagcattccttgttcctccttttctatttacctttctacttttgccatcatcttcgtcgatctacttcccccaaagtctaaccctaaagcccccaaatttctcctgatcaaaaccttgttgtataaatcctgaatctctgaagaaacttcgaagatttgggtttctcaatttggttgagaaattcgcgatg

SEQ ID NO: 33775 - DNA, 3000 bp, Unknown; identical to SEQ ID NO: 3933
  misc_feature (1)..( 3000): 2750-1469P.txt file - cDNA_ID_3072185; gDNA_ID_1620674; Annot_ID_164190

SEQ ID NO: 33776 - DNA, 3000 bp, Unknown
  misc_feature (1)..( 3000): 2750-1469P.txt file - cDNA_ID_3072213; gDNA_ID_1620675; Annot_ID_164245
cctcaagctcagcaagttccttctttttcctctctttcttggaaagttgcctctctgcctccttaggaggagcacgaacttcaggagcctttttcacctcaggctctgcttctggatgaacttgtgtctctgttccctgctcgtgatcttcctccacatcatcatcatctccatcatcaagagtgtcttcttcgctttcaatttcctgcgacattgaaatcaaatgcatctctatgagaaacaaatgaacagataggcacacaaccacggtttagagaaaccattgcacaacaaacttacattgcctagaaaaatttcgataacaatgcaattagatatatgaaccttcaggagacaaagcagcttacttcacaataacattaatttccctttcagaattcagacaacacaagcctaagcctaagcgagataacaacagtagaaaaaaaggccaactcattcaattcgtggaagcatttgaaatctaaagaggcttattgcaagagacatattaaaccagtgttacaattttcaacatgtgaaatgcataaagctatgatgatgaacccaaaatcaacatatatatgaaagatttggacttgtgacctcagcgggaacgtctttagcatctgaatgggaggcttcagaagtgctccacagggactgaggtggagcagtggtagcgtaataatcatcatcttcatcatcgctatcgatatcagcccaagcctttgctttgagaggcgtaggtgcccagaaaacctgtggctcaggctccttctgtgaatcttctctcttagaggaagctttgctcttaccagccttatcagacttcttcttcttcctcgaagtatccaaagcagcaaacaagttggtgttctgaatcggcatcgatccctcatctctcctgtttccaccaccaaccatcttttttctttcctcgatcaccacacaataagtcacagagtgttttctgataaaaacccagaaacgaagtttcacaatttcagctggaagatgaatctcgagtaagttaaggtaatgaaggatgggaaaggaaaagctgatgaattgtcgctattttcttaggaaaggattgatctttaaagcaaatcccttgaaactctgatggacggcgattgaagaaagcgatggatgctataataactactagggttccagacccagaaacgacaaaatgtatactggtgattaatacaagcgtataatataggaaactgaaattgagagacaaaggagaaacaagagaatgttggaagcttcgggaagcgattcctatagaatgcgagagagagatgattagggttttcttaagggatgtggtgtgtagcaatcgtagcgattagagctactgggctacacgacaagggaaggggatctgtctctatttgggatgttatctcctctcttatggatcatcaaaccgaacatttgattacaaaattgaaccgaacatttgattacaaaattgaaccgaacattggattagactgtctaattaaaccttaatttggtttatgaactcaatattagtttttccaattaagccaattttattttatttttctgtattaaaaaagcaaattttgggttccaatatacaatccacccgccaaaatattttgtcaatttttaacgtatttttgaatcgaaaaaggaatttctgaacttttattgtttttcttcttgtgtttatacattgctctaaatcttatgatacgttaataatgaccttaattcatatttataaggaaaccaaatctattttttaaatattcttaaagcttagtttacactatataattaatcaaaaattgattccaatcaatctctctactactaattctttttgctatatgtctatatttaataaaaatatatatttaaacacataataaggtagtaatacactaatacttaaatatggtccgaaaactcctaataatatgtatatatatatttttacaaaatattggaaaattgttaagctaatggatgaatgaagtttatatattaaaagaaaataacaataatatatatatatatatataaattattaaaaagataatactgtaatgtgatgattttatacttaaattatcccctagtattctagtaataatagttgttaagttgaatgatgtctctaacaattgttggctaggtggacaaacacaagattgcggtaggttagcaacacacgtgacaacaataaattattctctctgaagaaatctttaaatcctgaccgtccaaacaaatatttcgcagctgagaatctcgaacgtccattatatcttttctgttgcagagttaaaaatttagtgcttatttcgaaactaaatatggaccgtagatatagtaacgcgtctccatcggacggtacccgtgatacgatgtttatttggaatatgttttctttataactgaaaaaaccttactctcgcggaaccagacgaaaccctagctctcccgtttctcccggttaaaaaagaaaaaaaaaagaagcaaattttgctttttttattttcggctaaattgaacgaatacttttgggaaattttcgattgtttgatttagggatccgattcgcagtccgatttaccgaaaccctaattttgattttgggattgtggcgactataaaggtccttaagagactcgatttcgtctgataaagtgatgcaggtaggcatgcaaatttctctctttttttttttaattttttgcagttaaattttgcttgattgttgaaaaaacaattgcttggatttcaatgcaaagttttttcctgaagtgggatttgatctgtttctttgggtgacttgtgtgttcttcttttatcatactttgggtactttttgtgattctgggtttggttttggtgtcacagatctgaaaaatgtttgcttgcgtatatgatggaatttgagacctgctggcttttgattctgggtattggttcgaggtggctttcatg

SEQ ID NO: 33777 - DNA, 3003 bp, Unknown
  misc_feature (1)..( 3003): 2750-1469P.txt file - cDNA_ID_3072213; gDNA_ID_2926202; Annot_ID_201944
aagcctcaagctcagcaagttccttctttttcctctctttcttggaaagttgcctctctgcctccttaggaggagcacgaacttcaggagcctttttcacctcaggctctgcttctggatgaacttgtgtctctgttccctgctcgtgatcttcctccacatcatcatcatctccatcatcaagagtgtcttcttcgctttcaatttcctgcgacattgaaatcaaatgcatctctatgagaaacaaatgaacagataggcacacaaccacggtttagagaaaccattgcacaacaaacttacattgcctagaaaaatttcgataacaatgcaattagatatatgaaccttcaggagacaaagcagcttacttcacaataacattaatttccctttcagaattcagacaacacaagcctaagcctaagcgagataacaacagtagaaaaaaaggccaactcattcaattcgtggaagcatttgaaatctaaagaggcttattgcaagagacatattaaaccagtgttacaattttcaacatgtgaaatgcataaagctatgatgatgaacccaaaatcaacatatatatgaaagatttggacttgtgacctcagcgggaacgtctttagcatctgaatgggaggcttcagaagtgctccacagggactgaggtggagcagtggtagcgtaataatcatcatcttcatcatcgctatcgatatcagcccaagcctttgctttgagaggcgtaggtgcccagaaaacctgtggctcaggctccttctgtgaatcttctctcttagaggaagctttgctcttaccagccttatcagacttcttcttcttcctcgaagtatccaaagcagcaaacaagttggtgttctgaatcggcatcgatccctcatctctcctgtttccaccaccaaccatcttttttctttcctcgatcaccacacaataagtcacagagtgttttctgataaaaacccagaaacgaagtttcacaatttcagctggaagatgaatctcgagtaagttaaggtaatgaaggatgggaaaggaaaagctgatgaattgtcgctattttcttaggaaaggattgatctttaaagcaaatcccttgaaactctgatggacggcgattgaagaaagcgatggatgctataataactactagggttccagacccagaaacgacaaaatgtatactggtgattaatacaagcgtataatataggaaactgaaattgagagacaaaggagaaacaagagaatgttggaagcttcgggaagcgattcctatagaatgcgagagagagatgattagggttttcttaagggatgtggtgtgtagcaatcgtagcgattagagctactgggctacacgacaagggaaggggatctgtctctatttgggatgttatctcctctcttatggatcatcaaaccgaacatttgattacaaaattgaaccgaacatttgattacaaaattgaaccgaacattggattagactgtctaattaaaccttaatttggtttatgaactcaatattagtttttccaattaagccaattttattttatttttctgtattaaaaaagcaaattttgggttccaatatacaatccacccgccaaaatattttgtcaatttttaacgtatttttgaatcgaaaaaggaatttctgaacttttattgtttttcttcttgtgtttatacattgctctaaatcttatgatacgttaataatgaccttaattcatatttataaggaaaccaaatctattttttaaatattcttaaagcttagtttacactatataattaatcaaaaattgattccaatcaatctctctactactaattctttttgctatatgtctatatttaataaaaatatatatttaaacacataataaggtagtaatacactaatacttaaatatggtccgaaaactcctaataatatgtatatatatatttttacaaaatattggaaaattgttaagctaatggatgaatgaagtttatatattaaaagaaaataacaataatatatatatatatatataaattattaaaaagataatactgtaatgtgatgattttatacttaaattatcccctagtattctagtaataatagttgttaagttgaatgatgtctctaacaattgttggctaggtggacaaacacaagattgcggtaggttagcaacacacgtgacaacaataaattattctctctgaagaaatctttaaatcctgaccgtccaaacaaatatttcgcagctgagaatctcgaacgtccattatatcttttctgttgcagagttaaaaatttagtgcttatttcgaaactaaatatggaccgtagatatagtaacgcgtctccatcggacggtacccgtgatacgatgtttatttggaatatgttttctttataactgaaaaaaccttactctcgcggaaccagacgaaaccctagctctcccgtttctcccggttaaaaaagaaaaaaaaaagaagcaaattttgctttttttattttcggctaaattgaacgaatacttttgggaaattttcgattgtttgatttagggatccgattcgcagtccgatttaccgaaaccctaattttgattttgggattgtggcgactataaaggtccttaagagactcgatttcgtctgataaagtgatgcaggtaggcatgcaaatttctctctttttttttttaattttttgcagttaaattttgcttgattgttgaaaaaacaattgcttggatttcaatgcaaagttttttcctgaagtgggatttgatctgtttctttgggtgacttgtgtgttcttcttttatcatactttgggtactttttgtgattctgggtttggttttggtgtcacagatctgaaaaatgtttgcttgcgtatatgatggaatttgagacctgctggcttttgattctgggtattggttcgaggtggctttcatg

SEQ ID NO: 33778 - DNA, 3000 bp, Unknown; identical to SEQ ID NO: 3943
  misc_feature (1)..( 3000): 2750-1469P.txt file - cDNA_ID_3072217; gDNA_ID_1620675; Annot_ID_48228

SEQ ID NO: 33779 - DNA, 3000 bp, Unknown; identical to SEQ ID NO: 3948
  misc_feature (1)..( 3000): 2750-1469P.txt file - cDNA_ID_3072217; gDNA_ID_1620675; Annot_ID_164241

SEQ ID NO: 33780 - DNA, 3003 bp, Unknown
  misc_feature (1)..( 3003): 2750-1469P.txt file - cDNA_ID_3072217; gDNA_ID_2926202; Annot_ID_141575
acccacggtagtgagtgtgacaatggaccagtacattgagtaagtgtaccctaaccatacacttctttccttaaaatcctcaacttgcgatcctatccatgtatccgtaggccttggataatggtaggctatccagtataaaatgcaacccgccaaatgtatccaaaatatcgttacctgaatcaaatttcacaatttgaataaaagtcatagattgacatagccaatttagtgattgtatggaccacatatagataattcaatataagtaaaacttacacatagaagtttgatgactcggatcacgaaatagttgaaatgtgcgtctttctctagtctgttaaaaaaagaaagaaaggaagtgtaaaatagacacacacatatgtactatatgataagtggatttcaatattgcatattatatagaaagtagtaaagaaaaaaccttttaaagagttcggctacacgacggagacgccagaggcggagtaaattaaggaagccgaaagcttggcctcgtccgacatctccggtaatagttttataaatgaattgaatgggtaacgttgatgctacgtccatcacaaaagccacgctcttcaagtacctataataatgcacaacatatataattcaattctaacttattcattttacttatgttatttttttaacatataaaaacaaattgatttgttaccgtttggcgatgagcttgtggtcggtgacattgaggtaagtagtattatccaagtaggaaacaaaaaaggtgaggatgatatcaacggcgaagaagaagtcaacgacgagatcaatggtcaataacgctccttcggcagctttctcgaaagccaactcgaacaaagatgcccacgccgaatacccaaccaatatcaccaaaaacaattcccacaacctaccattaatttttatatggaaagattaaaaaaaaattaagatatatgaatattaataagaaataacaattttaagacgtaaaaatatgaaaattaatgaacgaatcatttgatcattaatttatggactaatagaaacagaaaagttatgaaatctgtaaatcactatttattgtttgataaccaaaaaacatttcttcgttgtttagttagtgagaaatgaacctgtaacgacgatcaaagtgaagaacgatgaaaggtttggaagaaggattatcatcttcgatgaaagtcccaaaagcaggcaagagactgctcgaaactgacgttatgttcctcacatctttgctcgatcttcttctgaactgcagtatcgataacggcgatcttgcttccgccgtcgacgccgataacgccgtcgaagaccttcctcttctcaacaacaacggcaacggtgatctcgcctcagtagtcgtcgtagacattcttttttccttcttcttcttctctctcttcttcaagcttgatgatatatacttccctcttttgtctctttcatttataccttttttttttagttttgaattattaaagaggtgtttagatgatcaagaaggtggtgagcaaattaagttgacttttttttttactggtttttgttttccctatattttttggaaaaaaagaatataacaatactataaaacaaatttacttaaccatctaataaattataatttttcaagattgtagtatgatgaattttactctttatatattcaactttgttgttatatatgcagaaggcttcatcgacttttttgactcttatttacgtctctgtgtgtatttaatgtggcatcaggtgtagtgattacaatcgagatctacaatatcagggggataaggtttttttttttttttttcttacgataaattatgtaataattagctgtttaaatactggagttgaaaaaattgaggaactcaaaagtcaaatcttgacgtcttttttgttgttgttattaaatgagaccgtgacaggaatagtagtgttgaaaacaaaacgaacaataataaacaaatgaattacgtatcaatatctatcatcagtcagaatttagtatgtttttaatacaatcatttcagtttttttgagataacatatcatatatatatacttctttccactttccagtgttggatgtgcatgtttacaatttttttaaaaaattctaaggaaaacaatgttttgaaattctaagatacgtttaggtaatacatgaagggggatacactttgtcttcgtcccttaattagctcctatgaagaatttcacatacacaaattaagaagatgcatgcaataacaaggctaaagccatttcttaatagttcatttgtacataaagtaagtttgtgtatgttaaaaaaaaattgtgtatgtactgatgtacagtatgttgttgattgttgatacgtaaaaccaaatagtcaaatactatacatttttacgtttgctcgtataaattaggaaacgaaagcataattgttacggataaaaaaacacgaaaatcaattaatgaaacaaaacccttttgtaaaaaagcccatttttatggaagcccattttgagatggaccagttaatgaaaaaaaatccaagaaacaatgaaacgaacgtttaagatccatgatggaaatttgggccaagattataagaagatctcaccacatttcatttgggccgggtgggcgaaacattccgggtgatcgtgtagacccaattttttcggtggaaagtgcaaaaaaaatgcaattggtggatgtcgtcgcggttcgaccccaagggatttggccggtaaaattattgggagttgtctttctcttgcactctctctagttccaaaccctagcaattcctctgttttcaccattttcggagattatcaccttctccccgattcgccgccttgtgattacatctacgtaaagagtttctggtagaaattttccctcttttagctgcagattggcatcagattccgttctggatgtgtcggtgatcgattttccgcgtcggtgatg

SEQ ID NO: 33781 - DNA, 3003 bp, Unknown
  misc_feature (1)..( 3003): 2750-1469P.txt file - cDNA_ID_3072217; gDNA_ID_2926202; Annot_ID_201947
cttgcttgtgtatcgcaatatatcattgatcgcactcctctgttcagcagaagaatgattattgtacgactggtagagtaaatgaatgagtaaacaatcttttcgggtttaagcaatgaatgattatataccatggcgaatgtacgaagagcgccatggacaactagattggtcatgataccgatgatataagaagtgaggccaatgttgaaaagcatgtagaacatgttgaatgtcttctcacggctattaactgcatgcaaatcaccgtaacccacggtagtgagtgtgacaatggaccagtacattgagtaagtgtaccctaaccatacacttctttccttaaaatcctcaacttgcgatcctatccatgtatccgtaggccttggataatggtaggctatccagtataaaatgcaacccgccaaatgtatccaaaatatcgttacctgaatcaaatttcacaatttgaataaaagtcatagattgacatagccaatttagtgattgtatggaccacatatagataattcaatataagtaaaacttacacatagaagtttgatgactcggatcacgaaatagttgaaatgtgcgtctttctctagtctgttaaaaaaagaaagaaaggaagtgtaaaatagacacacacatatgtactatatgataagtggatttcaatattgcatattatatagaaagtagtaaagaaaaaaccttttaaagagttcggctacacgacggagacgccagaggcggagtaaattaaggaagccgaaagcttggcctcgtccgacatctccggtaatagttttataaatgaattgaatgggtaacgttgatgctacgtccatcacaaaagccacgctcttcaagtacctataataatgcacaacatatataattcaattctaacttattcattttacttatgttatttttttaacatataaaaacaaattgatttgttaccgtttggcgatgagcttgtggtcggtgacattgaggtaagtagtattatccaagtaggaaacaaaaaaggtgaggatgatatcaacggcgaagaagaagtcaacgacgagatcaatggtcaataacgctccttcggcagctttctcgaaagccaactcgaacaaagatgcccacgccgaatacccaaccaatatcaccaaaaacaattcccacaacctaccattaatttttatatggaaagattaaaaaaaaattaagatatatgaatattaataagaaataacaattttaagacgtaaaaatatgaaaattaatgaacgaatcatttgatcattaatttatggactaatagaaacagaaaagttatgaaatctgtaaatcactatttattgtttgataaccaaaaaacatttcttcgttgtttagttagtgagaaatgaacctgtaacgacgatcaaagtgaagaacgatgaaaggtttggaagaaggattatcatcttcgatgaaagtcccaaaagcaggcaagagactgctcgaaactgacgttatgttcctcacatctttgctcgatcttcttctgaactgcagtatcgataacggcgatcttgcttccgccgtcgacgccgataacgccgtcgaagaccttcctcttctcaacaacaacggcaacggtgatctcgcctcagtagtcgtcgtagacattcttttttccttcttcttcttctctctcttcttcaagcttgatgatatatacttccctcttttgtctctttcatttataccttttttttttagttttgaattattaaagaggtgtttagatgatcaagaaggtggtgagcaaattaagttgacttttttttttactggtttttgttttccctatattttttggaaaaaaagaatataacaatactataaaacaaatttacttaaccatctaataaattataatttttcaagattgtagtatgatgaattttactctttatatattcaactttgttgttatatatgcagaaggcttcatcgacttttttgactcttatttacgtctctgtgtgtatttaatgtggcatcaggtgtagtgattacaatcgagatctacaatatcagggggataaggtttttttttttttttttcttacgataaattatgtaataattagctgtttaaatactggagttgaaaaaattgaggaactcaaaagtcaaatcttgacgtcttttttgttgttgttattaaatgagaccgtgacaggaatagtagtgttgaaaacaaaacgaacaataataaacaaatgaattacgtatcaatatctatcatcagtcagaatttagtatgtttttaatacaatcatttcagtttttttgagataacatatcatatatatatacttctttccactttccagtgttggatgtgcatgtttacaatttttttaaaaaattctaaggaaaacaatgttttgaaattctaagatacgtttaggtaatacatgaagggggatacactttgtcttcgtcccttaattagctcctatgaagaatttcacatacacaaattaagaagatgcatgcaataacaaggctaaagccatttcttaatagttcatttgtacataaagtaagtttgtgtatgttaaaaaaaaattgtgtatgtactgatgtacagtatgttgttgattgttgatacgtaaaaccaaatagtcaaatactatacatttttacgtttgctcgtataaattaggaaacgaaagcataattgttacggataaaaaaacacgaaaatcaattaatgaaacaaaacccttttgtaaaaaagcccatttttatggaagcccattttgagatggaccagttaatgaaaaaaaatccaagaaacaatgaaacgaacgtttaagatccatgatggaaatttgggccaagattataagaagatctcaccacatttcatttgggccgggtgggcgaaacattccgggtgatcgtgtagacccaattttttcggtggaaagtgcaaaaaaaatg

SEQ ID NO: 33782 - DNA, 3000 bp, Unknown; identical to SEQ ID NO: 3950
  misc_feature (1)..( 3000): 2750-1469P.txt file - cDNA_ID_3072232; gDNA_ID_1620675; Annot_ID_164236

SEQ ID NO: 33783 - DNA, 3003 bp, Unknown; identical to SEQ ID NO: 17121
  misc_feature (1)..( 3003): 2750-1469P.txt file - cDNA_ID_3072232; gDNA_ID_2926203; Annot_ID_201971

SEQ ID NO: 33784 - DNA, 3000 bp, Unknown
  misc_feature (1)..( 3000): 2750-1469P.txt file - cDNA_ID_3072236; gDNA_ID_1620675; Annot_ID_164234
tgatcaattttgttggattttcttaaacagggaaaaaggttggtaggagtactgaattgttgaagctggaagatttgattgagcaacttaatgctagaacagtagctgcgtcacctttctcctatgatgttaaaagggaagacgtggaatcctttttcagtcagtatggaaaggtaatccactatcgattgaatcataagccattgttcaaaatttagattggttatacaagtttttggtatatgtatgtgtcgtccttgcaggttaatagtgtgaggatgcctcgtcatgttgcagagtcgaggatattttctggtgttgccttggttgagttccctacagaagaggatgcccagaatgttatgaagcagaatttggtctttgctggtcaggagttggagctgaaaccaaagtaatcatacttagacatgaaaacatgtcctgtttgctgactgtttctcattttacaagtctttccattgaatgtttggatgggttacttaaaaggtgatatattcttttcaggaaagagtttgataatgaaagggagaaggatgaagtaaaatttgctaattaccaacctcagaagggatctgcaaatcagaagaatggttctgatcacaaaaacaattctgcttatgagccagagtaggggtttgactgttgctatctaattacttgtcttttcatgctaataatcctcttgatctgattatggctattttatcgtattgtagttatcccaagggtttgatcatttcattcaccctcaagcgttcagctgaagagggtaccacggaacaaaaaagttctgaggagccaactgataagacaatggaagaaagtgaaacaaagccagcagatactcctgatgctgataaagaaaacactggtgaggttcaggccgagggagcagaggatgaagatgatgagaaagaagaaaagggtgctctagccacccataaagataataaggatgttgtcttacgtgaagatcttaaggctgttttcggaaaatttggtgatgtcaaggtactacttgagttttacttagctgtctgtcaacatgaatcagattcaatatctcatataactgacatcattttcactgattcctttattctttttgttgtgaagtttgttgatttcaagatgggatctgagacgggttatcttaggtttgatgaacctgaagcatcccagaaagcccgtgcagcagcagtattagccaatgaaggtggactagccgtgaagaattttattgctgtcctagaacctgttattggtaaaaacaccttttcaacttcaatcttatcttataactaaaccttgtgttctgctttagttaaatggtcacttgtttatattgctctctgtcaggcgaagctgaaaaggagtattggactctcctacgaagcaaagatcggtttgacaagggtggccgtggaggaaggtgagttcatgtttttgttctggtttctttgttatgattttgtttcaaatgaagtttttgtttggttcttcagataataatatacttggtctatgcaggggaggaagaagaggagggagattcgggagaaagaggggatcagattcaccgggtggtcgctggaacaaatctcagaaggtggaagcatgagagatttcgctcgtgactgcttctgtttttcaatatatttctagttgcaactttaaatttaatgtatcgactggtgactcgtgatgttataactagaaatagctgcttatttggcaaattttggtttagtcatatttggtattgttttgtttagctttatgtgccttcttatgcacacatctctttccttaattattttaaatcgatgtttaggaagcattctaaaagacaaactattaatattaactgctaaaagtatattcctgtaaattctacaactgtatcaattgactcactgatgatgacactattttacttgaagtagttaaaattaattttgaaaatcaaatagttttggtattcttcttggtcttctcgtttgactttgtctacattgttattaggtttttatgctgattttagaattagctgttactggcaatttcatcttcttcctttttaatgagaaaaaaactcttctttcatacaaagaatgctttgccgttgtttagaagaagaagcaacagagaatctcgaaagaaaaatgaatgaagaaacgtataaataaataaattgaacttttatgatatgagagactaaaaagcgagattcagagattgaaatcaacggctgagatcactttcctttttgttttgatctctctctctctctctctctctcacttcgaattccgtccgcctctccatgtttgagttttgaatacctctctctctctctctcattctctctctctctctctctctctctctctctctctctctctctctctcgacttcgatttcgatttgtgttcttcttcttcttcatctggattctcagcgtcttaattacttcagattaattttggaattcgttgatctgcaaggtgtgagctttactcgtatgacctcgtctccttctcttattatggtcacatttttgttagttttcacggagacttcttcctgatttttcaaaaatctactctttgaacttctcttactttttttcgtataaagtttcgattttcttcagatgatgttcgaagcttttttctcgaggtttttgttttgggttctgaaactaattcgggcttcttatcttaggtttttttggatccaatctcaatatctaaagctaccttcttcattctgtgaacttcttccttgttttgactttagtttgctcttttgctgtgaagctaatgctgattcttagtctgagtccgactgtgtttttaattttatggtttatctttgtttcaaattacagcaatgtgcttcgcttatgatgatttctaagacatatcaaagaaacggactttggggtttttcatattgctttccttgctaactatg

SEQ ID NO: 33785 - DNA, 3000 bp, Unknown; identical to SEQ ID NO: 3938
  misc_feature (1)..( 3000): 2750-1469P.txt file - cDNA_ID_3072240; gDNA_ID_1620675; Annot_ID_164230

SEQ ID NO: 33786 - DNA, 3000 bp, Unknown; identical to SEQ ID NO: 3978
  misc_feature (1)..( 3000): 2750-1469P.txt file - cDNA_ID_3072252; gDNA_ID_1620677; Annot_ID_164287

SEQ ID NO: 33787 - DNA, 3003 bp, Unknown; identical to SEQ ID NO: 19595
  misc_feature (1)..( 3003): 2750-1469P.txt file - cDNA_ID_3072256; gDNA_ID_1620677; Annot_ID_164284

SEQ ID NO: 33788 - DNA, 3003 bp, Unknown; identical to SEQ ID NO: 19595
  misc_feature (1)..( 3003): 2750-1469P.txt file - cDNA_ID_3072256; gDNA_ID_2926204; Annot_ID_202034

SEQ ID NO: 33789 - DNA, 3000 bp, Unknown; identical to SEQ ID NO: 21157
  misc_feature (1)..( 3000): 2750-1469P.txt file - cDNA_ID_3072260; gDNA_ID_1620677; Annot_ID_164278

SEQ ID NO: 33790 - DNA, 2381 bp, Unknown; identical to SEQ ID NO: 21158
  misc_feature (1)..( 2381): 2750-1469P.txt file - cDNA_ID_3072260; gDNA_ID_2926203; Annot_ID_202013

SEQ ID NO: 33791 - DNA, 3000 bp, Unknown; identical to SEQ ID NO: 21157
  misc_feature (1)..( 3000): 2750-1469P.txt file - cDNA_ID_3072260; gDNA_ID_2926204; Annot_ID_202028

SEQ ID NO: 33792 - DNA, 3000 bp, Unknown; identical to SEQ ID NO: 3963
  misc_feature (1)..( 3000): 2750-1469P.txt file - cDNA_ID_3072264; gDNA_ID_1620677; Annot_ID_164275

SEQ ID NO: 33793 - DNA, 3000 bp, Unknown; identical to SEQ ID NO: 3963
  misc_feature (1)..( 3000): 2750-1469P.txt file - cDNA_ID_3072264; gDNA_ID_2926203; Annot_ID_202010

SEQ ID NO: 33794 - DNA, 3000 bp, Unknown; identical to SEQ ID NO: 3765
  misc_feature (1)..( 3000): 2750-1469P.txt file - cDNA_ID_3072275; gDNA_ID_1620677; Annot_ID_164263

SEQ ID NO: 33795 - DNA, 3000 bp, Unknown; identical to SEQ ID NO: 23909
  misc_feature (1)..( 3000): 2750-1469P.txt file - cDNA_ID_3072292; gDNA_ID_1620678; Annot_ID_164317

SEQ ID NO: 33796 - DNA, 3000 bp, Unknown
  misc_feature (1)..( 3000): 2750-1469P.txt file - cDNA_ID_3072292; gDNA_ID_2926213; Annot_ID_202768
ggcaattacggtgacggtggcaacaaattatagattaaaacgagccaaaatagaagaaagtgccaacaaatccgtgtgggcaccaatccaaagtggcaaaatcaatcaaccagctgtcctctccctctaacttccgatcaaagactctctttttttttgtttacgttttcttttcctcattctccttgtcttattttgattgcattatattgaacttgagtttaatcatttttcattattaaggttatttatttatagacgcatgatgcatcaagtcataataatttcacccgtgatgatcacataataatactaatccaagactccatgtgtcgtaccccaaaaatttatctcaattatactatgtaccttatattgtgctatttttttaactaataatttcccgacaatttagtagttggaaatttctcgaccgtgtgatataatctataatataaaatatcataattattaaacaatgataaaatttgtgagcgacattggtatcaatttcaaatccaattattatgttgacacaagactagtgatttatagtataaccaatttaatgtctaacgtaaaaacaattactattaattgattttctatatctgatcatatgttcaacaaaacacatgctaatctacccaccattggcgaataaatttattgcagaatataacaggagaaaaatgccaagaaaaaaaaatccttataaaaacgcacaagaaaaaagtaaaagagctattctgtaaaataaaaatgaaaaaagtattgaatcctacattaatagatacaggatatgatgttctgtttctcaacggctacatctgtctgtgatccttttttaatccaacgatccagatctctcctcatcgcctatataaaactcacttctcttacatcaaacaaacaacacgcttggttaaactccatcagtactttaaccatcacttcaaagttcaaactcttttttttttttttgtttgatccaaattttaacaaaattatggatcgcaatttcctcctaacagttacattgatctgcattgtcgtcgccggtgtcggtggccaatctcctatctcttctccgaccaaatctcccaccactccttctgctccaactacttcccctactaaatcccccgccgttacttctcccactacggctccggcgaaaactccaactgcttcggcttcttcaccggttgagtcaccaaaatctccggctcctgttagcgagtcgtctccaccaccgacacctgttccagagagctctcctccggttcctgcaccaatggtttcttctccagtgagctctccaccggttccagcaccagtagctgattctcctccagctccggtagccgctccggttgctgatgtaccggctcctgctccaagcaagcataagaagactacaaagaaatcgaaaaagcatcaagctgcacctgctccggctccggaacttctcggtccacctgcaccaccgactgaatctcccggacctaactccgacgctttttctcccggtccttccgccgacgatcaggtacattagcttatatcaacaatgttgatatttatctaccgtcacaagttcgagtatcaatgttaaaaataaccaatgagacatttcaaaacagtgaacatagattttcaatttttgttatattgatttagtaattacatattcgattaactaaaatgaaaatatggaattgaatgcagagcggagcagcgagcacaagggtgttgaggaatgtagcggtgggagcggttgcaaccgcatgggccgttctcgttatggcattctaaattatttatcatttcacctctgatattttttagtttttatatttttgaccctaccattgtctctttctttacgaatttggtaatgagtattatttaattgattatacagtttgttttcttttattttatttatatggaaataataagaattcatatctgtcagtgatgaaaatactgttttacacattgattgttcttttcttttgcagacaaaagtcctttagtgatgggtccgagttctttattgaaaatgacacattcaattttaatgcagaattatggacatttactctaaaataaaatgtttgtgtaagtaacgtctatgtaacaataagcaaagcagttacataatttgttttagtcttttaaatgtttaaagtgttagtaaatcaaatgttgatatttacgtttgaaaccaattacatgtgtttctttaaacaaatatttacaattggagtataattatgcgagaatgaaagtgtcagctacttagttggatcttagtcttttataatgtgaagttggtaaatatttattgaattcatatctgatacccaactcaagtggccaagttgctataaatgaattgtctaaaatttattactaaacatgtatagatccaaccaatcatataatacaatgctttttattgtacctttcaaatagctagattcatatttttgtcttgttccttagagaactagatttgaaaaagaaaaaaattaatggatatctaatatggtaggcaaaaagaaagtgagaatagaggacaagtcatattccccatgcttttattaaaagtacattactcaactgtgaagaaatggctaagattttgtaagtaaagcacaagttatacttgaaccaaggtcttgtgtagagattcaagattcttggctttgcaaagacacaaacccaccaagccaagtctctgattccacacaccaatacaaatttgtatataaacataacattttcttcttcctaaagactaacttctagacaatatgggtagttcaatgggctttctcggaaaaggttttgcaattttttaacctaacaattatcgactcaaatcgttatataaccgttttgacaaattttcgtcctatatatctttctaaatagatttcgatatttggcctaggggtaccaccgacgcagatgatgaatatggtaatg

SEQ ID NO: 33797 - DNA, 3003 bp, Unknown; identical to SEQ ID NO: 19613
  misc_feature (1)..( 3003): 2750-1469P.txt file - cDNA_ID_3072295; gDNA_ID_1620678; Annot_ID_164315

SEQ ID NO: 33798 - DNA, 3003 bp, Unknown; identical to SEQ ID NO: 17798
  misc_feature (1)..( 3003): 2750-1469P.txt file - cDNA_ID_3072305; gDNA_ID_1621088; Annot_ID_170537

SEQ ID NO: 33799 - DNA, 3000 bp, Unknown; identical to SEQ ID NO: 4007
  misc_feature (1)..( 3000): 2750-1469P.txt file - cDNA_ID_3072305; gDNA_ID_1620678; Annot_ID_164303

SEQ ID NO: 33800 - DNA, 3000 bp, Unknown; identical to SEQ ID NO: 4007
  misc_feature (1)..( 3000): 2750-1469P.txt file - cDNA_ID_3072305; gDNA_ID_2926213; Annot_ID_202755

SEQ ID NO: 33801 - DNA, 3000 bp, Unknown; identical to SEQ ID NO: 4015
  misc_feature (1)..( 3000): 2750-1469P.txt file - cDNA_ID_3072311; gDNA_ID_1620679; Annot_ID_164355

SEQ ID NO: 33802 - DNA, 3000 bp, Unknown; identical to SEQ ID NO: 4015
  misc_feature (1)..( 3000): 2750-1469P.txt file - cDNA_ID_3072311; gDNA_ID_2926197; Annot_ID_201532

SEQ ID NO: 33803 - DNA, 3000 bp, Unknown; identical to SEQ ID NO: 4020
  misc_feature (1)..( 3000): 2750-1469P.txt file - cDNA_ID_3072336; gDNA_ID_1620679; Annot_ID_164360

SEQ ID NO: 33804 - DNA, 3000 bp, Unknown; identical to SEQ ID NO: 4020
  misc_feature (1)..( 3000): 2750-1469P.txt file - cDNA_ID_3072336; gDNA_ID_2926197; Annot_ID_201537

SEQ ID NO: 33805 - DNA, 3000 bp, Unknown; identical to SEQ ID NO: 4047
  misc_feature (1)..( 3000): 2750-1469P.txt file - cDNA_ID_3072369; gDNA_ID_1620680; Annot_ID_164418

SEQ ID NO: 33806 - DNA, 3003 bp, Unknown
  misc_feature (1)..( 3003): 2750-1469P.txt file - cDNA_ID_3072382; gDNA_ID_1620680; Annot_ID_164390
tgacagaacataactacatttcaaactccaaacttacgaaaacacacaagttttttctggaatctttcaagttttatttgatgtttcggaagaactaaattggggttttatctagtggtagacaaaaaggaaaaagatgagtacattttattgggcaatgtgttaactaataaagtttctagatataggcccatagaaaaaccaacttatataaactgtaagcccataaaggcccaaataaaccctaattttaaatccaccgacacatgtataaatgccaagccgtttcatatacgtctccactctgcaactcaggtaaaagactcttgctcctattatctcatgttccattgtttgttgatttcaatttgaaatattagtttctttcttcttcccttcattccttcaacttttataccattttcctgttatctattgatttgaaagttttaatttttaagaggcggtgatgacaaaaaacatttctcgatgctgaaacttactcgagagaccaaatcactcttgtaatctttcgtgatgcttgtttttatgcgtgtctgagcctaaaccaaaaaatctttcatttatgctttgattatcatagatcccaatttatgcgtttcttttattgcttttcaatttgtaatgcgagttttgctttattttgtccagccatggaagaagcagatcagttatgtttagctgctaaatccggcgacttgaaaaaggttcaaactttaatttactccggcgccgacgttactcactttgataacgacggtttaacgccgttaatgcacgccgctaaaatcggaaacgcagagatagtaacggcgttactcgaatccggagctccatggaacgcattatctccatcaaatctctcagcaggagatttcgccatggaagcaggacatcaagaaactttcgatcttcttctcaaaaccgggatccaatcagagctaatcttaggaacaatcgcaagaaaccaaacaaagaacgaatattctaatcaagaatatcttcaagacagagttagtttcagtgaagacaagttaatggatagtgaaagcaaaggtgtgatgatggcttgggaaaaaccattaatggaagctcacgctaaagctatttgtctcaacggtggtcacattcttaacgttggtttcggtatgggacttgtcgatacagcgattcaacgatacaatccggttaaacacacgatcattgaagctcatcctgaagtttataagcgtatgattgaatctggttggggagagaaagagaatgtgaagattgtttttggaagatggcaagatgttcttgataagcttgatgataattcttttgatgggatcttttttgatacttatggtgagtattatgaagatttaagagagtttcatcagcatcttccgaggctgttgaagcctgatggtgtttattcgtatttcaatgggttttgtggaagcaacgcgttttttcatgttgtgtattgcaatttggtgactttggagattgagaatttagggtttagcactcagttgattccattgccggttaaggattgtcttggggatgaagtttgggaaggtgtcaagcaaaagtattggcagcttgatacttattatctccctgtttgtcagtttagtgactgaagaagttttatgataccagcaattttgcgatattgtaatttttcttactcataaaaagtagattttttatccatttgaaaatagtcatagtcatccaataagaagaaaagaacagtaataagtgtataacataagatcccatagtcatgtgataggaaccaagagccagactaattctgttacaaatatcttaagaaacaaaagtactaattaaaacatgttatgcagaagcttcacgttttctacatggtctaaatatgtgaagactaagtgaccctgaaacgcttccattccttgtattgcaacgctcatcatcgtctttctctcaatattgaagtagtagacgtcgaaaggcactgtttgatagcacggcgacaacataatctcatttgtacgagtcactccaacaaagcgtaaattcagggttccaatcctatgctgccaccaagcgggtaatacgtacgtatgcttcgaccattccttcttttcagcatcttgtagaacccacaactcaatactcttactacgtccatcaacaaagcaatatctttcagaaacaagtgaagctaatttaccattgtagtttataagagttccatcatgcgctgctttaatgaactcttccatgactgtaataaatctaaacttctctgacctaacatcgaagcaaacgataatgtaatcccctgaagacaaattgatcgctggataatacaacacaccattgatgcatatctcagacattccaagaatgtgaggcatggaacattcgatgattctccatgacagttctccagttcctagtgtcagaacttgatgctcatcacttttatatgacaacaataccttgaactgtttctgaatcggttcatacacgaaaaatcttgacggcccaatactcgtcttcattggtttaggtaagcttaaggtatgtccagtgctgggattacatatcactgtcactgtttcgttcatttccttgcgtttaaaacagatcaagccattgacaggacgcgaaattttatagcataaggagaaattctttagagaaatggcggacgagttctcatatggattttgaagctgaggagacgagaagaagaacaagttaccatcttttttgcagcagaataagagttgcggtcgatgcaaagatcgggtcaagaacagctctgtgaaatcttgacggcaaattacggagatccagagtttcgacacgcaacgacatgtcgctatagattttgccggtaatctcaggagtatctcgatgatgatatcaactgggatctggactgacttttctgttttattcggtgaggtcttcttctccgttctacgccgggagatg

SEQ ID NO: 33807 - DNA, 3003 bp, Unknown
  misc_feature (1)..( 3003): 2750-1469P.txt file - cDNA_ID_3072393; gDNA_ID_1620454; Annot_ID_157592
gagagtaatattaatctaacataaacaaccatagttctcttgaattttgaactacgaattttggttttaaaaaacagctgagaatttgaatatcttgagcaatctgcatctgattttgatttctgacatcctgattaaaagtggtttcagatttgattctgaaccgaagaaataggcggcttcttatttatcgttaagtttaatattaaacgttgtattgctctttaagtatctttaaaacctcgtttacttcgtgttattattcaattttgttataacaaacaaattttgatacgttgctctcttcttctttgactaaaaaaacacatgttggtacgtaggttggattttgagagctaattaaatagttaagatgatggaaatagcttatcagcctcggattgattccgagattgaatcactcgtcgagagaatcaatcctccaaggttagtaccttattaatatttttatcattatgttggatattttttttttaataaagtagtattattcttgatattactggttttgtgcgctaattagggtttgtgtagacaacgactctgacccagagtgcacacttattaaggttataaaaagctcttgataatatgctttttaattataagttcatagataatgactaattagccttaattaaacatgtggttgatatatgtaggtagatagcgcgaacaagtacgggatattactggacatggttcaagtgttagccgatcttgatctcgttatctccaaatgttacatctcatctgatggcgaatggttcatggatggtaagtcgtcatcgtcatcatcattcacatgtcatcatggtggaccatatatcacatgacacctgaaatttctctttgttagtgtttcacgtgacagaccaactcgggaataagctcaccgaccgaagccttattctctacattcaacaggtgtgagattaaaatcattagtacaataatcacctaatcatttttaaggaaaatagtataaaattaccaagtaaccgaaaaaatcattaactaagatgaccaactcttataatgtgacagcttcgtttatttatgtttctttttgggtacttttggacgtatctaattagcttcttgagtttacttgtgaaattaatacatttcatttttaatgatttttggtttttacaaattcaggcaatatgttctagtagaacgggaggtataacaaaggagatgcagagtaatctaaaacgggaggtgcaacagcgccacgtgtcaacagaacacacggcctttgagataaccggaatcaatagaccgggtctactatccgaaatatctgccgtactttccgacattggatgtcacgtgacggctgctgttgcatggacccaccacgagcgagcggctatggtgatttatctagaagacgggtttaacggtgggcccattatcgacccaataagaaaggcccaagtaaaggatcatctggatacagtcatggaggcccatcacatagttggcgatgtgtctcatgtcgtcgtgagggtcgtcgaggctaaaggagttccggtcgggtgggctcacactgagcgacgacttcacgagctaatgtacggagaaggagattacgagaattgcttcgactgcgattgtttcggagacaggtgcgcttgaatttatacgaattaatcatcaatggcaaaataaaaatgttgtttagcttcgttcgatacatgtgacaggtgcgatgctttgtggagaggaagatgcgagaggatacacgtgacaatcgaagcatgtaatggctattcaatggtgaatgttaagtgtagagacagaccaaaactacttttcgacacggtgtgtgctttgaaagagttacaattcgttgtgtttcacgccgtcgccggagctaaaggctccactgcagagcaagaatatttcataagaaagaagaacgggggcacgttagaaacggaagggcaaagagagagactaaggcattgtttggttgctgcgatttcgagacgtgcttcacaaggattgaaactcgagattcggacagagaacaagatgggtttgttgtcggatgtgactagagttgtgagagaaaacggtttatcgataacgagagctgagatgtgcacgcaaggtgagattgcggttggctcgttttatgttacggatgtgaatggtggtgagacgggtcctagtgaggttgaagcggttgtacgagaattgggaggagcggttgtgtcagcggttaaaggggttggaatgatgccgaggaggattggttcgacgagtgatagtgtggagcaggacaaagctaagtcgtctattgggagaatgttttggtctaaattagagaggttgtcaacgtctataagatcgttgtgaagtgtttgattagtggtttttgcctctctggttctcgtgattatcgatcgttgtatatatagatgaactaggactatttgcagattcaattgaaattcgtataattattggttttagatgtgatctaatgagataagattctatcaatcaaaaccgttacttatcgtcttaatttgttcgaatgaatcttaatctcacaaaccaaacattataccgtcttaattgaactggaatttgttcggtttttacaaatatgagagaccaaacattatataccgttttattcaagttgtgagagattgtaaattgtagacccaatttcggtttggtttagctattgaatttgacagctggcatggataaagaacaattactttacagtaattaacaagtcaataaaagggcattacgggaaatttaaatattgaaatgaaaatagagagatctttataaaccctaatgtgacggtaaacagtaatacattagaacactctcgaattcgaagaaaatacgtagcaaaacccttatttttgaatttcagacgaattccgatttcttaatcaaaaatccgataagagctttggatttggcggcgaataagaaaacatg

SEQ ID NO: 33808 - DNA, 3000 bp, Unknown; identical to SEQ ID NO: 4030
  misc_feature (1)..( 3000): 2750-1469P.txt file - cDNA_ID_3072393; gDNA_ID_1620680; Annot_ID_164382

SEQ ID NO: 33809 - DNA, 3000 bp, Unknown; identical to SEQ ID NO: 1835
  misc_feature (1)..( 3000): 2750-1469P.txt file - cDNA_ID_3072397; gDNA_ID_1620454; Annot_ID_157593

SEQ ID NO: 33810 - DNA, 3003 bp, Unknown
  misc_feature (1)..( 3003): 2750-1469P.txt file - cDNA_ID_3072397; gDNA_ID_1620680; Annot_ID_164381
acaaattcatttacttttttgttctgttccgagatttcaaggttcactatcgattctgaaactcttggaacaatccagattcttggttagcaggtggggaagcattaatcatgtatttatgatacactgctccattattattacgagagagttgaaagtttcctttttgactcgtttttaaaggcaaggaagaagaaagactttgtttttaaaatgccaatgtttcagccttctaagaacggtgggtttgatgggcatatcttagatctacactcggcggttaaagacggtgttcttggcggcggagatgggaaatttctggtggttgttaccgatgagaagaagaaattggatttgaaggagatgatttctgagctggaattacctgaaataccctctgttttcatctgtcctatctctctagagccgatgcaagatccagtgaccttgtgtactggtcaaacctacgagaggtccaacattctcaaatggttcaatatagggcattgtacttgcccaacgacgatgcaagagctttgggatgatttggtcactcctaacaagactcttcaccaattgatctacacttggttttcacagaagtatgttttgatgaagaaacgatctgaagatgtgcaaggacgtgctattgagattctgggtacgttgagaaaggctaaagggaaagcaaaggttcatgctttaagcgagcttaagcaagttgtgatggctcacgctattgctaagaagactgttgttgatgaaggtggagtctttgtgatctcttctcttttaagtccttttacttctcacgctgttggatctgaggctatagctattcttgttaatcttgagcttgactctgattccaaagctggattgatgcaaccagctagggtctcgttgatggttgatatgttgaatgatggttcgattgaaactaagatcaattgtgctagattgattggaaggttggtggaggagaaaggttttagagcagagcttgtttctagtcatagtttgcttgttggattaatgagattggttaaagataggagacgaagaaacggcgtttcgcctgcgttaacgctgctcaaatcggtttctgttcataaacaagttaggaacttgttggttaggattggtgcagttcctcaattggttgatgttttgccatgtttggatgtggagtgtttagagtcagctcttttcgtgttggattcgttatgtttagaaagcgaaggcagaattgctttgaaagattcggttaacacgattccgcataccgttaggttactgatgaaggtatcagagaaatgcacaaactatgcgatatcgattctttggtcagtttgcaaattagcttctgaagaatgttcatctcttgctgttgaagttggtttggctgcaaagcttttgcttgtgatacaaagtggatgtgatccagctttgaagcaacgttcagctgagctattgaagttatgtagtctacattattcagactcaatgtttatctccaaatgtaaactcacaagaactatccaataaaagactgatcaagttttcacctttcgggtcaaaatcacacaacggatctgccccatcttgttgatgtatatagaaatgaagaagctcaaggagtatgagagtaagaaacgagtttcgatgtgttgaattctattttgcaatgttatttgaataataatagttaagtagaagtaaactgtataaatctttttgttgtggttggttcattattcagtagaagaatagattgaagaaaggaatcatttttttggcctcttgtaagttactagctgtttgtgagtcataataattggagaaattattgatctatgaatcgttttatttgacactcttataacccttagtgattcttgatagaacagtaggattagaaaacagatatgggtgggtttcagatttgtggaggggaataaaagtcttattttttgaacatgcattggtctgatttgtatgcactgtgtaaatgaatgaacaattgaaaagaaaggatgatttgacttatgaatcgtttcaacagttcactgtttgtttatctctgttttttatttaattggctatgagaatctgaacatatctcttggaaacattgtatcagtgagtgtgatgtcactgatgtgagagctcttgtctggaaataaaatctaaacacagttaccaaatctggaaaacaatttgtctcaagttagaaaaaataaaatataaataatttcccgaataggagctatcttaagatgggccttagttgaactatatgggctattatccaggtccagtaatattttgacagtcaatacaaaatgtcgtctttggctctaaattggattaagctattaagtaagataaagattacaatatttaaattagatattgatttagacggagatttcattatctatctctcaagtttgatttgcttctgctgtaacaaaaagatcacgatcgcaacttgtgtgtatgtgtgtgtgagagagagattcagatatggcttggttagctagatccatagcgaactcactcaagctcgatgaggaagatgaagatgatgataagcatctgaatcaacagccgtcggaatctgtatcggattcacagtctccacgaggcgttaaggaagacattagcgaacttaccaagaccttgagaacccaattttggggtgtagcttcgttcctctcgcaaccttcttcatctccggatcttcaggagagaaatcaaactcccgatcatccggaggaagatgaggatctaatcgctgggattaagaacgatttcgctgagattggtgggagattcaggactgggatttcgaaactatctgggaacttacctgtgtctgagttcacaaagatcgcttcgaatttcttacaattgagttcagaagatgtggatccgaaagattacgacgtaatcggagttacagaggaattagttgcgtttgtgaaggatcttgcgatg

SEQ ID NO: 33811 - DNA, 1207 bp, Unknown; identical to SEQ ID NO: 4029
  misc_feature (1)..( 1207): 2750-1469P.txt file - cDNA_ID_3072402; gDNA_ID_1620680; Annot_ID_164379

SEQ ID NO: 33812 - DNA, 3003 bp, Unknown
  misc_feature (1)..( 3003): 2750-1469P.txt file - cDNA_ID_3072438; gDNA_ID_1620681; Annot_ID_164455
tataattccattgaacatttaaacttcattaacaacttctaatttgcacaatgtcctttgtattgttttcctgataattttctttccacagaaaaagcttgaagagatggtggaatgcgaactaaattttccaagttttcaggtacaatttaacactagttctcgctactaataatccttacatctgcataggattttgtgataaattagatttgtttattgccacaggaagctatatcggtaccatggaaaccgattcctcggagaacagcaaagctctactttgctatgagaggtagttactagttactacagctgatttctttattactttccacaaatgaaaattgagatcccaaggcagatacatacaacaaaaattcttcactaatctttggcattctcatgaaattttcagtaatagaagtgtttgaagagagtgaagggcgtaaacatggagaatgttcgctactcgatcttgccagagtcttggaaatcaaaaagcaactctgtgaggcaaacgtaagtgtgtttagttgttttatcattatttagaaatgtcactgccaggttcactgaataactgaatattgtctctcagtctgtgagcgagagccatataccagatattctcttggagagacttatcactggtactactgaattcccgccagtttgtgccattgtgggaggaatattagcacaggttctctctctctcactttcactctcttatcgcattcgaatcttctcactagaaacttgtaatttgacaagaaagattttttgatgtggcaggaggtgatcaaagcagtatcaggcaaaggagacccgttgaaaaacttcttctactatgatggtgaagatgggaaaggtgtgatggaagacatttccgactcttttacctcttaaacaaccagtgggccttgatttagtttaaactctataatctctgagattccatgtatatctcaatcgtttgttttttgccttcacattatgaacaaatttaatgcagaatttagtggaggatcagttgtgattttccttcggtaaaatcattttcagttattgacatttgaattgttcaatttcaaatttcaaatattataattcaattcaaagactagctaagtttttaaaagtaattagtgagagatctcacagtgatataaaccacattcattttaattcatagcaaagtaaatggtaagaaatgaaaatggaagaaagagaggagagtagttcacacgaacatctgaaggagaagttgagagagcttgaggaggaatggacagccatgaaaacaggtaaaaactcatctgcggtttcatggattaccgtggaagatgctcttgagtatgtcgaaaactctcccagaaacctaatgctctctctccaacacaaaccaaaggcagagatgatacaagaaatatcgccattaaggagaaaactctttcacgactctgatgatgatgatcaaactaagaagacgacattgctttctcattcatcttgttggtcttcgaatgtgacgagttcgagtgataccacgaaagcaaagaagaagacaacgattagaagatttgtttctgttacaatggtgctgcttttgtcatgggttttagttgtgttgatgaaccactttgatcatctctccatgaatacacaaatcattactttggttcctacttgatatttttatttattttggtttgagaatgttcatcaatctcaataaataaaaaaagtttagttttgtattattacctctcgccttctcttttaattcattgaacctcttcaactttggctgtaactatgttggttaaaacagtataagtaatgtatgtatttatggttttaggaaaatcttacaaaataatactctatcattggatgaagaagcaaaaactacacccctctacatcttttctattcataaacttttttggggaaagaactacattggtggtgattaggtgcatcggtgacactaatgttgaaaatatgttttgtgtaaaattagtatggttaaagctaatcatttagttgagcaaaaaaagatgctaatcatttaaatagaaaatggactcaaacaaaagaaggccacacattcaattgttacatctttattgggttttcatttttggaagctatttttatgaatttgcagtgttttgttgcccaaaagaaaaaaagcataattccaagtatatctttcattttgaatccatcagtcatatgttttacttgaatcaactatttgttgggttttacgaagttacttgttaagaagattcaaaatatatataattagactatcaaaggaacaaaagaatgtaattgggtcataactttttccgaagcttacgtgacttgggagaaaatcaaacccattagtttcacccttaatcaaactaatcacaaattttgaactttgcaaagaaggtaaaataataatcagcaaaaagattaataaaatgacaaaagtatctctttaaaagattaataaagaaataaagaaatgacataagctctcaccgaccgacgtcttgtcttttttattcttaaggtcggtgccatgtcgacgccttcaagcttagaatctcgccacgtgtgggataaactaaccgaacccaatcgaaccagacagaccaaagacagaccagaccggactagttgtatgtcggcatcagcgttctagtacgacgttaattaaaaaaataaaaataaaatattatttatgatattccaccaataagagccaatgaaaagtgtgtgaaccaaccaacttctgtagcaaaccgtaccatttctctcttagatacctttaccttccttctataaattaggttcttcctttcacatttctttgtcttcttcttctacataaaattgattcgcctcgaaatttacacagacttgtcgctctctctttctctcttatttcacagagcccctaaacatttccaaaaatcttgcaaaggaagaaaaacaatg

SEQ ID NO: 33813 - DNA, 3003 bp, Unknown; identical to SEQ ID NO: 33812
  misc_feature (1)..( 3003): 2750-1469P.txt file - cDNA_ID_3072438; gDNA_ID_1620627; Annot_ID_162508

SEQ ID NO: 33814 - DNA, 3003 bp, Unknown; identical to SEQ ID NO: 33812
  misc_feature (1)..( 3003): 2750-1469P.txt file - cDNA_ID_3072438; gDNA_ID_2926186; Annot_ID_200640

SEQ ID NO: 33815 - DNA, 3003 bp, Unknown
  misc_feature (1)..( 3003): 2750-1469P.txt file - cDNA_ID_3072441; gDNA_ID_1620681; Annot_ID_164447
aagtatccgcaaaccagaaatccaagaagattgaagtagaatcttctgttgcaaacaatgtaatgggggcatgcctttcttcaaagtatgattcactgaacgaggtaaagtctccggctccaactgtagctgtgagtctgaatcagaagaagcagcaggagaaaggctagaagcaactcctccaccggctgacaaatccgagcttttcccttgatcaatgagctcaatactctgattgggaagcttacatgacttattagaagcaagtccatccctcagtgactcaacttccttagcagtcagagcctgcaggaaattgcagaacggatgcaccaggaattacttacagtaatctcatacccgtaatcaggaaaatagacaaataagtgtagatgcaaaaactttcctcttgtaaactaacaagcatataaaaaaaaaacagcttatatttaagtaacacatacaatatcttacccccaaaattggatagctgtcaaatattagcaatttcgcctcgaggtcacgggcaagtgctttagctaacgtctcttggtatatttcagaccctgaaacaactccaaccaaaaagcgaaaatgatgtttccggctaaagaagtacaggaaccacacaagcaagataccacaaacctgcgggaccagaaagcaatatccttggattcataggggtcatgtcggagacaaattggacatattcttttttcttcagatgtatatatgaagcatataataaggcagcctttgtatattcactgcaaaaataaagccttagtcagcatacacaaaacagagaacaaatgcaaagcgcctaaactaccaaagacaagaaagcagaattagacctcaaaattctatgatgatataaacagattcttaatggaagattcacatgcacatatcttaacactgcatgaatacctgaaaaaatatatctgacttggtcccatacctcaaataatagggaaaatttttgaatgaaacttccatgttttcgcctctaacaaaaccagcttgaatggcttctctgaatattgcagattgcagaccattgcctgatgttgaagcttgttgtgaattacttgtcacctcgtttttctcatccaatatctgataccagctttgttaatataatgcaaaatgctgttgatgacgccagggtacaagagaaacatagagtatttacctccattttggaatcttggttgttaacagaaaaaattccttccatgccgtcaacttggaccatcgactctggcgcttggtggctcttactggatgcatggatcaatctttcaagcgatgatataattgaatgacctgtcattctctctaggtctagaaactttcctgcaggaacctgaactgaaccaggttttgctgcaactataggcatttgctgatatacctggatagaaattaagggggaaacttatgtatattcctatggagatattcatctcaaaactgaaggaaaatttcttcttgcatataataaaaaaagtggaatcacatgaggatacgaaagcaatcctgcttaaaccaataaccacttcgtcaccagagtttagcacatggttgatattcccctcggcataatttccgtttatccacatatgtccattgtttcccatggtctctagaaccgctaaaacattgcctttgcgctgaacatgtgcacaaacaatgagaatacatactgaataaggagttcacatatctccacaaacaactcaaaagtagaaaaaatcatacgcacaggaattgcataggccagtttaaaatccagcagtgctaatgtttgagcgtaacattcaaggaaacaaaaatacctgaattcttgtgatcttgaacgagtatgaactgagttctccgtctaagaatttgaagactgatagaaaaatgtttatgcttggatactgaaaattcataagtagctcaattttgtcaggatattgcatccacaaaagcattagaaaaataaagacaggaagatccaatagatgcttaattcacctgtgcagactgtgatagcaatcgacaccacgggttctcaaacctactgtgtacatatgtccatctttcaaaacttgccttctcttgcaaaatcgctgttgagtatacaatccaaaccagaaaacaaagacgaattgaaaaaacaatctcaaaaggaatttaaattgggtccaagagcataaagatcgaacaagaataagagcaacggaccttgcgcaacaggtggtggttgcgacgtcgtagcagccgccgcagaggcatcaatctgggagtctccagaggttggagtagtgtcgcctaacacgcatttactagaatccgaaggaggtagtgtatcgccgccatcttccaactgaaacgaaaagtgaaatcgccaaaattgttcaaaccagaagctccagatggcactcgaaagatggataagaaataatgtctccgatcagaaaccttttggcgtttggatggagatttatctgcgggagaagatggagatctcttgccgctgcttccgtcgggcgggttattgttctcgccggaggtagaatcactccgtcccggtgacaccatgactcttctttcttccgattatttcaagagcaagatttgcgattctttgagagttgaagaatcaatgcgagagatgaattttgagagaacgtaacaagaaatgagagagcttatgtaaattggtgtatatataggcctttctcggtgggaaaaaattatagagaaactttgattaatgaaccatacctaaaccaaaccgtttagtattattaggaatcgaattttgtacttaacaaccaaaaccaaaccgatccggttcagttttacccacacctggttttaattttgaaccgcacaaccatccaaattccaaagctagagtctctcagagcgtttttaggtcgaaccagtccttaagggtccgaccaatagaacgtagttgctcgaactcttcttccaaaaatg

SEQ ID NO: 33816 - DNA, 3000 bp, Unknown; identical to SEQ ID NO: 4057
  misc_feature (1)..( 3000): 2750-1469P.txt file - cDNA_ID_3072449; gDNA_ID_1620681; Annot_ID_164445

SEQ ID NO: 33817 - DNA, 3000 bp, Unknown; identical to SEQ ID NO: 4057
  misc_feature (1)..( 3000): 2750-1469P.txt file - cDNA_ID_3072449; gDNA_ID_2926186; Annot_ID_200630

SEQ ID NO: 33818 - DNA, 3000 bp, Unknown; identical to SEQ ID NO: 4056
  misc_feature (1)..( 3000): 2750-1469P.txt file - cDNA_ID_3072453; gDNA_ID_1620681; Annot_ID_164444

SEQ ID NO: 33819 - DNA, 3000 bp, Unknown; identical to SEQ ID NO: 4056
  misc_feature (1)..( 3000): 2750-1469P.txt file - cDNA_ID_3072453; gDNA_ID_2926186; Annot_ID_200629

SEQ ID NO: 33820 - DNA, 3000 bp, Unknown; identical to SEQ ID NO: 19663
  misc_feature (1)..( 3000): 2750-1469P.txt file - cDNA_ID_3072457; gDNA_ID_1620681; Annot_ID_164443

SEQ ID NO: 33821 - DNA, 3000 bp, Unknown; identical to SEQ ID NO: 19663
  misc_feature (1)..( 3000): 2750-1469P.txt file - cDNA_ID_3072457; gDNA_ID_2926186; Annot_ID_200628

SEQ ID NO: 33822 - DNA, 3000 bp, Unknown; identical to SEQ ID NO: 4086
  misc_feature (1)..( 3000): 2750-1469P.txt file - cDNA_ID_3072480; gDNA_ID_1620682; Annot_ID_164511

SEQ ID NO: 33823 - DNA, 3000 bp, Unknown; identical to SEQ ID NO: 4086
  misc_feature (1)..( 3000): 2750-1469P.txt file - cDNA_ID_3072480; gDNA_ID_2926181; Annot_ID_200287

SEQ ID NO: 33824 - DNA, 3003 bp, Unknown; identical to SEQ ID NO: 19683
  misc_feature (1)..( 3003): 2750-1469P.txt file - cDNA_ID_3072490; gDNA_ID_1620682; Annot_ID_164505

SEQ ID NO: 33825 - DNA, 3003 bp, Unknown; identical to SEQ ID NO: 19683
  misc_feature (1)..( 3003): 2750-1469P.txt file - cDNA_ID_3072490; gDNA_ID_2926181; Annot_ID_200281

SEQ ID NO: 33826 - DNA, 3003 bp, Unknown
  misc_feature (1)..( 3003): 2750-1469P.txt file - cDNA_ID_3072509; gDNA_ID_1620682; Annot_ID_48363
tggtgatgattctcatgaatatcttcatatttctaaactattcttatttgggatattagtataactttaaattggtgatgattctcatgaatgttttgatatattaaaatatatatgttcattaaacaacaatttattcatctttatgtttgcattgcagtagtactataccagtctgtcacctttaatattagctaatctgtaagaaatttacattttgatcttgtggatgagatacaatacaagtatacaactatgataaagacttcagagtagacacaaaataccatttgaaactttaaaatctgtatttaacctacaaataatcattattttcctataccacattatgtacaccaaaccaaaccaatatttagatccaccaaaaggaaagtcctgccatttccttttcactttgtacaaactaccaaaagaaaaacttgtaatttgatatttagtcactagagtttctccggatttggagtagcaattccctcagtctgagtcccagagtaaccatttacaccttcattactaagactatgagaccatggaatcgagctaacggttggaaaacaacaactacactcgtccgcacaccgagcctcgggaagagtctcagtcttgtgaccatcaggcgaaacagcttcccaaagcggaccccaacactcgactttgttgaactcattgacattagaatggaaatagacccaaacaagagcttcttgtagctcaggatagttgttcaacaagttcccatctccatgcacaaaagccttcaacacctgtatatatcaaaacaataaacattttgttttacatgaaaccaataaaaagtttcttatgaatttgggaacttaccacaggtagttctttgcaaaagatgaaatatcgaaactttgcaaagagatctaaaaggaaatggccaccgcttatgtgacaatgaacgtgaagcgacattttccctttcactttcttccattctgccacaacttcatcccggtatagcctatttgcccatccttgcaactataaaaaacatttctatacatatcagcctctaaagtgttaagagattctggtgaatatagacacatacataggttaaaacaatcatacataagcctctaatatttgctccaaataatcaaatacataaacattctactcctataaacagagccatgtagatatgttaagaccagagagagaggtgtttttacctgagagttgtttatggattgagaaatagctaaggttagtttagctgtaatgtcactgtgagtgagtgtgtaagtcctagggagcgttgaaggatgcttcttctcatcaacccctaagaagagtactttcaatttggatgattcgaaaatcgccggtccaaacaaccttgcaacctgcaccgatcccaaaagtttcaagttccatcaataaagacagaggcatagatatatccataactgagacacataaaacaaagatatgtcaaaatgattaagagaacaaatccttacgggaacaatcgattggttcttcttcttggatcttctattgttgaagaagagtgagctgctgctgctactgttactccgtttgtctgaataagctggtttcagcttcgttggtaacaacataatcgccgacaaactacacatctctgctctcttgaaacccaaatcaaaagcttcaatatttcagaaataacaacagaacaaaacgccactaaatacagagagactcctttcacgaagcttggatacaattttttcacgcgagttcttgcgtgttcgtacactgaaaccacaatcaaaaagattgtaactttaagaaataaatatataaaagacccaaaatttgagcttttcctttgcttgatgattgcttgaagctttggttttgaattttccttttgagatcttccaggaatttagggttctttgtgatgcgtattgagttggttcttgtgtttaaaagggattgttgcttcacgtttcacacttccgtgcccaaatctgaacactcttttggaatttttctgaacacgagagagtgccacgtgttctctaatctttgcatgagcttccccatgtgtcgtcatggtggggctaacaactggctctaaccgtctttttggataactttagccatctcgttgcgacaaagagacacagattcggctctaaccgaacctaactcacgtactgtagttgtcagtcgaacctaaagcaatacggtttagtttcggttcaatttaatgtcattcgactcgattactcggtttagttattagacctgtgaaactcgagaggcttcttcgcttgaatcgtcgtgaacaaggacaacaaacgcaggtattgatggaaccggaggagtcagagagtcccatgttgatccataaggatgttaaaaagggctgaaatttgtgatcaggtccaggtccattaaaaatatcgggctaaaattgggctggcctgttacagagcttttatttttttcttcttcttttacgttaagcgacgtcgtatcttgtaaacaacaaaacacgagtactgttttttcttcttctttctccttcaatctcttcctcaaatcactctttttggggttcgttttgtttgtgttgtaagcatccctgttgtgcatttcgtttatccaggttcgtattgcttacctaaacaagttcaagttttcgattttggtttctaggtgtttaccagtttcgccattttgtggtttattgtttggataatttgatttctttggattttgctgatacccatttgtgtgtatagaaatttgattaatctggatactaaatttcgtttggagaaacattgaaccaaaggaatgcgaaatcttttgatgatgattgaatagttttagtgcctgctaatactttagaacagagtcaattttttaaggtcatgttatagaatctgagtctacttgtcatttgctttggaacaggtgaattcttgcaaagccttgagcagctttcagatg

SEQ ID NO: 33827 - DNA, 3003 bp, Unknown; identical to SEQ ID NO: 33826
  misc_feature (1)..( 3003): 2750-1469P.txt file - cDNA_ID_3072509; gDNA_ID_1620682; Annot_ID_164489

SEQ ID NO: 33828 - DNA, 3003 bp, Unknown; identical to SEQ ID NO: 33826
  misc_feature (1)..( 3003): 2750-1469P.txt file - cDNA_ID_3072509; gDNA_ID_2926181; Annot_ID_140561

SEQ ID NO: 33829 - DNA, 3003 bp, Unknown; identical to SEQ ID NO: 33826
  misc_feature (1)..( 3003): 2750-1469P.txt file - cDNA_ID_3072509; gDNA_ID_2926181; Annot_ID_200266

SEQ ID NO: 33830 - DNA, 3003 bp, Unknown; identical to SEQ ID NO: 19697
  misc_feature (1)..( 3003): 2750-1469P.txt file - cDNA_ID_3072550; gDNA_ID_1620683; Annot_ID_164544

SEQ ID NO: 33831 - DNA, 3003 bp, Unknown; identical to SEQ ID NO: 19697
  misc_feature (1)..( 3003): 2750-1469P.txt file - cDNA_ID_3072550; gDNA_ID_2926177; Annot_ID_199947

SEQ ID NO: 33832 - DNA, 3003 bp, Unknown
  misc_feature (1)..( 3003): 2750-1469P.txt file - cDNA_ID_3072552; gDNA_ID_1620683; Annot_ID_164543
aaggcgaagaaggcattcaagaaggcgatattatgacagttcaagcttggatcactctgaaacgtcccaatggactcataggcgctattcctcactcaccttactttcctttccacaaagaggaaaacttttgggttcttcttgcggattcaaaccatgtctggttctttcagaaggttaaattcatggatgaagctggagctatagccgctgcatcaaacactattactgaaacaatggaacctttaggagcaagcgtcaaggaaacaaatgatgcagttaaagaagctgttgagaaggttaaaagtgggtcaagattggtaatggggagactcttagcacctggagaaggtacttataacttgacttgcttctgcctaagcgatacttggatcggttgtgaccaaaagacatcactgaaagtcgaggttttgaaaagaacccgtgatgtggagggtgagaatgcagaagaaggattagaggaagaggatgatgagattgaagaggaggattacgaaagcgaatacagtgaggacgaggaagataagaagagagggtcaaagaagaaagtaaacaaggaatcgagttctgaagagtcaggatcagatgaagagtaaaagaacaaaaagtagttaacgttgatctgaaattattgtctgaaattatacaataatttttgttttcagagcttacacagtcgtactaaaagattttacagtatttaatctttttgctgagtttaatactctttttagttgactcttcaaatctataccttgttttgactcttaagctcagatagttcaaaacttttctggtcatgttttcgtcagaaacccaagctcagccccagaaagcttctttgaagaaccttggccgtctatctattttccttatagatgattcaacggtagatacgatctcaaaagctcatgaagagtccaaatgatcaagactgggttctctagaagtaatctgtccttgacttccacccaaaagttctttttcatcttcttcctcttcactgagatcctcaccatcttcttcttcactctcaatctcattgtcaatcttatcttcgtcgctgcttaaaccaccttcaccttcgcttagctcattcagctgctttgccttgaccttaacacgtcttcctttgatgtatctaaactcccactgtggtggaggatatttcttcatcagtttctcgtacttatccttcatctctagtttcacaaacacttttccaaccatagacacaatcgcaacattcggtttcactccaagctcctccatgtcagcaaagacctaagaaaacactcaatagtttcatacatcaacttctctgatagaatctctgccagttgcaaatacttagtaagaaagattttttaagtgtacctcgaagagcttttggtgcatatctctcttgtaatatatagagatcattttgttgaagaactttctaggagttccttctaaatgttccatgaacaatttgttccacaattcctcagcttcgtcaaggcgattatcttctgctaaagcatttagtaatgagaagtaagttcccattgttcttccttggcctttactcagcatccattttgtcacctaacaaaatccataaacattattctacattcatctaactaaaaaaagaaacacagctcttactgcttaataaacaagcatacctgaataatcttcttccattctttttcatcttcaagtataactaatgccttcttaactataacaagagggaactctaattcccaagcaatgaaggaatcaagcgctccataaacttcttctttaacattcgacaatccttttatctgcagattaacaatactcactaactctaaaagagattgcagaacacaaaaacatatgaagagagcattacacaagcaatcattttggcagctttagagatagttccaatcctcttccttgttttccatacacgaggagaccgaggtcttggacctctcgccgcacaaacctgaaagattattgaattcgaagacaacatgtgaaattttgaaaccaagagactgtcgaaatgtttagttaaagaaggtataagaaacataaatacgaaccacaacattgttaggctttttggtgaagagcttagttgatgattcccttgtttgaagaagaagataaggtaatgaatatctcaagcttagcatcctgaaaaaaatcaattcagagaagaagaagaagaagaagaagaagaagaagaacccagaaatcttaaagctttctccttttcagccactagagatatctagtgaattcaatttacaattgtgtaagttttctagagaatcgaaacacatattgttcaacttacctgtgctttcttcttcttcgttctcactctgtctgataatttgcgcttctctgtgtcctccaagttccctctgatgtctgattctcatccaaaacatacgaaatgcgtttatggaagtaacggataaggcccattaactagtaaagttaaataggcccattaactagtaaagttaaataggcccattaacctgaaaattttgacccgtcgtctgtattcttcatctctttcctcttcgccatcgattctctgagctggaaacgaattctctctctctcagcttatagatacccaaattaaggtaattttactcttcttcgtgattcttcttcgattaggttttggtttgaatctcgaatcgatgattttcgaactgatttgctcttgaaaatcatgtggttctgctccatgttaaattgagatccgaaattttagaatattagaatgacttgtgaaatgttagtatgatacaaaaaccatatctttccttcttttgcttcttcaacataagggtcttttgcttagttttgctgtaaattccttatgggtttttagcagagaaataaaagatctgatttttaacatccattacaagcgattcagattttgcttttttcttgcagaagaagtgaaagatg

SEQ ID NO: 33833 - DNA, 3003 bp, Unknown; identical to SEQ ID NO: 33832
  misc_feature (1)..( 3003): 2750-1469P.txt file - cDNA_ID_3072552; gDNA_ID_2926177; Annot_ID_199946

SEQ ID NO: 33834 - DNA, 3003 bp, Unknown; identical to SEQ ID NO: 19703
  misc_feature (1)..( 3003): 2750-1469P.txt file - cDNA_ID_3072555; gDNA_ID_1620683; Annot_ID_164540

SEQ ID NO: 33835 - DNA, 3003 bp, Unknown; identical to SEQ ID NO: 19703
  misc_feature (1)..( 3003): 2750-1469P.txt file - cDNA_ID_3072555; gDNA_ID_2926177; Annot_ID_199944

SEQ ID NO: 33836 - DNA, 3003 bp, Unknown
  misc_feature (1)..( 3003): 2750-1469P.txt file - cDNA_ID_3072567; gDNA_ID_1620683; Annot_ID_164534
ctcataccaatcttgcttcggcaccctccttttgtttcggttcttaaccctaaattttccccttctatcccaaaacacagagattgataaaccctaattgttcaccttctattactgaaactttatctagactgttctggatttatgtttggatcaaccctctgcgttgtattggatgtagccttgacgcagaaaccctaattttccggaagcgtccttgcttgttgtttcaattgcttaattgagaatctctttggaactatgaaagtcttagaatctctcgttttggtgaaagtatcccattttgcttaatttgttcctttgtttaacgttgtgaatttgcgttgtgtagaaaatgccaaaggttaaaactaaccgagtcaagtacccagaaggatgggagttgatcgagcctactcttcgagagcttgatgccaagatgagagaaggttagtttcatataaagattttgttatatctcaataacatatgcttttgcttgtttctttttcccgtgattttgctctaactatcgtgttccttgtgcagctgagactgattcacatgatggtaagagaaagtgtgaaactttatggccaatcttcaaagtttctcatcagaggagtcggtatgtatatgacctttattaccgaagggaagaaatatctaaagagctctatgaattctgcttggaccagggctatgcagatcgcagtctgattgccaaatggaaaaaggtatgtttttatatcattcttgaattaacttctgtttgtatgcctttttagttagttgtctaaggccaaattgaagcgatttggagtttctattatgtaaaatattgttgtattagtttagagagtctagtatcgccttactgcacaatgagtcttgaagctgtttctctgaaatatatgtccttagcatatgcacttacttggaatgatctcactaacgaataggttctagaattggtattgttgctttgtttggtgaagaaataagatttctggtaattatacttcgaacaaagtgcattgcctccacgatttgccaaattttggatagttctaacttctaaccatactcccacatcttaatgatggtcactcatgaatcgtttattaacaaactcctccctgtcaattctgttgcatcttctctttgtaggttatactatccagacatatacctagatttcacttttgttttctttcattgaactaagattttgtcatttatacgtgtctctatactttgtgttaagtaactctaaaaactctctgttttgtgttttgcagtcgggatacgaacgtttatgctgcttgcgctgcatacagccaagagaccacaactatggaacaacatgtgtatgccgtgttcccaaacacttgcgtgaagagaaagtggtcgaatgcgttcactgcggctgtcaaggatgcgcgagtggcgattaaattcaacatagctttattcgctatctctgactgtttgttacaatcttgtcacttgttaaatctggattatgtattattccataaaggctaaaaaccctgactaaaaatctccttgctcttacttatcaactctgggtggtattgcaaataaaaagaacgttccggtttggtatatagttgaaacttgaaagtagaaagacgtttcccggtttggtatcttactgaattaaaagagtgttttactattcccaaaagtgtcaatttctctaaattcgtgagatttgcagcaagtttatcatgacgccgtgagttatgttttggtcaaccggtgatagaacaagatattattgaagcagaaataattattaattcttgtatttatctagacgaaacttgattgcttgatccaaggaaattgttttgacttcaaaattgtattggttctcactacagttgacctgcccctatgtttccatgtggaacaagattcttcgtcttggtcatatggattagtattatttatttctaatcttatcgtgtaatgcatgtatgatgtatgttctaaacaagatgtccaccaaggtccaaaacgagaagagatgcccattacgctcgctctagatgctttgtgaaactcgatggactttcttctctttaaactcacataacatacatacatgatccaaaatccatgatcgttctttttttttttgggttcatttttcatggtttattggaagcacaaaagaaaccaaaaataggatcacagttcttggacatcgtttaatacaaaactagaggaagtaaacattaaaaaaaaaacttgaaaaattaggggaggctaaatcattttcttgacgcgcttgtaataggaggagcaattgtggtaagtggttggtgtgaattagaacccaattatcaactaagtcgagttttgtttaaaaccaataaatttcatatacaagtttgaaactgaacatataactttttctttatatatcataattttgagtataacggatataacattttacttaaatgagaaagtactattgaattatccagaagacgtgatccgatggaaaaattcgtatcacacatgatcttttctttttatggcacaccagattttgtttacatttataattcgatttcatctttttcttagaaaaaatggtcaaagaatgcagctggtgaccaactagtgaccatacaacaagaacaaaatctcatggactctatttaaggtttccataatttaatttaccgtatcacatttccagctaattacacaaaaccgtcgataaataattgtttatagaaagaaataaatacaagaaaaacgtcaaaggatagctactataagtaaggcagactttaggaacccaaaattctgttattaatttacaaaaactaaagagtttttcacttttcagtttctcttcttaccattcactctaaaaaaacagagtctttataaaaccgatctcagattctgaatctgaatcagaatctggatcaacataattttctaacaaaaaaaatg

SEQ ID NO: 33837 - DNA, 3003 bp, Unknown; identical to SEQ ID NO: 33836
  misc_feature (1)..( 3003): 2750-1469P.txt file - cDNA_ID_3072567; gDNA_ID_2926177; Annot_ID_199939

SEQ ID NO: 33838 - DNA, 3000 bp, Unknown; identical to SEQ ID NO: 19720
  misc_feature (1)..( 3000): 2750-1469P.txt file - cDNA_ID_3072613; gDNA_ID_1620685; Annot_ID_164572

SEQ ID NO: 33839 - DNA, 3000 bp, Unknown; identical to SEQ ID NO: 33709
  misc_feature (1)..( 3000): 2750-1469P.txt file - cDNA_ID_3072621; gDNA_ID_1620685; Annot_ID_164569

SEQ ID NO: 33840 - DNA, 3000 bp, Unknown; identical to SEQ ID NO: 4148
  misc_feature (1)..( 3000): 2750-1469P.txt file - cDNA_ID_3072636; gDNA_ID_1620686; Annot_ID_164625

SEQ ID NO: 33841 - DNA, 3000 bp, Unknown; identical to SEQ ID NO: 4148
  misc_feature (1)..( 3000): 2750-1469P.txt file - cDNA_ID_3072636; gDNA_ID_2926202; Annot_ID_201928

SEQ ID NO: 33842 - DNA, 3003 bp, Unknown
  misc_feature (1)..( 3003): 2750-1469P.txt file - cDNA_ID_3072640; gDNA_ID_1620686; Annot_ID_164617
caactggtctgaatgtgctgaatcatgtacaggaaaccctaagaagatgcgttcattggaaaaagaaggacagcagcaaaaggtagatgccatttcttgccgaccagaaaacaggggtggtaaatctcacgtgcaagcttccttaaacaatcacaaaactggttactgtcaaattgtcagggtaagatcaaaagggtttagtgagagtgttcgtgctgatgattgttctgatagcgatgtatgctcagttggtagttgtagtgctactagttatgatgagagtaacatgccaccttgtatgctagatggctctactcaacaggcagactcatgtagcagcgatgctgaatcttcttgtggcctgggggaagaaccaaggtggaaacattcatcagttggtgatggagcaagaaattcttgtaggtcggaactatattcttaccgcagtactctgggggaattattttcttctggtcccctaagttgggagcaagaagcatcattaactgatcttcgtctttctcttaatatatcagatgatgaacatttgatggaggtaagaaatttgatatctactggtacccgcagtcaattttgttagtatcaatcagaattcaaatttttctttttgatttctatggtcaagtctgatctacctgtcttggatatactttcctgaaatgtggaatcaactgtcatatattgttctttttccagtggattttataagtgtatagacagcagatacaagtatgtatggaaattctgattagaatgaaagtttccgaggttcttttctattgctttatcagatttcccttagattcctttattgtaattcctggaggatgttaaagcaaaattcatgtatcgatactctgagatgtcatattttgaagggctgtcttctgttcattaaatctgtaatatcaattttatagcacgattttctgttcctcgtttcgtgttaactttccacacttgtgtgttgatatacttgataacaagatgggtcaatcgtattttcctatgtggattttacttcagtgcaatatgaagtctgaatgtctcatctattgagtgctccttcctgtagctctatgaaatgtgttagtgtgagtttcctagtcattcctctgaacaatattgatttccccctgcatttttcaggaacaatgttgccttatccgggcatgcagaccttttgcttctagaggtctaactctgatgctggggtttacaccttctcccttgaccatctgagtggtgcaataccatacctgttctccctcaaaacataactgacttctatgccatttttattttgtcgctatcttgatattgcggcttgtttcaggggcttctttcaggtgtcctggagtctactttgtccacagggactgaatgctgtggtttgagcaggcttccttatttgcagtctggttggataattttgctgacatcatgtcaagttctgagtaatatttctttacactttttcgttcactcgatatatgttgcggtgctatcttttgtggtgttgtgtctcctctggttgctttcttagaagtgcatgatgtagatgctaccatatttttactattactagctctctaagcctaatacgtttagatgtagaacacaacgttgtttcagttacattggttctattttcggtgttttttccagacgcatagcctattgatgcttattctttctggaaataagtgttgtggcctactgagaggtaagtgtgcaatggcatgaatggggttaatgtaatagatgctcatccagaaaatgtgtttgtgatcggtgttgattcgttattctgatttgttctcatgacttactttcatggaaaattatcgagatgaacgggaacacatgcctgctttcttacttagtttgtcgcatgtgcattgtgatcggagattgtccaagctcactcttcagatgtctccagcaaaggtaggttgtttgcatggcagtatgaaactctgaagcagaatccattaattttcacaaaggtatggatccttttgaaagatgtgtcgtggttcttcaaagtttaacatgtttttcttgagtagtttgcttgcttatagaatcaaaacgagtttcgtatcttcaaccagactttctttggcaattagttactactgctacttatgcaatgcaacctctggcaatattgattgatttgcgttatgttttaatggttatgaaaactgactcttcgatataagaacttgtgaagtaaaaactctatgtgatgaaattatgaatgctgaggatgttgttattacgagcaatgagatgtctttttttaaaaaaaaaaatttggttgcttgcttgcaagaggacatcttagcatcaaatttgaaaccgaaagctgactcaattctggtaactactggcagtaacaagaaaacaagtcatgaacctgcaatttcattctaattctacacaagatgcaaatctcaacttaaattcacttttaaaacttgttattattgtaaattttttgaataatacagttggaagtaaaaatccaccgtaccagtgtaccggtaacgtggaagtataaaccaattcgccaatctctttcttcctatcacaatttaaagacagcgacaaaattagacggttagaatgctgagttataccgggttattaagataacctttgttttcgttaaccgaacaaacgcgactgagtttcactgggaaaaaaaaaaaaagaagaagcttctttagcttttgtgacgaataggagggaactgagttttaggttcgtcttgatacggcttactctgtgaatcgagaagaaattgaattcgtttttttcgtctttctctgcaaattaacccatttgactgtttgtagtttctttcgcagatttataaagttggtcttcttctcttctaatcggatcgattctgcttccggttaaccggttttgttccccggcgacaatcagcaatctcctccccggccaatg

SEQ ID NO: 33843 - DNA, 3003 bp, Unknown; identical to SEQ ID NO: 33842
  misc_feature (1)..( 3003): 2750-1469P.txt file - cDNA_ID_3072640; gDNA_ID_2926202; Annot_ID_201922

SEQ ID NO: 33844 - DNA, 3003 bp, Unknown; identical to SEQ ID NO: 17136
  misc_feature (1)..( 3003): 2750-1469P.txt file - cDNA_ID_3072644; gDNA_ID_1620686; Annot_ID_164616

SEQ ID NO: 33845 - DNA, 3003 bp, Unknown; identical to SEQ ID NO: 17136
  misc_feature (1)..( 3003): 2750-1469P.txt file - cDNA_ID_3072644; gDNA_ID_2926202; Annot_ID_201921

SEQ ID NO: 33846 - DNA, 3000 bp, Unknown; identical to SEQ ID NO: 4135
  misc_feature (1)..( 3000): 2750-1469P.txt file - cDNA_ID_3072648; gDNA_ID_1620686; Annot_ID_164614

SEQ ID NO: 33847 - DNA, 3000 bp, Unknown; identical to SEQ ID NO: 4135
  misc_feature (1)..( 3000): 2750-1469P.txt file - cDNA_ID_3072648; gDNA_ID_2926202; Annot_ID_201919

SEQ ID NO: 33848 - DNA, 263 bp, Unknown; identical to SEQ ID NO: 4129
  misc_feature (1)..( 263): 2750-1469P.txt file - cDNA_ID_3072660; gDNA_ID_1620686; Annot_ID_164601

SEQ ID NO: 33849 - DNA, 3000 bp, Unknown; identical to SEQ ID NO: 3028
  misc_feature (1)..( 3000): 2750-1469P.txt file - cDNA_ID_3072660; gDNA_ID_1620621; Annot_ID_162305

SEQ ID NO: 33850 - DNA, 3003 bp, Unknown; identical to SEQ ID NO: 19738
  misc_feature (1)..( 3003): 2750-1469P.txt file - cDNA_ID_3072660; gDNA_ID_2926202; Annot_ID_201906

SEQ ID NO: 33851 - DNA, 3003 bp, Unknown
  misc_feature (1)..( 3003): 2750-1469P.txt file - cDNA_ID_3072688; gDNA_ID_1620687; Annot_ID_164651
aatcactcgcttcctcggtttcctactcttctctgtctttccaggtaacgccagttttgactcattcattattcggaacgtttttgttttaaaaatttttggtgctgttatatttttcacataacagattgattttttttagaattaggtctcttgaatcgaattgtagattatatagtgttactgtcttattgactccaagactgtcaaattttgacaacaatggcacaaaaatagcaatggactatgtaaagtgaatgagttaagattacctaattgtgaacaaataggcttgtaacaataacacattgtagtgttgcatagaattcgatcttctgttatctctgtattcggtaaaagaaattcatagatgttctaaaacttaacattttactaaaaaaaaagcacattgtagtgttacttgagttgtgagcatttttagcaaccaaacatgtttttgctctttttattgatagaaatcccaaactggaggacatccctaatttagccaacgagctcaagtttatctccgagttaaaaccatcaaagatttatgaagaagaacaatgcagtagcagtacagagggatattataactctgatctgcctaaaccacgaaagctcgttctgaaacaagatcttaactgccttcctgattcagaaaccgaatccgaggaatctgtaaacgaaaaaaccgaacattcggaatttgaaaacgataaaactgaacagtcggaatcaggtaaatctctttcttcaaatgtcaatagacttgccttccagataatatataactctaggccagttttaagctctcttttttttggtacaaggtccagttttaagcattttggtgattaatttcgggttattgtaaaaacacagatgctaagactgagattttgaagaagaagaagaggacaccatcgagacatgttgctgaactatccttagaagagctttcaaaatactttgacctcactatcgtggaagcttctcggaatctcaaggtcggtctcactgttttgaaaaagaaatgcagagagtttgggattccacggtggcctcataggaagatcaaatctctcgactgtctcatccacgatcttcaggtcttctctctctctctctctctttatcaatcctaatacatcaattcactgaaagaagcattgatttgttttggtattgattagagggaagcagagaagcagcaggaaaagaatgaagcagcagcaatggcggtagctaagaaacaggagaaactggagacagagaagagaaatatagtgaagagaccattcatggagatagggatagaaaccaaaaaattcagacaagaaaacttcaagaaaagacacagggcttctagagccaagaagaatcaagaatctcttgtcacttcctcttccacttaaagactttaggtcctttaacagtaacatcggatatattagttagttaggggtttctgtgaagcgttttggtatttagaaatgttagttacaagtctaacagatgatgctaagccatgtttgtttttggtataagaagttccaagaagagaggaactcttgtatcatgattttttgtggtcggatatcagaattgaatcttttattttttcttagtgcaattaggtagcaattaagatcgaatttctttatataatggtgaaagatcaaacccaaatcatggtttaggaactgatccaaattaacccatccatagtcaagaaaaactttcaaaagtgtgatgaccagttttgtttaaggctattggttatgtgtgttcttgagtggtcccagctcgtgctttgaaaatctacgacgactctgtccacacgacgaagaccatcaattaacgtgtatcgtacaaagaagttcgaagtctacaagtgtgtatacgtgtgtgtgtgatcctacgtcaatatttacgaaaatgagaaaatgtttttctttgtttcattttccatgcaactggcattttgtacgtggtcaagtatcattttgaagtcattttcagtgtttttgatcaaaaattttttttgttattttttggtgaagatcattttttttgttttaatattaaaaaagaaataacaatactttattttctgatctaaaaggcctatatatatatatttgaccaaacaaaaaaagatctatatattatatgatcatttaaaaatgaaaagtatgatgttttgaaaaaaggccaacttacgaacatctctgacaaagtgaagaaatttttttctcttacgcattcatataaagaaaaatatattctaattttgccattggagaattttggtgtttctaattgtgaaacagctctatagactatagtagaagtcgaatgactttcatatttgtggaaatgaatgagaaatttccataaagacacaaacgtccaagcactgtgactgagaggatgacttttaagcattttgctggcacaagcaaaagtctttttacttcctaacggtttcacatctctactattttttgaatgatgtggacagtgattaaaaaaaaacatgtgaaataaaattacaaataattcaaagatttccaaagtaaaaacaaaattctcaattatttttttcagatcacacgatcataaatagatagaaaaggctcttaggctatgattcttctttttggtcccatcttcttggcattttcgtttgtttttttttaatttcttttaaatgagaaagaaatgcataaaaaatgaaaaggtagaccaaaacccttcttcggttcacgctagcaacccccaattttcctccctttattttattttgttatctaaattaagtcaaaattattttgcaacccatcgttgcctctttcaatagttctaaactcgagcaataaaaactcaaataaaccaactgacttgagatccatatccactagctcttgtctgaattggtaaaacaagaagaagaagaagaagaagaagaagaaagagaaggctcattagaaattgatg

SEQ ID NO: 33852 - DNA, 3000 bp, Unknown; identical to SEQ ID NO: 4180
  misc_feature (1)..( 3000): 2750-1469P.txt file - cDNA_ID_3072738; gDNA_ID_1620689; Annot_ID_164694

SEQ ID NO: 33853 - DNA, 3000 bp, Unknown; identical to SEQ ID NO: 4180
  misc_feature (1)..( 3000): 2750-1469P.txt file - cDNA_ID_3072738; gDNA_ID_2926182; Annot_ID_200357

SEQ ID NO: 33854 - DNA, 3003 bp, Unknown
  misc_feature (1)..( 3003): 2750-1469P.txt file - cDNA_ID_3072747; gDNA_ID_1620689; Annot_ID_164688
caagactatcaaaaagaaaatgataaatattgcatgggtggttgacaaaattcaccaaaccgtagcagtaagagcatgcactaaacccacataaccgtttggcgttttggatataaacacattgtcaaaccactcaagcgttccccaaatttccccattttggtgtttttcaatcgcaatttccgcacaccaaatctttttttccctatcaacaaacatatactcctcccaagaaatcgccatttttccaccatgatccgccaatttaacatttgaatgagaagtaggcaaactaggcaatcttcccaagcccttcaaaattgtccatgctctattcttgaggtcataccaacgtatctccccctcacagtaacggtagaacacgttctctaccacacaataagatgatgatgacgacagactccatccattattcatacatatgtctgcctctctccatttacctttatgcatcttgtaagtcacatctttttcatcagacttcacatagacggttccttgataacttacgcttaagtactcagagcctttgcatatctcctcgctagggatctgtagaaactcccaagtttgagtcttcgtatcaaaaatctccatccagttcattgtatcgagattgtcgcagcctcccgtaacatatattctcccatcaagagtacaagcagatggaaacacacggcccacccgcatgcttggagcttcatgccatgtgtgagaacgagagttcataatcataacgctagacaaagcgttataagtctttgatccagtggcatatatcgaaacgtttttattctttgatccaccgccaatggcatatacatcaggaccaaccactacaacacccggcagggatggggaggtaaaactgggagatgaaatcggaaccaaaacgtttttggagctatgtggtctgtggcacagaatgaaccaatgtagtagttcagaatcggtacggagtcgtaagcacgcgtaaagacaactctcggttcggcctaagaggattcgggtttggtaaagctccgttgaagcaagaagagagcgaaatgttttggagactaatgagagagttggataatgtaatcttgagatgcgagctaagcagtttaataccaaatcatcaggaagcattagaaaacttcttctagttcttttaatcgggggctcttctccatattccatggttgttgatcactttttttctcttaaggtttaaggttgcttgttaagtaagaagatttctataacaaaaacgtatattctgtttcgttctttgtgtgctctttctgttacaacgatatatatatcaagttacttaccctaacagatccataactttatgtgttttcctatatttgttatgtttatccaattatataaaaaatgcataacaaagttaactattatcttccgataaattcgtgagattttatgcaggtgataatgttcaataatccaatcagacacgtaatacttttttccaaagctaaataggagaagaaatctatcaaaataggatatatttttttaggccgcctatgatcatctatatatatgaacaacccacaccttgttttaacaaacaaaatcaaactttttcacaacaaggcaaaacaaaaaccctaaaagcctctcagctgctctcttcgacaatggtgaatacttgtaggaccagcttcatcatcatcatgatcctcttgctcttcatcaatcagtctgctctttcttcttctgcacgcgtccgtcatctagaaggtcgagatcatcttcctcaccaccggacacttagtgagaaggagaaagctgataaggaacgtctcagtttcatatttagaacgatcgaggctgacatcaatctggaggaagatgtttctctccgtcttccccaatttgctcgatataataggcttcataattcctatttcagttactgaatctactagggctttgaatttgttccattaaggttcattacttcgattgatactcaatgaatcatgtaatctttatattttttagactttttatcatgacttttgtaaactcttcttcaatttaattgatatattattccagaatagtataaaaataagaaagcctcttttttttttttttttttttaatattgacattcttacgctctacgtctaacttttatgtaccctttgatgtaatgcgtcacaattaattttcgtgaatcttttggattgctgatgtgataatcaatttatgtagcataccgaatgaaacagattacacatgccatttaaaagtatgaaccattgaacaccaaaatcggttggtaaatatactaaattgttgtgttttgtatatatagtttatcaatctttatccataagcgttatcaacaaaatatgggtacctctttttaatagacgtgctcagggcataagattaagactaattgcatgatccgtaatttgcgttcttaattaataaggtttatcatcttgcaggtagatctaactcatgagtatataatttaatttatttgctcaagattgaacatgaacattattgtggtgttacaaagagagatagtacgaggtaaaactatcatagaaagtgattcaagtttcttagggactataaaccaacttgtataattgaagatccaaatataaaaaggctctgatccaatttcaacagtcaaaaatcttattataaatggaccatcttacgttgacaaacgtatcttatgtgatcaccttgataagaggaaacccacgttctaccatgtagggtttcgagatacattaatatttccattcttttcttatctcgatactattatatataatacttaccacgtgaaatatcaaatcaatataaaaaaaaacgtagaaacttttactatataatctcactagtagcaatgagggtaaaatcacgcaaaaacaatcatctctctataaaaataaaagaagttggttagttccaacgctagagttaagaaatatg

SEQ ID NO: 33855 - DNA, 3003 bp, Unknown; identical to SEQ ID NO: 33854
  misc_feature (1)..( 3003): 2750-1469P.txt file - cDNA_ID_3072747; gDNA_ID_2926182; Annot_ID_200352

SEQ ID NO: 33856 - DNA, 3000 bp, Unknown; identical to SEQ ID NO: 19784
  misc_feature (1)..( 3000): 2750-1469P.txt file - cDNA_ID_3072751; gDNA_ID_1620689; Annot_ID_164681

SEQ ID NO: 33857 - DNA, 3000 bp, Unknown; identical to SEQ ID NO: 4210
  misc_feature (1)..( 3000): 2750-1469P.txt file - cDNA_ID_3072763; gDNA_ID_1620691; Annot_ID_48591

SEQ ID NO: 33858 - DNA, 3000 bp, Unknown; identical to SEQ ID NO: 4210
  misc_feature (1)..( 3000): 2750-1469P.txt file - cDNA_ID_3072763; gDNA_ID_1620691; Annot_ID_164765

SEQ ID NO: 33859 - DNA, 3000 bp, Unknown; identical to SEQ ID NO: 4210
  misc_feature (1)..( 3000): 2750-1469P.txt file - cDNA_ID_3072763; gDNA_ID_2926158; Annot_ID_139627

SEQ ID NO: 33860 - DNA, 3000 bp, Unknown; identical to SEQ ID NO: 4210
  misc_feature (1)..( 3000): 2750-1469P.txt file - cDNA_ID_3072763; gDNA_ID_2926158; Annot_ID_198589

SEQ ID NO: 33861 - DNA, 3000 bp, Unknown
  misc_feature (1)..( 3000): 2750-1469P.txt file - cDNA_ID_3072777; gDNA_ID_1620691; Annot_ID_164756
tttgttgtaaacacttgcgtctctgtctacacaagtaatttgactgtaaatgtaagtgtacaggatttaaattgaataagcatttttttcgtgtcgtaaatgtcaaaacaatatgtagccttcccccaaatcttagtaccgacgatattggtaacatccgctgaaatgtgttactatttattttattgtagtcttactctttttattaatcaatatattttgatgaaaatcttccggatagcatatttagctttcgaaactattctcgacccttactcgtattcttccgttataaatgtattaagtaatggtttatatttaggaaaaatgtcatatttagcttttgatgtttagatcacttgttaatgtacaagatcaaagacataaaaattctattattattttggagacagtttttattttattacaaaattcaaaaatatgttttgaaataaacagttttctctatagttttatttctatgttgtaattcaatcaaaacaaccatctcagatatataatctccactttgttcattttgatatagtttttttttcaagtagatgtgctaaatctccaaaaacaaatatattttgttatctgttgcgttcttcatgattatgtggaaagtggtttatcaaatgttagattatgtatgtggctttgttctttcttgttatgttatgtatgtgtccttcataattatgtggaaattgttttttgttgttgatgatttggtgactggttgaatttgaccattttgtcattttgtgaactatgcttaacggccaacgcaatggggatattgaggtggttttctctaagcggctatcaaagacattcagacagaaagaattggagtatatttggatgccactaacgaggctatatggttcgaaaagagtaatcgtctcctttgataggatacaaagtgtttggtcatactttttttccgttcacttgtatatctatctaaaaacccgattgcattacaaaatttctttgggcggtacatgggactatttgtcagcttagataacccaaaggaagatatcgaattattaatctaaagaatatccgaaaattcgaaataaatttacatatccaaaatattagctatatttagttacaaaatttataccacaaactacaaaataacaaaaatatcttaaataacctaggcttccaaaattttgtagttatatttgataaatttatacatttttttttttttgcaaaatataaccaaattttagtataatcaaaatgtttattatttttttgtttttttcttccaaacaccaatccaaattcgacagctatttgaattgaatagtcataaaatctgaatatataataaactcttctatccaaattatccaaatccaaaaatattcaaactaaatcctattcaaaatctgaatgcctaggcatagttatatacttatatacagtaaacggatttatttcggcgggtatggttcagacagagacttcacacccgtgggccgacgtggaattactcgaccaaggcttcactaaaaatgaatatgtgctactaaaacgcaccgtttcttagtttaattcaaacggcgtcttattgcttctcactctcccaatctcgattctcagactcaagacactctggaagaaccctaaagcattttcctcaatcgttattggggttttacgaattcgacatctgtttctgactccgccgggtaagtgattatttctctccgttgaacctaccttgaaactgaaaaattctcttttgattactccgttctttcactcgatatcagaagtttttttcctgtttcattttttctgtgtttatgacgaagtcctttctctcctttgatttgtctatcgaggtcatggtcttgtttttttctctgaaacccatttgggagttttcagatttttagttgaatcgagaaatttgatcttcaatttcctgaaattttgtgtaaaggtcccatttttaatgcctagtgcttgctttttccagtggtttacccaaatgcttgaaatgatataagttaagctccggtcatttgcgtcgtttatgttttttacgttaacccttttggggaattgcgtctttgggcgacaaagtcttcaacttttctggatttctgttgaaatattatctttctgtctcatttatttcattgctactttaagtgtttgaattgatgcttgtcgtatctctgattgtgtaaagtttgtctcgaagtcattatatttagagtttgtcttatctctgcttgtgtataatgtttgtcttatcttctgattgtttgtcttgttttataattgaacattcttttagtgtaatttgtcttagtgcttcttcatctgagtgtgcgagaggaagctagcttatgatccatgtacttcagatttaagttctttgtacagaagactcggtaaaatccctgaggccgagtctctctaatttttgaacttttttagagcacttgagctatttctagctttctactgtgaatgttgtttgtgaaatttttggtgtttgagcttagatagattttgagttttaattgtttgcactttggctatgtgatatctcctgagttcgtggattggtcatgttagctctgtcgttattattctttgatcatataattcatctgattggtggagtgttcttattatccactgattcatttgttgaaaaaatgaagttggttgaaaaaaatggagaaattgatgcgattcttgagttttgttatgccaattactgtgaaaagtttgttgattgttgttggaattgatgtgaaatatgtgtgctttgggaattttatgctacaattgtgaacagatgtatcaaactccgttgcattgaaaatctctgtttgggcatgtctcgttgtagtatacagttcccaggattctgacataatgtttcaactcatgacatttcttaatttgtgtaatctaatggtcgttttgactacataatgaatgcagatg

SEQ ID NO: 33862 - DNA, 3000 bp, Unknown; identical to SEQ ID NO: 4204
  misc_feature (1)..( 3000): 2750-1469P.txt file - cDNA_ID_3072785; gDNA_ID_1620691; Annot_ID_164749

SEQ ID NO: 33863 - DNA, 3000 bp, Unknown; identical to SEQ ID NO: 4204
  misc_feature (1)..( 3000): 2750-1469P.txt file - cDNA_ID_3072785; gDNA_ID_2926158; Annot_ID_198575

SEQ ID NO: 33864 - DNA, 834 bp, Unknown
  misc_feature (1)..( 834): 2750-1469P.txt file - cDNA_ID_3072789; gDNA_ID_1620691; Annot_ID_164748
aagcttcctccttcacgttattagccactgacagcatcagaaaggttctctagaactctagaacctaagcaaatgtcacaatgctctcgattatcttattactcaccaaagataagctccagttttttgaactagttaaatgtattataattagaacgatgtgagacttttgcttcaaggtcgttgagtgtgagaaatggttttctttgatgttacctggtaaagatgccatgaagcataagcatccgttgttgtttatgctcctttgacctcccaattcaagcctaattctgtttggcttcaggagctgcaaagtaacagtttttaaagcgaaatataaccacattcccaaagttctaaatagaaagaaaaaaacaagctttgaaatcaacaagataaggtggataatgggtacctctttgcaatcaagtgtctcagttagcgaggcacggccccatttttctgaatcaaggtttttgtgggctaaacgtaaaagatcttcgacatctttgatggatacaccattgtcatggaaaagcttaacaaagtcacagtcaattcaaacaccacatataagaactaagttaagtatgagcatatccatacttaactacagaataatattgtccaacatgaactttgatcacttcaaaaccttaacaagtcaatagtcaatgtatagatttcttagctacagaatcagtagctaagtatggatatgctcatatactaggttgttgtatcagaattgtaaaatttcttggcctggtttataaagtggtatgtgtttaaaagaaaaataaaagaagtaaaatgttatattcaagattcatg

SEQ ID NO: 33865 - DNA, 3000 bp, Unknown; identical to SEQ ID NO: 4215
  misc_feature (1)..( 3000): 2750-1469P.txt file - cDNA_ID_3072817; gDNA_ID_1620691; Annot_ID_164808

SEQ ID NO: 33866 - DNA, 3000 bp, Unknown
  misc_feature (1)..( 3000): 2750-1469P.txt file - cDNA_ID_3072817; gDNA_ID_2926159; Annot_ID_198653
gcgtatttagattcacttctatgatcgtaattaattctgtatgctgttgaaactgtatcttgtggtagttttaaacttggttttctgtaggtgaacattccgaaaactaagaacacttactgcaagaacaaggagtgcaagaagcataccttgcacaaggtgacgcagtataagaaaggtaaagatagccttgctgcccaaggaaagcgtcgttatgatcgtaaacaatctggttatggaggtcagaccaagcccgtcttccacaagaaggtatactcgcttttccttgtcttgatctctaattactgtcttctatgtgagaaccaatttaggatttcagaattgactctgtgaaatatgtcttataggaatgatttgttaattggaccttgctcattatttgtctttctttggaacaggctaagacaactaagaagattgtgctgaggcttcaatgccaaagctgcaagcatttctcgcaacgcccgattaaggtaatgtctgcgacattctttacctttgttaatcactctttagtctcagttctgtttcttacactttgtgtgtggtttttgcagaggtgcaagcactttgagatcggtggagacaagaagggaaagggaacatctctcttttaagttgttgtttcatctatctacttttttttgttttgtttggtacctgtcctgcttcaatactgtgatatactttgaatctaccagaaatggtcctggtttttaatttaaataggacttggtcttatggatgtcttttaatttggttaaccaatctttcttcattaggctgcccttgagtattctctataacttgcgacaaagtagacataacactctttaagttctaaaaaccactttctattttcggatctcgaaaaatcatttatcgttttgtgctgcaaatcagtgttatatatgagcttggcaaattaaaatgacatatacgtatagaaatgaattgataatactaaatattatttgttttcttcttttaacttcagccatactaactttcactaaatttcttaagagcatacagaagtttctcctcggtatattggtggttctatattccccgcaacgtgaatggaaaatgaaggttctattttggctatatgataatcatgccattagctgacccgaaactaatgtgttacaataaaaccaaattatataaatagaagaacatgtttcctggctccttattgcacaaaagagaacatgaacaactctttttatattaccatgatagtcctatgtgttttggcctttgtgttagttttaattgagagctgtgcgggcaaaatggtagatgagatgatattctcttgtgtctgctgtggtggtcctggctgctgtggtgatagaggagaaggacctgttggtggtggtattgacaatgaaccggtgaatgtagtagtggtggtggtggagccaggcagccagcggcggaagatgtggtgacggtcaaggatgctacttcagtttttctttttttactttattatacttagattctggtactatatatattatgggtatagataatttacactaaagttttatttccgttatttaaaattcgtgttttatttaatctctaattttctgtttccaagtcgaattcctctgtactaattatacggccttttaattttacaatatgaatagccattttctactaacacattcttaccttttagaggtgttaattttaaggtaagtttcttctctacaattacgtaatatcattcaaatctgttcatgctgacaaaagttaggtacttttgtgtatatttctcgatcattgacattgtctactacgctaatatctaaggaaagtggcatcgattctacttgcttgtaaaacatacatcgcgatgtaagtcaaattctctaataatgtaagaaacgaagtgagaaagaaagataaatccaaaaaatttacttgcaaatcaatagagatccaaaccaactgcgcatgcgttagtcaattgatatattgtatataatagaacaaatacaatttttgtttttataaatgtataaccaaaaacgtaagagcaatactatcgaaataaatacgtactgcatattacacgataataatagaaagagatttgatgtttgatcacttggaagtaaaatggagatagagaaacacaaagagcaatacgaccggaaacatcaagatcattggaagagatggtgcagtcaccggtcccatcatcaacggaacaaacagtaacattagtgcaacgacaacaatcgccaaaaccgaacccatcccgaatccatactcattcgccattttcgtctacttttcgataggagtagtgatcaattctgtgttagtgtctctaattggagaagttatatatacacagattcagacatcaaatctacggttgtgtcgtttccccgagaagtagaagacaacgtttcgtgtactaatgcatgaaacacaaaaactggcgagacctttcacgttaataaccacctcaaaacgctgcgtttcggtttatttgttgctgccacgtgttttaaaaacagcataccctaaacgcatcgtttcgtgtcgcaatcaactattcaactgttactgtatattttattaaaaacgcagcgttttagttaacaaaattcgtgtcgctatttctacactgccacgtgtttcaaaatgtcgcgttctgcatttgttgctatcacgtgtttaataaatttacctaaacgctgcgtttcgttaatcaatcgactttttgaacattcgcgatctccaaaaattttgagttttttttttggaaatcccgcccaaatattttgaaattgaaactctaataaatttgtcggcttgtggagttgcggtagtgatatcctccatttatcgttttgtgctttttcttcaaaaatcaaaagcttttatttttcccccaaacttttttttcaaaatcctaaatcattttaccctacgattttgcagatg

SEQ ID NO: 33867 - DNA, 3003 bp, Unknown; identical to SEQ ID NO: 19842
  misc_feature (1)..( 3003): 2750-1469P.txt file - cDNA_ID_3072823; gDNA_ID_1620691; Annot_ID_164805

SEQ ID NO: 33868 - DNA, 3003 bp, Unknown; identical to SEQ ID NO: 19842
  misc_feature (1)..( 3003): 2750-1469P.txt file - cDNA_ID_3072823; gDNA_ID_2926159; Annot_ID_198650

SEQ ID NO: 33869 - DNA, 3000 bp, Unknown; identical to SEQ ID NO: 4219
  misc_feature (1)..( 3000): 2750-1469P.txt file - cDNA_ID_3072839; gDNA_ID_1620691; Annot_ID_164797

SEQ ID NO: 33870 - DNA, 3000 bp, Unknown; identical to SEQ ID NO: 4219
  misc_feature (1)..( 3000): 2750-1469P.txt file - cDNA_ID_3072839; gDNA_ID_2926159; Annot_ID_198643

SEQ ID NO: 33871 - DNA, 3000 bp, Unknown; identical to SEQ ID NO: 4220
  misc_feature (1)..( 3000): 2750-1469P.txt file - cDNA_ID_3072843; gDNA_ID_1620691; Annot_ID_164796

SEQ ID NO: 33872 - DNA, 3000 bp, Unknown; identical to SEQ ID NO: 4220
  misc_feature (1)..( 3000): 2750-1469P.txt file - cDNA_ID_3072843; gDNA_ID_2926159; Annot_ID_198642

SEQ ID NO: 33873 - DNA, 3000 bp, Unknown; identical to SEQ ID NO: 4221
  misc_feature (1)..( 3000): 2750-1469P.txt file - cDNA_ID_3072847; gDNA_ID_1620691; Annot_ID_164791

SEQ ID NO: 33874 - DNA, 3003 bp, Unknown
  misc_feature (1)..( 3003): 2750-1469P.txt file - cDNA_ID_3072859; gDNA_ID_1620691; Annot_ID_48604
cacaaaccatctccaattagaaacctaaccaattctagcaactacacaatctttcaattggggtgaattcaaagatatgattcaacattacttaattagaaattttgtctcgataatacctaatttctgagaaaagggtgaaattaccttgacacctgagtctgaaaacccagattccgtcgcagtctccgcactaagtttccgtttaagaggattagacggcggcggacgcggaggcaacggattcttcattctcatcgacctatggtcaggcgtcgacgtgttccgatctagaggtggagcattttctttggcggatcttaatttgcgtggaggcttcgatttcgagatactagggtttggcgagtgtggctctccgccgtcgcgtaagatagcgtttcttggtaacgtaaagtgcttcttcatctccgccgtgaaatctacaattagaaacccaaagtagaagaaagagggaaagtaaatcgaatctgcgcttctacgagagcgtcagtgaaaccctagtgtttgggcaaagaaaagaggaagaagaacgagagaagagaagagagagagagccgttaaagagcgagaattttgaatttgtttttgtcagatcttgtgaagtgttgacgattcgcatcacatgaatttctaaattattttatttaaaaagaaatgaattttatgtgatcgtgactttatggccgtaggatgaatccaacggagggaatgagcaacaaaaaaagaaaaggcccacgtgtgtgtttaatggtgtgtgttttagtctttagacgtgtggtagtaatactgccgcacgggttttttaagatccaccgcgcgtaaaaatccaatccatccgctatggagcgggtatgggtttaaaacttttgacccgttacgaagcatggctcgcgagtaatcgtatcgtgggttgcagatttagtggttgtcattgggcagcagtagtactcatttctatcttcaactatattatatgtctttgactgtgaataaatgtagttcgaacgacaaaatcatcaaagcagtaaattagtcaatagcacagattttttttttttgggttaaaagtcaatagcacagatgcgaccacatttagtcatttacttacaatttagtcttaccaacgacatgaagagctaatatgagtgtcaaaaaatacaaaattcgatggtagcgatgagcaatctcttcaaaattgaagtaagtgattcttatgtcataaaattcattgaatactagacaattcattgaagatgatgcaatttaaaaattaaaaataaaaaaattcatacatgataaagcatgaattgaaattcttcatgcaatttaaaaaaaaaataaaaaaattcatacatgataaagcatgaattgaaactaatgtcaggtcctccggacttgggagcgtgtgctaaactgctaataatatcaagagagtaaacaaaaccacttgcaaattttataaaatctgccaaagattagcagattatgctgataacttggtacaatagtaggcaaaatcttattctactataaaatcttctcaagtcttcacaactattcaccatgtacttgaagtcgaaagaatgttctcatatatatatatatattttgttacgaatgttctcatatatagtatgccaataaaaccacaaaatttgtctgacacaagatagagtatcatgcttagtcaaaatatgtaaatattctcctaaagttcacaactacttgcacactttcattaagtatgctgctatgtttacatattatacaaataaaatcgtaaattttgttagaaacgtggcaaactagcataaataaataatctaaggcttctagtaatctttgcattacaacttgcataatttccataagatctattggatattgtaaaatctgccaataaaaccacgtatcttttaagaaaacacaggagactaaccaaaataaatccaaccgtattataattctctaaattttacacattgactcacgaacatttataaaatctgccatattcgaaaaatttgtcaacaacatccctataatgtttgagagacatgaaaaattagcaaaacatatgctaaatgtgctagtaatccctaatgtacgtttacataattttttttttgaccgattttaattagagctcaaaagaatcatccatgaaaaatgtacgtttacataacattttccatactttgtaaaatccgtcaatgttggataaacaatgttatgaaaaacattcaagtctacaaaacaaaacctaagtttctatggcttataattaatcccatagttttttaatcatgttagatttgttaaaattttgctagcgttgatgattttcttgtattctaaaattttaattttttgaaaaaaattaattcgagaaattttttcactaaaaagacaatgttttttttttttaatttaaaacttaaatctaactcttctttttgtcaaatatagattcttattattcttaccttttaaaatttatcttatttccttcttttttttaaaagagatttacaataaataagtaatattgaccaaagatatagaacacaccaaaaaagaggcaaagatatagaaaacatactatttagattttttataaattttggtagatatcttagattattctagcaaatctcctttaattgttttttttaacagcaaatctcctttaattacatcaaatccgtaaaggttgaaaaaaaaaataacaatagaattttagtaatgaattaattaccaatacttgacccaaacccgaacctaaacaccagatccatcgtcatcatccatccaatcaaattgactcatcgtgttgtgacctcccagtgattaagccgcgactcctcctaactcgtaatccctcacgtctctgagaattctcagtttcttcagtttcattgcaattcaattcccgatctgatccgttcctgcttagatcggagcaaaacaatggcggagatg

SEQ ID NO: 33875 - DNA, 3003 bp, Unknown
  misc_feature (1)..( 3003): 2750-1469P.txt file - cDNA_ID_3072859; gDNA_ID_1620691; Annot_ID_164786
tagaaagtacacaaaccatctccaattagaaacctaaccaattctagcaactacacaatctttcaattggggtgaattcaaagatatgattcaacattacttaattagaaattttgtctcgataatacctaatttctgagaaaagggtgaaattaccttgacacctgagtctgaaaacccagattccgtcgcagtctccgcactaagtttccgtttaagaggattagacggcggcggacgcggaggcaacggattcttcattctcatcgacctatggtcaggcgtcgacgtgttccgatctagaggtggagcattttctttggcggatcttaatttgcgtggaggcttcgatttcgagatactagggtttggcgagtgtggctctccgccgtcgcgtaagatagcgtttcttggtaacgtaaagtgcttcttcatctccgccgtgaaatctacaattagaaacccaaagtagaagaaagagggaaagtaaatcgaatctgcgcttctacgagagcgtcagtgaaaccctagtgtttgggcaaagaaaagaggaagaagaacgagagaagagaagagagagagagccgttaaagagcgagaattttgaatttgtttttgtcagatcttgtgaagtgttgacgattcgcatcacatgaatttctaaattattttatttaaaaagaaatgaattttatgtgatcgtgactttatggccgtaggatgaatccaacggagggaatgagcaacaaaaaaagaaaaggcccacgtgtgtgtttaatggtgtgtgttttagtctttagacgtgtggtagtaatactgccgcacgggttttttaagatccaccgcgcgtaaaaatccaatccatccgctatggagcgggtatgggtttaaaacttttgacccgttacgaagcatggctcgcgagtaatcgtatcgtgggttgcagatttagtggttgtcattgggcagcagtagtactcatttctatcttcaactatattatatgtctttgactgtgaataaatgtagttcgaacgacaaaatcatcaaagcagtaaattagtcaatagcacagattttttttttttgggttaaaagtcaatagcacagatgcgaccacatttagtcatttacttacaatttagtcttaccaacgacatgaagagctaatatgagtgtcaaaaaatacaaaattcgatggtagcgatgagcaatctcttcaaaattgaagtaagtgattcttatgtcataaaattcattgaatactagacaattcattgaagatgatgcaatttaaaaattaaaaataaaaaaattcatacatgataaagcatgaattgaaattcttcatgcaatttaaaaaaaaaataaaaaaattcatacatgataaagcatgaattgaaactaatgtcaggtcctccggacttgggagcgtgtgctaaactgctaataatatcaagagagtaaacaaaaccacttgcaaattttataaaatctgccaaagattagcagattatgctgataacttggtacaatagtaggcaaaatcttattctactataaaatcttctcaagtcttcacaactattcaccatgtacttgaagtcgaaagaatgttctcatatatatatatatattttgttacgaatgttctcatatatagtatgccaataaaaccacaaaatttgtctgacacaagatagagtatcatgcttagtcaaaatatgtaaatattctcctaaagttcacaactacttgcacactttcattaagtatgctgctatgtttacatattatacaaataaaatcgtaaattttgttagaaacgtggcaaactagcataaataaataatctaaggcttctagtaatctttgcattacaacttgcataatttccataagatctattggatattgtaaaatctgccaataaaaccacgtatcttttaagaaaacacaggagactaaccaaaataaatccaaccgtattataattctctaaattttacacattgactcacgaacatttataaaatctgccatattcgaaaaatttgtcaacaacatccctataatgtttgagagacatgaaaaattagcaaaacatatgctaaatgtgctagtaatccctaatgtacgtttacataattttttttttgaccgattttaattagagctcaaaagaatcatccatgaaaaatgtacgtttacataacattttccatactttgtaaaatccgtcaatgttggataaacaatgttatgaaaaacattcaagtctacaaaacaaaacctaagtttctatggcttataattaatcccatagttttttaatcatgttagatttgttaaaattttgctagcgttgatgattttcttgtattctaaaattttaattttttgaaaaaaattaattcgagaaattttttcactaaaaagacaatgttttttttttttaatttaaaacttaaatctaactcttctttttgtcaaatatagattcttattattcttaccttttaaaatttatcttatttccttcttttttttaaaagagatttacaataaataagtaatattgaccaaagatatagaacacaccaaaaaagaggcaaagatatagaaaacatactatttagattttttataaattttggtagatatcttagattattctagcaaatctcctttaattgttttttttaacagcaaatctcctttaattacatcaaatccgtaaaggttgaaaaaaaaaataacaatagaattttagtaatgaattaattaccaatacttgacccaaacccgaacctaaacaccagatccatcgtcatcatccatccaatcaaattgactcatcgtgttgtgacctcccagtgattaagccgcgactcctcctaactcgtaatccctcacgtctctgagaattctcagtttcttcagtttcattgcaattcaattcccgatctgatccgttcctgcttagatcggagcaaaacaatg

SEQ ID NO: 33876 - DNA, 3003 bp, Unknown; identical to SEQ ID NO: 33874
  misc_feature (1)..( 3003): 2750-1469P.txt file - cDNA_ID_3072859; gDNA_ID_2926159; Annot_ID_139640

SEQ ID NO: 33877 - DNA, 3003 bp, Unknown; identical to SEQ ID NO: 33875
  misc_feature (1)..( 3003): 2750-1469P.txt file - cDNA_ID_3072859; gDNA_ID_2926159; Annot_ID_198633

SEQ ID NO: 33878 - DNA, 3000 bp, Unknown; identical to SEQ ID NO: 4223
  misc_feature (1)..( 3000): 2750-1469P.txt file - cDNA_ID_3072863; gDNA_ID_1620691; Annot_ID_164785

SEQ ID NO: 33879 - DNA, 3003 bp, Unknown; identical to SEQ ID NO: 19856
  misc_feature (1)..( 3003): 2750-1469P.txt file - cDNA_ID_3072867; gDNA_ID_1620691; Annot_ID_164784

SEQ ID NO: 33880 - DNA, 3003 bp, Unknown; identical to SEQ ID NO: 19856
  misc_feature (1)..( 3003): 2750-1469P.txt file - cDNA_ID_3072867; gDNA_ID_2926159; Annot_ID_198631

SEQ ID NO: 33881 - DNA, 3003 bp, Unknown
  misc_feature (1)..( 3003): 2750-1469P.txt file - cDNA_ID_3072871; gDNA_ID_1620691; Annot_ID_164776
aatactttacaaaatccttaaccaggatcaggagattaggattcggtagtagtagggtacatgacctggtctggtctcttggaatacctttgcagagtagaaacttgtaggatcaacagatgattattcaagagggttcagtgagtgacttcacatgtttactaaggcttggtttttcgtttttatagtagcaagttcacttagattggtcctgtatgaacctggaatgcttttgtaaatagtaacttgctgaatattcttggaattttatgtcacataaggttggaatactgcgaccaaactggctagatggagccaagtaccttggtcaacagaacgtgagtgggtttctctgcaatgtatgggagaaggtagactttatatggtactatgaagatgttgaaaccaagagacccgtgcaatggatattctatacaggtgattgataccatcaacatgcccattgtcttcgatctgtctaatggttttttctagcaaaattcatctgacatataactgttgcagggagggaggctcatataatgacatacgaggtaggtgcggtcctagaggatgagaaatggcaagcaccggtttattgtttcaacaaagagaagaagagtttgtctacaaagggagctttgagtgaatttaaaggatacaaagaaaaggctgctttgtaatgttaattaacgagaccttcttttcttctagatgaccaatcaggaggagtacaagagtgaataaacgagaccttcttctctgtttgttctctttatttgaacaaggtaagatgcacattctttaacttcaaaaacttaaaacccactactcatcctcgtccacaaaacctttaagattcaaatccgacggtccaccttccgctgccgcatcaacagccatcgccttccacttctctgcattctctctcatctcctccgcctcttctccaccactcatcaccttctccaaacaccttctaatctcctccccatccacatctccttcctccccaaccttcaccttcactccaatcctccacgtatcctccacaagcttcgccgttgtacactgatcagcaaactgcggaaacgcaaccaccggaacaccactctctaaactctccaacgtcgaattccaaccacaatgagtcacaaaacatcccacagcacaatgcgccaaaacagctgtctgagaacaccatcccaccaccaatcctcgatcacttcctctgatcaattcaagaaaccgattcttcttcttctcttctggatttttctccctcacgatccataaaaacggtctgtttgtagctaacacgccgtgagtaagcgcttccatgtgtttctctggtaaatcatcggcgtgtgtgcctaaggaaatgtaaatcactgatctctcgagcttcgagtctaaccatttcgtgtaatcctcgtcggaagatttgaaaagatcggttttaccctcggaggaagaaaccaacggtccgattgggatcatcttgagtttctcaacagaggttaaagcatcgtgttccaaagcagagaatgtgttaacaagaatcttagggtttgattccgtttcgagagcttcgatatgttctcttagagtcacaagagctgacggtaatgccttcgaaggttgaagaaacgacgggaggtcaccggtggtgatcagtggcagtttcggtaatttaatcggttcaacgtcgaagagatgtttgtaagaggtgttgaagtagtagtagtagatgtctagtacagtagctggttcaatccagagaagtgtagttgggaggtgaaactcacgcgctaccgtagaaacccacgggacgagaacagagtagattaccccggtgataggctctgtttcggtggtggcgtcaagattggctttgatgatgtctctcagggcgtttgaaccacatcgtttgagttcggacatgtagattttctggtcttcgaatgacttgagaccgtcgtcgaatccatcggtgaaccaagcgaaggatagaccttttgtggaaggtggctcgcccatacgtcggtgagcagagactgcggtggagtatgtgacggttgcaccgtggtggatgaggcggttggctagttgaagcgccgggttgatgtgaccttgcgctgggaatgttacaagcaagtaatgtggacgacgatgggaaccattgacggaagtggccattttagaatgttttgaagatgttataagttttagtaaaagaaagaacatactcaagcttttatatataagagctaaaccattttaagtatcaatggtataaaagatggattaggaataattgacaatctttgcactgtctgtctcttacaagaccggtggatgagaaaagtcttatgtgacgaccgacgagtaacagccacgagtagaaagatgattaggaatatttcagtctgtttttgatcagttctcaacctccacaagaccgcaaccaaccaccatggtaaggaaatgattgttgtcttttcttttaaaaaatattagttattttagttttttttttttatgattgctaatttaatacagacacaaaactgagaatttgatctcttttaacagtttgttacttcacagtgaccatttgagaagttgcatccactgtccatccattctcatactgttaatcaaaaaataaaacaattatcgatgaatcaaattttgtcatgtttttgtaataaagtgctagtatgtatagtggagttcttaaagaatcttacaaaaagttattggtgggctatgctttttaggatatgacactaaagtaaagaaggctagcctaagaactcacactttcttctttactcttcttccctacaattacgatcgccaaaaaccctaaatttctaaaaactgcttttatctccaagtaagtttcaatattgatcttctgctctttttatttgttcaagctagcatgttgtttgatctttagcttttcggttggttttcaggaagttgaaaaagatg

SEQ ID NO: 33882 - DNA, 3003 bp, Unknown; identical to SEQ ID NO: 33881
  misc_feature (1)..( 3003): 2750-1469P.txt file - cDNA_ID_3072871; gDNA_ID_2926159; Annot_ID_198624

SEQ ID NO: 33883 - DNA, 3003 bp, Unknown; identical to SEQ ID NO: 19858
  misc_feature (1)..( 3003): 2750-1469P.txt file - cDNA_ID_3072875; gDNA_ID_1620691; Annot_ID_164774

SEQ ID NO: 33884 - DNA, 3003 bp, Unknown; identical to SEQ ID NO: 19858
  misc_feature (1)..( 3003): 2750-1469P.txt file - cDNA_ID_3072875; gDNA_ID_2926159; Annot_ID_198622

SEQ ID NO: 33885 - DNA, 3000 bp, Unknown; identical to SEQ ID NO: 4212
  misc_feature (1)..( 3000): 2750-1469P.txt file - cDNA_ID_3072879; gDNA_ID_1620691; Annot_ID_164772

SEQ ID NO: 33886 - DNA, 3000 bp, Unknown; identical to SEQ ID NO: 4260
  misc_feature (1)..( 3000): 2750-1469P.txt file - cDNA_ID_3072906; gDNA_ID_1620693; Annot_ID_164855

SEQ ID NO: 33887 - DNA, 3000 bp, Unknown; identical to SEQ ID NO: 4260
  misc_feature (1)..( 3000): 2750-1469P.txt file - cDNA_ID_3072906; gDNA_ID_2926187; Annot_ID_200748

SEQ ID NO: 33888 - DNA, 3000 bp, Unknown; identical to SEQ ID NO: 4258
  misc_feature (1)..( 3000): 2750-1469P.txt file - cDNA_ID_3072910; gDNA_ID_1620693; Annot_ID_164852

SEQ ID NO: 33889 - DNA, 3000 bp, Unknown; identical to SEQ ID NO: 4258
  misc_feature (1)..( 3000): 2750-1469P.txt file - cDNA_ID_3072910; gDNA_ID_2926187; Annot_ID_200745

SEQ ID NO: 33890 - DNA, 3000 bp, Unknown; identical to SEQ ID NO: 4255
  misc_feature (1)..( 3000): 2750-1469P.txt file - cDNA_ID_3072914; gDNA_ID_1620693; Annot_ID_164849

SEQ ID NO: 33891 - DNA, 3000 bp, Unknown; identical to SEQ ID NO: 4255
  misc_feature (1)..( 3000): 2750-1469P.txt file - cDNA_ID_3072914; gDNA_ID_2926187; Annot_ID_200742

SEQ ID NO: 33892 - DNA, 3003 bp, Unknown
  misc_feature (1)..( 3003): 2750-1469P.txt file - cDNA_ID_3072935; gDNA_ID_1620694; Annot_ID_164883
aaatgtcgaaagcattgaacaagaacatggaactcgaagatctgttgagaaaaatggaaatggagaatcagacgtggcagagaatggctcgtgagaacgaagcaattgtgcaaacgcttaacacaacgctcgaacaggttcgcgagagagccgccacgtgttacgacgctggtgaggcagaggtggaggacgaagggtcgttttgcggcggagaaggagacgggaatagtttgccggcgaagaagatgaagatgagtagttgttgctgcaattgtgggtctaacggagtaacgagagttctgtttctgccgtgtaggcatctctgttgctgcatggattgcgaggaagggcttcttctttgtccgatctgtaatacccccaagaaaagcagaatcgaggccctcattttctagggaaaatcctttcttttctctcaccggaaaaatgcttgcctttgtgttccggtgaacggagagtttttactccgggtagatgacgtggcagggtaatttggtaaaaataggggaggaaaggaaagtgagaatagggaaaggttagaaatagtaaaaggttatctcaagaagtaaattctgattagggttttcattttccctttttgttttttggttctttttccattcaatggagaaaaaaaaggaacccagctggatttgatgaacataattcatattttccttctatctaatgaattttcggatataaagtttgaatgccattctttctatttcaatgataattaacttcttaggatttttaaacacattagtattaaatatcttaatatacattttcctaatgattatatgtataagattttcctatattaaacacttcctaataagcaaaaaactagaaacttttgaccgaaagaataataattctaaactaatatgaaatccaatttaaacatatcttttaaaaaatttcatttataaaaaaatcaattaaatcaaatttaaacatatgtcttttaatttacatagaaagcaaaacaaaaaaagttatattcttttgaacaaaaaaaagaaagcaatgaaaaagtaaaaaaaaagaaaggaagcattatatattaatgggtttgttttgatgtaggaagatggtgaaaagaggtggtagtagaggccgtagacacgcgtattggaggaagctgtaagtattattgggttgctcaacaatcaatatagtacagtgacatgagagcacaatagtaagtaataattccacattaaaaaaatagaaattgaaagagaatcagagtttggcctgccataggatttgagttctcgcactttcctaaacagaaacatgtttcattgaacacttgggcctttcttcttccttcattaaggattctcgatctctgtttcgacagatctgtgctacctaggttttctagatactccctaatacctataaataaacaataagtataaccttattatgtaattagatcgtactactatcaataaacaagattgtagaaaatagtgaaaaaggcaacgcataaagattaattaaatcttatttaagtttcatttgggacaatttaagattattgtcttgttcataggatttatttcatctattagtattacaaacttttttacgcaaacattattatctctatgtatagaatgatttaaacttttaacgtaaacacaaataaacagtcagtcctatgtgctatggatgaggtgattagcattgtagggtgtttcgtgtcatatagctctactagtagagattttgtgtgtcagtgtgtgtttatttacggctttgagtcttcaagacccaattagccttaagaccttagtgattttagactctttgttgaaaagctagaaattgcaaacccaaaccgcctaatgttgctataggttttgatttccgaagtgggtaattaattatgtggattacgtataaacacatggcccggcccattttaccccccaagtgctcggcccaaattgaaagtgggactcactggattgccaactaattttatttaacacgacgtgaagtttggaactaatacgtcaggtattaaaagtacataaacatcatcattactcaatttgctaatggacgaatagagacggaatcaacaaagtaacaaacgacttcaatattttttttatatgttactatgattcgacaaaggattttttttttgttatgaactgaagattattggatttttaatcacaagatgtcaatatcaaaattcaataccatgtctcgattagggatatcaatatcatgatattttaacaactttaactatgtaatttaattcgattatcgtttttgttttaaccttcgtttgatttgtagatggtagaggtatttagttgttgaactcttctttatacacatgttgtttgttttgcttcttaaaaggataataatttttaaacttattacatgtgcaccactggtcgcattcgtagttttccatattttatgcgaaagaaatgaggatatcttgggaagatacaaattattgggattgttttgcaataactccaaaatgttatgtttaagagttttttgcttacgtatttcatatcaagccacgtagatgcatttgtaatctcataaaacatttcgattattattaacttactgcaccatattaaaaaacaaatttcgatatcgagattgtaaattgggcaattaggaattaggaattgaggtaggtaaagtttataagcagatgaggaaataatagcaaggaagagaaagaaagtggatgcgtcgtggattccatatttatgtgctttacttttccttttggtaggcgaaaattttgacattttccaacaaacatcctcatgtatttcacatattggcctgaccaactattatgcatattttatacatttgatggattaggctataacatggtttttggagtttacttttatacgttcgatcataggataaacatacgtcttttattaaaagctcgatctaactatg

SEQ ID NO: 33893 - DNA, 3000 bp, Unknown; identical to SEQ ID NO: 4271
  misc_feature (1)..( 3000): 2750-1469P.txt file - cDNA_ID_3072940; gDNA_ID_1620694; Annot_ID_164873

SEQ ID NO: 33894 - DNA, 3000 bp, Unknown; identical to SEQ ID NO: 4271
  misc_feature (1)..( 3000): 2750-1469P.txt file - cDNA_ID_3072940; gDNA_ID_2926208; Annot_ID_202404

SEQ ID NO: 33895 - DNA, 3000 bp, Unknown; identical to SEQ ID NO: 4300
  misc_feature (1)..( 3000): 2750-1469P.txt file - cDNA_ID_3072951; gDNA_ID_1620695; Annot_ID_164916

SEQ ID NO: 33896 - DNA, 3000 bp, Unknown; identical to SEQ ID NO: 4300
  misc_feature (1)..( 3000): 2750-1469P.txt file - cDNA_ID_3072951; gDNA_ID_2926190; Annot_ID_200988

SEQ ID NO: 33897 - DNA, 3003 bp, Unknown; identical to SEQ ID NO: 19914
  misc_feature (1)..( 3003): 2750-1469P.txt file - cDNA_ID_3072955; gDNA_ID_1620695; Annot_ID_164915

SEQ ID NO: 33898 - DNA, 3003 bp, Unknown; identical to SEQ ID NO: 19914
  misc_feature (1)..( 3003): 2750-1469P.txt file - cDNA_ID_3072955; gDNA_ID_2926190; Annot_ID_200987

SEQ ID NO: 33899 - DNA, 3000 bp, Unknown; identical to SEQ ID NO: 4289
  misc_feature (1)..( 3000): 2750-1469P.txt file - cDNA_ID_3072959; gDNA_ID_1620695; Annot_ID_164913

SEQ ID NO: 33900 - DNA, 3000 bp, Unknown; identical to SEQ ID NO: 4289
  misc_feature (1)..( 3000): 2750-1469P.txt file - cDNA_ID_3072959; gDNA_ID_2926190; Annot_ID_200985

SEQ ID NO: 33901 - DNA, 3000 bp, Unknown; identical to SEQ ID NO: 4313
  misc_feature (1)..( 3000): 2750-1469P.txt file - cDNA_ID_3072997; gDNA_ID_1620698; Annot_ID_164960

SEQ ID NO: 33902 - DNA, 3000 bp, Unknown; identical to SEQ ID NO: 4313
  misc_feature (1)..( 3000): 2750-1469P.txt file - cDNA_ID_3072997; gDNA_ID_2926180; Annot_ID_200209

SEQ ID NO: 33903 - DNA, 3000 bp, Unknown; identical to SEQ ID NO: 22313
  misc_feature (1)..( 3000): 2750-1469P.txt file - cDNA_ID_3073021; gDNA_ID_1620699; Annot_ID_165010

SEQ ID NO: 33904 - DNA, 3000 bp, Unknown; identical to SEQ ID NO: 22313
  misc_feature (1)..( 3000): 2750-1469P.txt file - cDNA_ID_3073021; gDNA_ID_2926208; Annot_ID_202419

SEQ ID NO: 33905 - DNA, 3003 bp, Unknown
  misc_feature (1)..( 3003): 2750-1469P.txt file - cDNA_ID_3073031; gDNA_ID_1620699; Annot_ID_165000
ttttttgtgaaaaaagaaaaaataaataaacccgatttattcatacatatcgttacaagatagtttgacgtttttttctctctaaagtaatatgatggtataaaattaggtttttaacagttgtactaaaaataggaaaaatccattttctgtttaatttgccacaaactcacaataggagaacatcttataatataaattacttaagccatatttgaccagaaattttcagtggtcaactaaagcgttttggagtagtatatgatttcattgaataacaatgaacttaaatctggtgcgttttaattcattccagttcaccagacattttataaaagtcaatgtttctgaaatttgccatattgattatacacactttcttgaaaaatgcaaagaagaatccagataaaataaaagttacactgtaatatcctaattttattaatataacagcaagcaatatatactttttaaaaatatacatgtctatgtttgtctaaatgtattaatttcaaaggcagtatgatgagctgtaaattaaaatagtaatacaacttttgtttttttcccagttttgtttcttgtgcacatctaaaattatgcctatggttgtggataacaacaaaaaaaaaagctttaacgtcaataatttgtaacaatggtgttatatggctgttttcgtttccttataatggcgtaaccttttgtagaacaaaataataggtaaactaagccattgtttgactaagaaaattacaattacttttcataattagaaaaagaacaaaaaaagtggtaaaaaatagaaccaaaaatcaaataattcaggcgttccagatgacccaactgaccaattcagtaaacaataaatttcaaatcagagaaaatagaagtaaataaccaaaaaataggaaaaagaaaagaaaaaatctgtgccctgccataattccacttggacttgtataatttttacacattaccgaaaaagccgaaaagaaataattaaataaaataaaaactagtactactaataaaagacaaaacggctctggcaaaatctctgaccttggaaagataaaagatagttcagtcacataatcagcatgtgtacgtcgtttctttagtgcttaatattataaattaagaatacttaaaaccaaatctttatataatattgattgtcagataaacattaacccaacaaagtctctctccctctcctattcaactttttcagttactttactccgttcatcttttatttttcttttcgtcgattctcatcaatactacaaaaatatatacttctatatatcgtgcagaggttacatgcattgtacaattttgttgtcccgagaaacaagcggatcagagacaaaatcagagtcggtttcctgctttttgattcctctttattaatcagcaaagatcgattccacttctcctctctctctctctctctgttctttaatttagagagaaaaaataagcattcttccttctctgttttcgagcgggaaattctggagatggctatacaagcgcagttgaattacaacgctccgaatgcgaatcaaatcggttttggtgggtccgagttttctttgatcaacaacaatggcgttatcggaatcggtaacgatcagtcttatcttgtcaataatctccagttgcagaaagatttcaaccaacatgctctgtttcatcatcagcatcatcaacaacaacagtctccttctcaaagctttttagctgctcagatggagaaacagaagcaagagatcgatcagttcatcaaaatacaggttcgttatttcgtaatccaaaccaatttttcatcgaaagtttcggtttttaagacgtgggtactgataaagattcaaccttttttgctttgttgataacagaacgagaggttgagatatgtgttgcaagaacagaggaagcgagaaatggagatgattttacggaaaatggagagtaaagctttgcttttgatgagtcagaaggaagaagaaatgtcgaaagcattgaacaagaacatggaactcgaagatctgttgagaaaaatggaaatggagaatcagacgtggcagagaatggctcgtgagaacgaagcaattgtgcaaacgcttaacacaacgctcgaacaggttcgcgagagagccgccacgtgttacgacgctggtgaggcagaggtggaggacgaagggtcgttttgcggcggagaaggagacgggaatagtttgccggcgaagaagatgaagatgagtagttgttgctgcaattgtgggtctaacggagtaacgagagttctgtttctgccgtgtaggcatctctgttgctgcatggattgcgaggaagggcttcttctttgtccgatctgtaatacccccaagaaaagcagaatcgaggccctcattttctagggaaaatcctttcttttctctcaccggaaaaatgcttgcctttgtgttccggtgaacggagagtttttactccgggtagatgacgtggcagggtaatttggtaaaaataggggaggaaaggaaagtgagaatagggaaaggttagaaatagtaaaaggttatctcaagaagtaaattctgattagggttttcattttccctttttgttttttggttctttttccattcaatggagaaaaaaaaggaacccagctggatttgatgaacataattcatattttccttctatctaatgaattttcggatataaagtttgaatgccattctttctatttcaatgataattaacttcttaggatttttaaacacattagtattaaatatcttaatatacattttcctaatgattatatgtataagattttcctatattaaacacttcctaataagcaaaaaactagaaacttttgaccgaaagaataataattctaaactaatatgaaatccaatttaaacatatcttttaaaaaatttcatttataaaaaaatcaattaaatcaaatttaaacatatg

SEQ ID NO: 33906 - DNA, 1095 bp, Unknown; identical to SEQ ID NO: 4327
  misc_feature (1)..( 1095): 2750-1469P.txt file - cDNA_ID_3073035; gDNA_ID_1620699; Annot_ID_164994

SEQ ID NO: 33907 - DNA, 3003 bp, Unknown; identical to SEQ ID NO: 19894
  misc_feature (1)..( 3003): 2750-1469P.txt file - cDNA_ID_3073035; gDNA_ID_1620624; Annot_ID_162459

SEQ ID NO: 33908 - DNA, 3000 bp, Unknown; identical to SEQ ID NO: 4341
  misc_feature (1)..( 3000): 2750-1469P.txt file - cDNA_ID_3073053; gDNA_ID_1620700; Annot_ID_165045

SEQ ID NO: 33909 - DNA, 3000 bp, Unknown; identical to SEQ ID NO: 4341
  misc_feature (1)..( 3000): 2750-1469P.txt file - cDNA_ID_3073053; gDNA_ID_2926192; Annot_ID_201126

SEQ ID NO: 33910 - DNA, 1207 bp, Unknown; identical to SEQ ID NO: 4344
  misc_feature (1)..( 1207): 2750-1469P.txt file - cDNA_ID_3073065; gDNA_ID_1620700; Annot_ID_165033

SEQ ID NO: 33911 - DNA, 3000 bp, Unknown; identical to SEQ ID NO: 4348
  misc_feature (1)..( 3000): 2750-1469P.txt file - cDNA_ID_3073090; gDNA_ID_1620701; Annot_ID_165074

SEQ ID NO: 33912 - DNA, 3000 bp, Unknown; identical to SEQ ID NO: 4347
  misc_feature (1)..( 3000): 2750-1469P.txt file - cDNA_ID_3073094; gDNA_ID_1620701; Annot_ID_165073

SEQ ID NO: 33913 - DNA, 2848 bp, Unknown; identical to SEQ ID NO: 19980
  misc_feature (1)..( 2848): 2750-1469P.txt file - cDNA_ID_3073094; gDNA_ID_2926176; Annot_ID_199903

SEQ ID NO: 33914 - DNA, 3003 bp, Unknown
  misc_feature (1)..( 3003): 2750-1469P.txt file - cDNA_ID_3073116; gDNA_ID_1620702; Annot_ID_165122
gaaaaactcgataactgtttttttttggtaattaaaaaactctaagaaaatctagaaacggaaaagtttgcatgaaaatttccaaagttcaaaaaggtgttgtccccttcacataaccacaccatcatcataattttgatcaaacatttgaccaagaaaaaggggtggtttcactattttagtttggtgtacttaagattttgaattatttaaagttcacgatatattggcatatacctcgaagaatggtgatcttgtactcaagtgctggaggagacctttaatttttaggagtgaaattctcttcaatttgcaattttctatttgatcacgttgaagatttcaaaaacattttttaatccaattttgtatgtttgaaattagtcaggaattcggcatatgattaactgcttatacacaagtattctgaaataaactaagatgttttggaaaaaaaaaaaaaaaaaaaaaaagtattttaaactcatattacattttttttcttcgcaaactagtattaccttcttactagaacaagtaaacaactatgggatcaatgaggtcatcgaatgccaaatatgaattctattattggccgtctacaaattaattaatggatataatgcaacccttggatactcataaacatcattatgcccaaaaagaacattagaggtagactttttcctctacacaagagaagctcagctgtctacagatcctatcttctccttctcataattttatagaaaactatagtatatagataaaaactatattgttttaggcgtcatatataagaaatatgcccacgcaagagaggataaaaaaaacaccacacaacagaatattttcccttataggtaaaggtaaaatgtcaatggaacataatattaaaatgattaaatttgatgcaaaaatattattttgtatattttcatgtagggcatatgattctatctttgtgatataaaaagatagcatcgagtacccagttttaaaattatgtcaacgtaggcatatcacaagtgaaaaacaaaacgtagacaaatcaaaatattaaaaatgtaaaggtcttatcataagtagaatgtgaatttgttaatagaaaatatgaaaaagtcgttaataacataaatgtgtataatatgtatcgtgggttcgtatattagatagaagacaagtcacctacgaacaagaaaatgtactatgtagtaatcttggaatattaatgtaatttctctctaacgctcaattaatatataacgttgtcacttgactcactttatctcttaaccattcattttctggtgttttgtgtaccgaataacatactgattaattattatgtatccgtccacttgttcgtgattttgtaaggtaaagtccaaacattttgtaaatagtctgaaaagaccaaaaaaattctaaaacataacgctaagtaattcacctaacttaaattatatgagacactaataatttcggaaactttgatgacgattttagctcaaacattatgtaactattttctaatgtttgtcccagtgattatgatgatatgaatatatgataatttttagatatttaaattatttcaatacttttgtagatagtgattgaatacattataccttacctaattagaaattaactcattcattcacctatagtttttacaaacacattactggtttacaaactcatattattatacgctgatgacatttatataaatcattaaactacaatgtatgttctaaaaatcttccaattttaaagtaaatagtataaaattaaatatatgcataaagtttaaacttagtttgtttccaaagcaaggaataatgtgcagggattcagaactttggaaattcttgtgagtttttttaaaattataagaactttggaaattaaactttagaagaaaatcttcatacaatcataaattcagctacaattgaaaagttgtagaagaacaaaaatagacaatgaaattagtgtttcttcaaataaaatggaacattttcttttgatgatattaattagcctttagaaaagttgtgatactcataaattgaattactcattttttctagagactccataaattgaatttaatctcataagaaatgtaaaatctatttttcaattgtttttatcacaaataaattattggttagaaagtgaattattgagatgaatatatatatatttgtgggaaaaaataaaatttaaaaataaaaaggagctatcatcttccatcatctgtctttagggcctccctctaagtctaacaaccctaaaataaaagattctaacaccaaaagagagaagcaaatctcaaattcttcccctattattatatgtgactgttgttgtttttctctcttttaccatctttggcctgaagaaaaaaaaaaggaatccttcttaatggatttggtaaatcaattaagaaagcattacacaaaataaaaaaggaaagttttttaataagcttcattgagagagagatatagagagagaaaagagagagaggccatattttgataagagaagaagaacccttatagagaaagagaaagagagagacagagagagtggatggatgtcttatagaatgaacaaaacatcctctgtttctcttgtccttgtccctttttccagatcttaaggttttccacattttatcatctgggtcctctccttaatggtgaattctccatctttacaagtttgatgtttttgttcatcaaatctggcgtttttttttctcttctaatatatattgtctctgctcattttccgtttctcttcccattgattgttctgtttcatttctgttttttttttttcaatagttttgattggatgctttgatgatccattgtcagatttgaagacactcaattcctatttgatcggggactagaatttggattctgtttcagacaaaagtagatttccctgtctctttcccgtttgattttcaataagatg

SEQ ID NO: 33915 - DNA, 3003 bp, Unknown; identical to SEQ ID NO: 33914
  misc_feature (1)..( 3003): 2750-1469P.txt file - cDNA_ID_3073116; gDNA_ID_2926189; Annot_ID_200895

SEQ ID NO: 33916 - DNA, 3000 bp, Unknown; identical to SEQ ID NO: 4371
  misc_feature (1)..( 3000): 2750-1469P.txt file - cDNA_ID_3073133; gDNA_ID_1620702; Annot_ID_165109

SEQ ID NO: 33917 - DNA, 3000 bp, Unknown; identical to SEQ ID NO: 4371
  misc_feature (1)..( 3000): 2750-1469P.txt file - cDNA_ID_3073133; gDNA_ID_2926189; Annot_ID_200883

SEQ ID NO: 33918 - DNA, 3000 bp, Unknown; identical to SEQ ID NO: 4395
  misc_feature (1)..( 3000): 2750-1469P.txt file - cDNA_ID_3073145; gDNA_ID_1620703; Annot_ID_165165

SEQ ID NO: 33919 - DNA, 3000 bp, Unknown; identical to SEQ ID NO: 4385
  misc_feature (1)..( 3000): 2750-1469P.txt file - cDNA_ID_3073161; gDNA_ID_1620703; Annot_ID_165158

SEQ ID NO: 33920 - DNA, 3000 bp, Unknown; identical to SEQ ID NO: 4385
  misc_feature (1)..( 3000): 2750-1469P.txt file - cDNA_ID_3073161; gDNA_ID_2926174; Annot_ID_199734

SEQ ID NO: 33921 - DNA, 3003 bp, Unknown
  misc_feature (1)..( 3003): 2750-1469P.txt file - cDNA_ID_3073168; gDNA_ID_1620703; Annot_ID_48803
accgagttcatggggtcaatgctccaaggtagcatcaaacttcagatcaagtgcttcacggcggctttgcttggctgcgccgtaatgtcggtcgtcgccgtgtgggcttaaacactctttcaacataatcaataaattatttgatttattattcaaggcgacaaatactttcgcctttgtatatttgagtttttgtttttaagtttgattcatttattagtttgtatagtgcatgtaagcgtttgaaagaaatttctttttatgacattgtaaatttatttttatgaatgcgatgtttactttcttctttggaatgacatgtatttaattattggagtttgttgattgtcaatgttagttagaaaaaattaggtccgaaatactagtgacacggaaattaaagctatatgaattaatactatcaattatatttaaaattactctcttcaagaaaatgtacatacagtctcttgttttaataaagaaaaatttcttactttggttagatttaaattacacaatatttcatgacaactatttaaccataaaaactcgataatgtactatatctaacacataatttgtaggtgtgaatggcttaagctaaaaagcttataaattctatgtatttcattccatttcatggttttttggttgaaaactttaagtacaataacagacttactaactaatttgtaaatttccacacatgttttgattccatacacctggaatcatatcaaatacttgtaaattctgaacctattgaaacaagttgaaccatttctttctaaagattaaatgcattatcttgaagtataagttcttagaacatactattaaataactttgaatagtcttcaattttactaatgccttaatcaagttttgaaattatctttttcaaatcatacacacttcatcctgacaattgtaaatgtttatagtttttagaataatttttactattttttttaatttgtgtcaatatctgatttggtttgattctagacttcgtttgttttctcaaattgtgcaagtaaaaaacacgaatatatctattttttattttatgttcagaaaaaaaaaaatatatatatatatatatattcgtgttttttacttgcgcaatttgagaaaacaaacgaagtctacaattaagcgaaatcacacattgacacaaattaaaaaatatttcttttctcgaccgaaaaaagaaaattatttcaccaatatggaaaatctccccaagttcattctattttctgtatcaaagttaacgaatagacatataagcattttgtcacgtcggtggagtatgagtttggcacgttttgtttcgtgctcgtccaaccatatgaaaacgtgggaggtaaaccactcaactaataatattatacctttaaaaaaactatattataaatccagtttgatgcttattttattaatcattcttcaaagaaataaaacttaaatagtgaaaattataaccgaagttgactagttaggaggcatgccatggaatattggatacatactcggcatggacagtattgaatatacaggataatgtagataactatattttctataatttattttgtgtcaactattttttctatgattctgatgattaattgcatgacaatcaatcaaattaattatgccttcttctatataaccatgcaaaaccaaaaaaaaaaagattatttcgaaacgacatgagaatcaaaagaactcataaatcctaatagacatgaaattatgtatacagttataacattgaaatatcttaataccttacctaaaagataactagattaataaccataaaaccaataatcattaagtcaataaccccataatcttataaatgaagtcagtgactatatgttcatgtaaaaatgcgtaagttcatagctagatgtcccttttttaggagcacatggattgacacattaaacattcatacccgatttcatggaattctatttgtcattatcctttcccaaaaacttagttgtttcttagttattaaaccttgaaaaaaaatcaattcaaaaatgaaaaatgacttatatgtatgtcatttttgaaaactagacatcaagctatgaaaagaggaatctatttaccgaataaaggaggaggaatctacattcatatgtagtgtttttggtgactggattgcaaccatacactgagcacaagctgtcacgtgtgatgttgtgctcgtagcataaactataaagtataaacctaattaagcttaaagttaaaaatagtacaagattaaaaagtaaacgtttgtgagagttgactaacagaactatagaagacgcatggggttgacttcaagcggtctgcaaacggcatgaacaatgcattcaaacgataatataaaccttaattccaatatagcctttttcaaatttaaaaactcgaatgtttacgaaactataacttgataaaactgattgaaataaaatgtacttacatttttttaataaaatatacttaaattttttaaataaaatatactttaaaatatacttaattttttaaaatcatactatggattttaaacaaaataaattgtcactgagtcatatttctttggataaaagaactttacataagtgattggtacaatataataatatgcaaatttaagacattttattaagtttatattatcgtttaaatgcattttctatcaacttaataaaatctagctaggtactttcataattctatcattattccttttgaacgattaattactttattttctcgtttcacactggaagcaaacgagtaatcaaataaaatttcgtcatcatcgacaataaatggcatgaaaacaaccagcacacattactatataaaccgattcatctagtaagtccaaagtcacacaaacattaaacaatctaaacacacaacaatccaaaagaaaaaagaaaaaaaaaaaaaatggcttcaaattcagcacttctcatg

SEQ ID NO: 33922 - DNA, 3003 bp, Unknown
  misc_feature (1)..( 3003): 2750-1469P.txt file - cDNA_ID_3073168; gDNA_ID_1620703; Annot_ID_165148
atggccctcgtcgaccttctagctaccgagttcatggggtcaatgctccaaggtagcatcaaacttcagatcaagtgcttcacggcggctttgcttggctgcgccgtaatgtcggtcgtcgccgtgtgggcttaaacactctttcaacataatcaataaattatttgatttattattcaaggcgacaaatactttcgcctttgtatatttgagtttttgtttttaagtttgattcatttattagtttgtatagtgcatgtaagcgtttgaaagaaatttctttttatgacattgtaaatttatttttatgaatgcgatgtttactttcttctttggaatgacatgtatttaattattggagtttgttgattgtcaatgttagttagaaaaaattaggtccgaaatactagtgacacggaaattaaagctatatgaattaatactatcaattatatttaaaattactctcttcaagaaaatgtacatacagtctcttgttttaataaagaaaaatttcttactttggttagatttaaattacacaatatttcatgacaactatttaaccataaaaactcgataatgtactatatctaacacataatttgtaggtgtgaatggcttaagctaaaaagcttataaattctatgtatttcattccatttcatggttttttggttgaaaactttaagtacaataacagacttactaactaatttgtaaatttccacacatgttttgattccatacacctggaatcatatcaaatacttgtaaattctgaacctattgaaacaagttgaaccatttctttctaaagattaaatgcattatcttgaagtataagttcttagaacatactattaaataactttgaatagtcttcaattttactaatgccttaatcaagttttgaaattatctttttcaaatcatacacacttcatcctgacaattgtaaatgtttatagtttttagaataatttttactattttttttaatttgtgtcaatatctgatttggtttgattctagacttcgtttgttttctcaaattgtgcaagtaaaaaacacgaatatatctattttttattttatgttcagaaaaaaaaaaatatatatatatatatatattcgtgttttttacttgcgcaatttgagaaaacaaacgaagtctacaattaagcgaaatcacacattgacacaaattaaaaaatatttcttttctcgaccgaaaaaagaaaattatttcaccaatatggaaaatctccccaagttcattctattttctgtatcaaagttaacgaatagacatataagcattttgtcacgtcggtggagtatgagtttggcacgttttgtttcgtgctcgtccaaccatatgaaaacgtgggaggtaaaccactcaactaataatattatacctttaaaaaaactatattataaatccagtttgatgcttattttattaatcattcttcaaagaaataaaacttaaatagtgaaaattataaccgaagttgactagttaggaggcatgccatggaatattggatacatactcggcatggacagtattgaatatacaggataatgtagataactatattttctataatttattttgtgtcaactattttttctatgattctgatgattaattgcatgacaatcaatcaaattaattatgccttcttctatataaccatgcaaaaccaaaaaaaaaaagattatttcgaaacgacatgagaatcaaaagaactcataaatcctaatagacatgaaattatgtatacagttataacattgaaatatcttaataccttacctaaaagataactagattaataaccataaaaccaataatcattaagtcaataaccccataatcttataaatgaagtcagtgactatatgttcatgtaaaaatgcgtaagttcatagctagatgtcccttttttaggagcacatggattgacacattaaacattcatacccgatttcatggaattctatttgtcattatcctttcccaaaaacttagttgtttcttagttattaaaccttgaaaaaaaatcaattcaaaaatgaaaaatgacttatatgtatgtcatttttgaaaactagacatcaagctatgaaaagaggaatctatttaccgaataaaggaggaggaatctacattcatatgtagtgtttttggtgactggattgcaaccatacactgagcacaagctgtcacgtgtgatgttgtgctcgtagcataaactataaagtataaacctaattaagcttaaagttaaaaatagtacaagattaaaaagtaaacgtttgtgagagttgactaacagaactatagaagacgcatggggttgacttcaagcggtctgcaaacggcatgaacaatgcattcaaacgataatataaaccttaattccaatatagcctttttcaaatttaaaaactcgaatgtttacgaaactataacttgataaaactgattgaaataaaatgtacttacatttttttaataaaatatacttaaattttttaaataaaatatactttaaaatatacttaattttttaaaatcatactatggattttaaacaaaataaattgtcactgagtcatatttctttggataaaagaactttacataagtgattggtacaatataataatatgcaaatttaagacattttattaagtttatattatcgtttaaatgcattttctatcaacttaataaaatctagctaggtactttcataattctatcattattccttttgaacgattaattactttattttctcgtttcacactggaagcaaacgagtaatcaaataaaatttcgtcatcatcgacaataaatggcatgaaaacaaccagcacacattactatataaaccgattcatctagtaagtccaaagtcacacaaacattaaacaatctaaacacacaacaatccaaaagaaaaaagaaaaaaaaaaaaaatg

SEQ ID NO: 33923 - DNA, 3003 bp, Unknown; identical to SEQ ID NO: 33921
  misc_feature (1)..( 3003): 2750-1469P.txt file - cDNA_ID_3073168; gDNA_ID_2926174; Annot_ID_140252

SEQ ID NO: 33924 - DNA, 3003 bp, Unknown; identical to SEQ ID NO: 33922
  misc_feature (1)..( 3003): 2750-1469P.txt file - cDNA_ID_3073168; gDNA_ID_2926174; Annot_ID_199727

SEQ ID NO: 33925 - DNA, 3000 bp, Unknown; identical to SEQ ID NO: 4378
  misc_feature (1)..( 3000): 2750-1469P.txt file - cDNA_ID_3073172; gDNA_ID_1620703; Annot_ID_165142

SEQ ID NO: 33926 - DNA, 3000 bp, Unknown; identical to SEQ ID NO: 4378
  misc_feature (1)..( 3000): 2750-1469P.txt file - cDNA_ID_3073172; gDNA_ID_2926174; Annot_ID_199723

SEQ ID NO: 33927 - DNA, 3003 bp, Unknown
  misc_feature (1)..( 3003): 2750-1469P.txt file - cDNA_ID_3073180; gDNA_ID_1620704; Annot_ID_165185
gatatcgctattgctctctttaaccattttggtccaaaacactttgccaacttttttaataaagactgatacaaattttagattgatacaacttaacattaaaaccacccaaataaaacttcgtaatatagataagcatcattgtaccacaaccacacaccaagccaataagtcaacaactactcctaacccttttaaacctaatcaatacaatttaatattagaccgactacgtgatggtgcatatgcttctttttaccaaaacatatatattcaagcaacaattaatacatatttcgattctcaatttaatcaactgaagaaatttcggtcacttgttttaatttttttttgtaaagcttataatttttattttgtaccaacatttaaaaatcaattattttggtgaaattaggatgatagataccgtcaacctacttttgttgaccaaacttgattctaaagaaagaaagcaaaagagagagaacaaaaacgaagacaactctcatcttcttttctctttctttttcctctttctccattgcttgttgattgatgatcttgaagcaaggatcatgaggttccttcacagatttctgttggaggatatgcccaaagaaaccttttcggactctctctgtaaaaataattgcatccaagagttgaaaactctaggatactgttcatcctattgtcttgacgagtgtccttccatctgcgagatcgtcgtaatttcaggtctttcaccacctgcagagatccacccgacgataacttaaagaggatcttgatcatctctgcttcatctatcatcacaactctgtttctccttactttacttgttctctgcttcaagttttactataggaggagaagatcaataacaacatcaagaagatggagtatggaagaagctaggaattgggattttgatggaccagcacctgttattgttgatcatccgatttggcatatcagaaccatagggttgaatccaacggttataagttccatcaaagtttgtcagtatagtaaaaaagatggtgttgtggaaggaactgattgctccgtttgtttaagcgaattcgaagaagaagagacgcttagattgttaccaaagtgtaaacatgcttttcatctttattgtattgatacttggcttagatcacacaccaattgtccgctttgtcgtgctcctatcgttgaggccaacacaatgattgatgatcatagtgaggggctagaggagataagtgtgatgattccagaagaaaatggagatgataccgatgaagaaatcgaggaagaaagagatggctttgttagtaatattagtagagatcatggtgagtcacaacaacagcgagtgagacgatcagtgtcgttggattcgttatcgggtttaagggtaagtgaagttgttgtgggtagagaaaaggagaagttgaagagaggcaataatattggatctgggaggtcaagtttattgaagagatctatctcttacagtggaaagtagtactagctagcttcagtgctaataataaaaacaagaagtccataaagtaagtaagtttcttgaagaagaaaatcaaatcaaacccaacaagatatagattgtattcatatgtatgaaggtgatataagattacgattatcaaagctagtcactcttgtaaagttaaaagagagttttgacaacttctactactctgcttagatactctggatttgtggattaagtataaatatacaccaaacttcgttttgtatgttacttatttattgttcctcaagaaataccatctggattttaattatttttagattcaactgtcttatgtgaatggatttacatttggcgttgtggatctctaacactaactatatgaaacgctgcgtttcattaaaagaaggtaaaaacgacaaagagaatcttcgtcttcatcgatcattgttgtgtaaaactcttgttcctcttcctcttcaacgtgaacacttctatttctcagagaacattcacctatatgtctttcttcaaggagaagtcttcctctttccagatttaggttagattcatgttataactttttctaagatttctgatttccgaatttgaattttgtttatgatttagtgtcggtgtagaactgaatgatactaatgcaaatgattgagatcgatttgatgtaaaattatcaccttctcgtgtaatttaaaggtcgaatcgtccggggtcacattgtcgcaggtttatgtttatcctctaaattagggtttcttttgtgaaattggggattttttttgtctgcttacaaatcatgctgttttatttctcttgaaattaacttcatgctgtttttgacatagaatacaacagacaaactagatttaacagaactgttaagatgaacggaacataagatgacttctaaaaatggataaattttaggtcaatttttctttccattttcagttttctgaccctaggtgagatttgttttggacttttcatgtattgtacatgtgagttaatcaaataaaatctaggttcatgcatttacaaacatagtttaggaagtaaaatcacatgttaagttttgatcttaaactcttgttgttattcttgttgttgtttgctacttgttagaattatgaatctttgacctatagcaaatttccataaaatcaatcatgttaacccttaatccaaatcctccatcaaagagtttttttgcattagttagcttctcatgaagcgaatttggttttgggaaaagaatttgtggggtggggtccaaaactgacacgacacaaaaactttggtttctccgtctttgttggagaaatgcattcacatccacttcttaccaaaattaaataaatcaatatttaatttttttaaggccttcttgttttttcagatgaacactcttcagatgccttgtgccttattgatccagattcgaagtacccaactttactctctagacctttttcatg

SEQ ID NO: 33928 - DNA, 3003 bp, Unknown; identical to SEQ ID NO: 33927
  misc_feature (1)..( 3003): 2750-1469P.txt file - cDNA_ID_3073180; gDNA_ID_2926204; Annot_ID_202078

SEQ ID NO: 33929 - DNA, 3000 bp, Unknown; identical to SEQ ID NO: 4409
  misc_feature (1)..( 3000): 2750-1469P.txt file - cDNA_ID_3073222; gDNA_ID_1620704; Annot_ID_165212

SEQ ID NO: 33930 - DNA, 3000 bp, Unknown
  misc_feature (1)..( 3000): 2750-1469P.txt file - cDNA_ID_3073230; gDNA_ID_1620704; Annot_ID_165206
aaaggaagattctgacagaaacaagagactagctatactctgctgcctaacaaaaaggagcatattcccttgcatgttgttcatcgttaacatattctataaagtatattgcatttatcaataatttaagttggaaatcagtagattacctctaccttttttaataattcttaattgggtgtgatctaaagagacctgatccactagaaaagatctcaaggttatatgttaaaacattttgcaacatttgtttatccatttcataaaatattagttgttttctctcttaacttttgtgtgcaacaataaataaatccaaaagttttttaaaaaataattatagtagtggctagtggtgagtaagactatactagtatatcaaatttgcatgcgtgtgcgaacgatcatagatttaagaaccagacaagcttatccaaatatcaatcgtcttagaaaagcacagaattagaaaggtcgtcaaatcgaggaccctatggaccaaccaagtaattgtcactgaaatatcaccctacatgaatggaagctcaatgtaaacatctaaaaaaggtttttgaccatgaggaaaacaagaatcttaaaggtgcccaagcactattacaagtagaaatcacaatcaaattgtatttgattactagctttctacaaaattagcaaatatatatgtcatcactgttagttttgtcaactatctatgcgatgatttagataggtcttaataaggcgctgggggccggtcgtgagccatcatcatggaaccgctgtcgtatatgaagaaggatgacacttaatcatatacaaaatagatcaacgaaaggtttctaagattttttctcatcaatgtttcaggatccaacaattagcaaggatcaatcatatgataattcaacaacagctgaccaaaggttttttttccaataggtttcattgtttttttacctcttttttttttttttgataatttacctttttaataccaatttgaatttgttttccgattattttgctataaaagaacacatttatggactcaaatatatatccaacatttatggcagacatcgtccattttcggttctttggaccattaggcgcgaataggaactcaccactaaaaaagatttggtgacgtaattacgtcaatcatcgaagtttctaacttttacaaccccaaggctcaaacatgcttcaagcaaatcttgttgcatttgttgtgatcgaagttggaaaatttgtcacacgaccttatggctatttacagttttgatggtagtcatgctacacaaatttacaagtactgctcgtttactgtactgctcacttgctcagtcactagttaacaataagccaattcatcgttatctaacgaaattcattatagtaataatattaaaatactcaaaatacgatttgtcagtctattgatgtatttgatgtagaagtaagtgtaattcactaaaaagagggaaaaaaaaacgaggagaatacgtggaaactatagccgctttttagtgtatttgacaattgtaaaaaaaaaaaagtatatatagttttaattttgttgtcgcttgtacttttcaagttgcttgtaatatggtttcatcttgagaaaaaaaaaaacagaaagagaaaatacaataaatgtattcagaaaagaagaataaccaaaaaaagcagcaaatctttgggaacgaccatgtcactgtagcatctgtttttctgcaaattattctctctataaatatatttgatcatcagaccaatctctccctcaacatttcctcatctcatctctctgatttcttgcttcgaattttgatttatctctctctgtctctctctcggtctcgtgctctatctcgtttgtaggcagtgccaatttcaccacttgtgttgtgtgtcagcggatatagaatctgagaggaatatttaaagattctccctttgcttcttcttttttataccgtttctattaatgtttgggactcttgcttccggcgaaatcgaaactgccagactgaaccgtaatttggggattacgtccaatttaggggtttcctgcggtggatttgaagactttgctatgagattcgaaggggaaaacatggtgccatacaaaggtgaagagcaggaggaggaagaagaccaagtggtggtgaacgaaacgacgccgttccagtttcaacaacctttgtttctgcagcagcagcagaagctcgttgttgggtatgctctgacttctaagaagaagaagagtttcttgcagcccaagcttgaacttcttgctaggtaaccaataacaaacccaaaatgcttctttggagttataaagttttgatttttcattgcaaagtttccaaatttgttgaacaatcttttttggttctgctttttctttcctgagagacgactgttcctttgttggcgtttaaacataaccgacaaactcttttctactttcaaaaagatctttaggactttgacattttcttccagatttggttcttgtttccttactcttgttttggtacctattattggtttgcctgattctatgaggaccattgccacttgccatgtcttgtcacctgccatgtttttgtccttaatcggctcttttgcttagggttaggcttacactagtatactctacttgtggtatcaggatgtttctatgggaatattccttgtgtaatccttttggattagtctctattgaggtttgactctggcttttaaaaaataaaatacttagatgttttgccttttctgtggcttggaaatcttcttcaaccacatgggtgtttttgttaaagcaatcactggttctacttaatatgtcatcttctagaatgtctctaataggtcagagagaacatttcttattggtttagtttgacgtctggtctctgttttgcttctttctaatcaacccatagctttcattctttttcttctttcagcagtgttttcaagaaaatg

SEQ ID NO: 33931 - DNA, 3000 bp, Unknown; identical to SEQ ID NO: 33930
  misc_feature (1)..( 3000): 2750-1469P.txt file - cDNA_ID_3073230; gDNA_ID_2926206; Annot_ID_202194

SEQ ID NO: 33932 - DNA, 3000 bp, Unknown; identical to SEQ ID NO: 4419
  misc_feature (1)..( 3000): 2750-1469P.txt file - cDNA_ID_3073234; gDNA_ID_1620704; Annot_ID_165205

SEQ ID NO: 33933 - DNA, 3000 bp, Unknown; identical to SEQ ID NO: 4419
  misc_feature (1)..( 3000): 2750-1469P.txt file - cDNA_ID_3073234; gDNA_ID_2926206; Annot_ID_202193

SEQ ID NO: 33934 - DNA, 3003 bp, Unknown
  misc_feature (1)..( 3003): 2750-1469P.txt file - cDNA_ID_3073242; gDNA_ID_1620704; Annot_ID_165192
gctgtttcagtagaatacgtctctgattctcaagattcatatgaagttgagatgaaagtagaagatgatgatgacgatgagcttatagttactggagaatcttcagggattcatggaagcagagaaatcaagtctgattcagcatcgatcgaaagagtgaacaaaagtagagattcaactgctgcctcttgttataatgactttcttcttgtgttatctgatgatgagaggagctcagacgacaaagaaaacatcttaataagttcaaatgtgatggccaagccaaaaacttgatactttaatgaagatgaatatcgccaatctaatgcgattattatttttatggttttctaatctctttgcccataatgaatatcatgtcaaattttatattcaatagtgctcgtctcttatacgaccagtatcaaagctttgtttttcaacagacaaaaaacaaaagaatctgctgttattatccaagtgggaggatgaaaaccgagagctcacacaatgctttaatacaaaaagaaactgatgtcgtcgtccattcacattcacacgtcttcgtctctactctgatgctccaggagcaattgttccaactcttccttgcgtcgggctatctcctgcaataagggtcaatgacttagaaaccatttgagtgatgataataatgatgcagatagactatcaattgacacttgcctcaagatccttgactgcttgttctcttgaaacttccttttgctgtcgagcacgcttcagaaagccgatgcagagaactccctgaagttcagacaacgatcaaagattgacagtgaaaacataaacgggaactcagatattgaaaaacaaaggaagtgattgcccaagaagctcatttttcaagttagaaatagccctacagattcgctaaccaccacatcaagcatctattgttcagagttgggagttatccaagtgatcctaaaggtctggggacaaagtgtcaacatgagttcttacaacaaaccaagaatcgttttcaagtgaaatgcattcttataagcaagatgcaaccacaaggcacaaactaatacgaaaagattcaacaataagcgagagcagagagggaataagcagatgtgatataataggatgaatggtgatagcgtacagaaatgacatagataacaccacaagcaagaagcaagtagcttgcgatgttctgtagaagcaggagatccttcttttgagtcatatagtcagggaaagctcttgtcatcacagcaacactgaaatgaacaaagtaaagatatatacataaaacataaaatcatacagcaaccaaggaatggtctcatttttgagtacctggcctggaattagctgaagcagcactcaaaaaacacatcataaaagaacaacacgatccattccaacacaagaggtacaaaagaaggttactaagctgtatagatgtacttacaaaatttgaagcattcctctaccagcccagtattcaagaacctgtaaacagatttgcaaaattagaatcaattcatgttagaaaatcaaaggaaagagatagcaaaagatacgaaaccttggaaaatttgagaatgaaaccccattcagtctcaacgagaacaacaaaacaagcaatcaccacagcataacaccggaatattccatcgaagagctgctcggagaggaaaagataaaagctttacacagagatcatcttcaagtaatctaatgcctgcgcagcgagagaggaaaaagagagagagagagagagagattatacatcgtggctgtcacggaaggagcgaacggcagcgagaacgttaacgacaacacagagaatggcgatgagagaggtaacgaggctgaagcatctacaaacaacaaggaaaggatctgctctgtttccgagcttcaatttcgcggatccggaagaaggtccggcgggggattcttcgatttcctcagtcctatccatctaaaaccaatttcccggtgagaaaatccgccgtcttaagtggaatttggaatcgagacgcgaaaaacgaaatggagaagcttgttggttaggattcagaagtggttagtgcggaaagctgaattctttctttcaccggacgttcaagccttgtcttttattcttcttctttcttctttgggaatatttaactctgcttactatttttatatatcagatcattaagtgttgtacaaaaaaacaaaaaaaacgtcattgttgatttgttgtaatgtttagaaatatgctatttttctagatatttttgcagtaatgctaacaggtatgcgatttctatcagttagtattcatgaccacatcatactgctctctctaaataattcagggctccacattacgattttttattataaaatctactagtacttataagaaagtagagttaatgaagtcgatgggaaccacttgggagagtggttacaacactccagtctagtcacatgtaacatgttcatggatacgacctagcttcctcttagtgaggttaaataatcctatagagcccattagaagtcaatgggctaacaaatatatgactggctctagctctagctctagctctagttctaaaaccaaaacccaagaccacaacaaacaatttttgccgtaacacactactaattttcactttcatctacaataatctccaaaattttgtattatgtagagatttgagtctgaatacgctaaaattttactcaaaaactggactataaattagaaattttggtctttttggattagcattccgttcgaattgatccgcataccaaaaataaaataaacgttgcggtttggttggttaataaacggacatgaccacataacacataagtcagtcacgagtcacatattccttttggtcaatcaaaagcccatatcatcatcatcgtccacacaacacaaaactatattcgatttcttccaccaccacacgctctcacatctctccggcgatg

SEQ ID NO: 33935 - DNA, 3003 bp, Unknown; identical to SEQ ID NO: 33934
  misc_feature (1)..( 3003): 2750-1469P.txt file - cDNA_ID_3073242; gDNA_ID_2926204; Annot_ID_202084

SEQ ID NO: 33936 - DNA, 3000 bp, Unknown
  misc_feature (1)..( 3000): 2750-1469P.txt file - cDNA_ID_3073246; gDNA_ID_1620704; Annot_ID_165191
tctccacagattccagattggcaggggatcgaagtgactctttaagaggttggtttccagaaagtcgatcaacaatatcgcctatcacaaatttcactgcgatttcccttcctccgttgttgtcaatgatttcatccgtcacagattccaattcaatgtcagcatttttttcatcgatttcagccttagtgtcatcttccacatctatatcttctatatcaagatcgttctcttcatcttcttcatcagctatctgctcaataacttttgagatgaaatccttatccacccttccaggcgcagttactttcataaccttaaccttgaccccgggaatcatatctcgcaggaaactctggaaaccagaagattcctcaaggagatcagaatcatcatctgagttatcactctcttcatcttcactactctcaactgcaagattaccagtatcttccttccttccaggtgaagtcaaaaacctaccaggagtcaaagttctggagggcatagttggtacgtctggaaaaatctccttccattttaagtacacagcctgaagaaacacacatcccaatttaacatcgaaatatattctccacctagatattctagacacattggtcttgagataacgtagagaaatcacactttgctatctactcaaaaaggtcagcttcctataaagaaccaaaatgaagtaaactcccaatttcatcgaataaaccggaacataattctccaatgaataccccaatcactcaaattggacactatctaagtaggattaaggaggaaaaaacctgctttttgtagttccctttcccatcaagtgtcagaaagatttcaaaaagaggagcaccagcagcagatgtactaagttgcctgaaagagagaaaggattgttatatagcacaatctttcaaaacaacaaaggacctcgagaaatttggcgttttgatacacaaaacccacactgccacagataaatcgatgagtaaagaagacagaagtaccgaggattataacttcttgccacatatcttccatgctctgcagtaatttgaacaataagaccaaacggatctttgacatcttccgaaataccagaccaccaccctacctgcaagccatatagagaaaacaatgtaacaccaataagaagctaaaccacagttataaaagaaacgagaaaaaatacaaataatgagctcaccaacccagcaccagctttgtctcgcaagtatactgcatccttgtaacgctcttctagaagagctctctatgacaaatacaaaaatggaatctttcagaatcaaaagtaagtatcccaaacagtgttgttagaaactataatcacaactcgagttattacataaaaagtggacatgactttgccaacagcatcattagtagcagtagctgcaattgccacctttagcctcgcagcatcttcatagtcttctcgtttaatggctcgattcaattgcgactgtacaccccaaaatacaaaatccccgcattagaaacatttcttcaggactcttaacaacaatgatagatacaatcatcaagaggaaacctttaagacggagagaagacggtcttggtcatcaacttgatcgaaatgcttcttccaacggtcccaatcccaatcatcatcaatcttctcgacattctccgatccttgctcaccatcatcgttatccagagtagcgtaccagctcaaaaccgaatcgaagcgtttgatggcgctcttgagaacatcctgaatcgcagagtcccatctagggttatcatcggaggaagaggaagaggaagaattgctgccggaggaggaggagcagcgacagagagcggtgggatcggggagacgatgagggtaaaaagatcttttggaggagggagtgagtctggatgacgtggcagaagcggcaggggagaaggcgagattttgggacggcggggtggataaggaaggcatcgccggagagatgtgagagcgtgtggtggtggaagaaatcgaatatagttttgtgttgtgtggacgatgatgatgatatgggcttttgattgaccaaaaggaatatgtgactcgtgactgacttatgtgttatgtggtcatgtccgtttattaaccaaccaaaccgcaacgtttattttatttttggtatgcggatcaattcgaacggaatgctaatccaaaaagaccaaaatttctaatttatagtccagtttttgagtaaaattttagcgtattcagactcaaatctctacataatacaaaattttggagattattgtagatgaaagtgaaaattagtagtgtgttacggcaaaaattgtttgttgtggtcttgggttttggttttagaactagagctagagctagagctagagccagtcatatatttgttagcccattgacttctaatgggctctataggattatttaacctcactaagaggaagctaggtcgtatccatgaacatgttacatgtgactagactggagtgttgtaaccactctcccaagtggttcccatcgacttcattaactctactttcttataagtactagtagattttataataaaaaatcgtaatgtggagccctgaattatttagagagagcagtatgatgtggtcatgaatactaactgatagaaatcgcatacctgttagcattactgcaaaaatatctagaaaaatagcatatttctaaacattacaacaaatcaacaatgacgttttttttgtttttttgtacaacacttaatgatctgatatataaaaatagtaagcagagttaaatattcccaaagaagaaagaagaagaataaaagacaaggcttgaacgtccggtgaaagaaagaattcagctttccgcactaaccacttctgaatcctaaccaacaagcttctccatttcgtttttcgcgtctcgattccaaattccacttaagacggcggattttctcaccgggaaattggttttagatg

SEQ ID NO: 33937 - DNA, 3000 bp, Unknown; identical to SEQ ID NO: 33936
  misc_feature (1)..( 3000): 2750-1469P.txt file - cDNA_ID_3073246; gDNA_ID_2926204; Annot_ID_202083

SEQ ID NO: 33938 - DNA, 3003 bp, Unknown
  misc_feature (1)..( 3003): 2750-1469P.txt file - cDNA_ID_3073248; gDNA_ID_1620704; Annot_ID_165190
ttccccattggtacacaagctgaccaactcctgcaagcttacgccatcctttagggagaaattccatcacgctactatttctgtccattagaaccaaattagtaagttgtgcaccgtgtggtgatactaacacatcggtcattctcatcagctccacttgctcacagaatgttagattatttgaataagaaactttcaattcacacccttctacatttttacactctctcttaaagatatcgatcacggctgactcattcttgaatgatcttggtccggttctcattagcaatgtcatacctattcgtgattttgatgtctcggacaagcttatgttacaatagtgtctggctttgcatctaatgagatcaagacttccattcttctctcccttgacattccaccttcattatgtctcataacaaccgccttctcaaagcaaaccggcctgttcttatcacgaaaccgtaaaaattctgtgttctgaccgtaagtcgctgtgattatctcgttcaaccaattccccatcttgaacctgagttctccccaatggtataaaacccatctttgaggattttcgcactggtgtcttaagctccaagcaacaaatgggaccatggcggacagtccatgccacatattaccgtaatcgtaatgattatacgagacaaatgtcaatccctcctggagactggcattgacaggaagagcttgaggccaagccagtgcataagtagttccatatgatccatcatgctcatcaacccctttcaagcacaaaagccttcctttcgaagattccgaaggaaattcttgatattgaacctcaccttttgtttggttatcgtagagagagctcataaaccaagtatgaccttcaagtggtttgtttgaaaaacgaaggtctttcaggggaaggaatgttaccgactcacgtagtttctccaccaagtaagccgtctcgttctcagattttatttgttcaggttcttgttgttgttcttttagatatgtgaatagtgaaggaggaagtaaaatgggttgttgggtaatgtgaaatgaccagatttgaagaagaacaaaaactgtgacgacaagacacaagacgttcaaggagaacttaggggaggctaagcaagtaactagattccttgaaacgctgcgtttagtcatgttttgaatgggaagagtgaatgaatgtgaagactgaagaaagagaatggtttttatcagatgacatgggtgaaatgaaactcgtgaggcaaaataaagctaactttatttgccaaagatgttgatgcattgcatgtttgaaaaacgaacgttatcacatctgcgccaacatttgtggcagtttttagcatcgactaacacatgcgtcttgttttattttctaaatttgttcagaaagtttttaagaaagaaatatgtatttattttgataaattgacaacccgaaattttcatataaacttaaagaatttagatagtgttttactgcaactttaactaaaaatcatgcacttataccaacttatacgtgtatatatcaaacgtcaccaatttttttatatattactatgagtaaagaaccaagtaagcactttaacaaaccacaaacaaatttaaaatacaacatattaataatcaaaaggaaattaaaggtacaaaatacaaatcatcaaacgggggtatgcgtaattaaacaaacaaaaacacaccacaatgaaacaactaattacaacaatcttataataaaatatacatcatcaatcacatgaagtgatgatagttcaaggactcgaagtagttgcagaaggcgggggagagaagaacggaatggatgggagactagtcggcagagagggaatggatgggagattagttggaagagaaggaatggatggaatattagtcggaagagaaggaattgttgttggaaatgaaggcaaagttggcattggaggcattgccgtgggaatggtgggaagatttggttgtggcaaagctgatggcattggaaatggagacattgcagtgggcattgtggggagagttggtaaagacggttgtggcaacgtcgatggcaatggaggtagtcccattgttggaataggcagatttgggatttgaggaagaggttgttgttggagaaggcggcgtgaggctgagcaagtgttgatcatcatagaggaagagaggcacactagaaaagcaatgcggaagagcttgtatgatgccattttgctttggttgtgaatctctaattatggttaagcctttctaattgcttctcttgtattgcttgctttgtgttgatgagaaattcaaagatatgcgattgagtttatatagcggcaagagtctctatggataacaaagaccttttattcaaatatcatatatggtttggttaggtgtactttatggttggcttgagctattgttagttcaacttaatgtgtgtttaatagattattttgacaattcaaggatttttattgaagttagttcaacaatcaaaactatctaactctaatacacatgttaagtctataaccaaacttttaaatgtcattttaagcttataaataccaattaccaccgtaagtatattataaaatctgatgtaacaacataaattttgtgtaaagctatgaaatatgaaataatctccaaaacaccaaataaaacaaacaaaaattatgatcattattttgtcacagctgtaccaaaaactccaaaatggaatttcccggtcaaaccggatacatggtttgccaaataaaaaaccggaaagacgaacaactaatggtttgacggatatgaccggtcgaaccggatagacaagcaattgaattttgaaaatctgtggtcattcccgaaaagtcaacctaactagacagaatcgaaattcaaaattccgtctctttggtacagaatacgctttggaccttctcgagcccgtcggaactgtaactcagtattattctggcgccgatg

SEQ ID NO: 33939 - DNA, 3003 bp, Unknown; identical to SEQ ID NO: 33938
  misc_feature (1)..( 3003): 2750-1469P.txt file - cDNA_ID_3073248; gDNA_ID_2926204; Annot_ID_202082

SEQ ID NO: 33940 - DNA, 3000 bp, Unknown; identical to SEQ ID NO: 4429
  misc_feature (1)..( 3000): 2750-1469P.txt file - cDNA_ID_3073269; gDNA_ID_1620705; Annot_ID_165267

SEQ ID NO: 33941 - DNA, 3000 bp, Unknown; identical to SEQ ID NO: 4429
  misc_feature (1)..( 3000): 2750-1469P.txt file - cDNA_ID_3073269; gDNA_ID_2926196; Annot_ID_201470

SEQ ID NO: 33942 - DNA, 3003 bp, Unknown; identical to SEQ ID NO: 20048
  misc_feature (1)..( 3003): 2750-1469P.txt file - cDNA_ID_3073293; gDNA_ID_1620706; Annot_ID_165315

SEQ ID NO: 33943 - DNA, 3003 bp, Unknown
  misc_feature (1)..( 3003): 2750-1469P.txt file - cDNA_ID_3073301; gDNA_ID_1620706; Annot_ID_165313
ttagagacagtgtgaagatcttcaggtaaaggagcgtaacggaagatttgagccttcttgtgtttagcattctcagggaatggaaatgagaaataggtagcaactccagagaagatagcgagtgctgcgtatccggcgtatttacggaattgagcttctgaggcggtggccggaggcggaggtggaggacgtggcggtggcggcggtggtggtgtcaatgtttgaccggtggtgcagagagtacgatgaggcgaaaatgaggaacggatggtggatgaagacggagatagggttccgagagaatggccgacggagcgtcggagaagaagtgaccggagcattttttttgtttaacttcaggcgatctgaacctgagggaaatgttcttgtacaggatcgggtttagtgatttaagaaagtttccattataccctgattttatttctgttttcataatttgagccgagtaatttgttaatgaacaaattggtaactagtttgtccacattcaaaaaccaaacaaaaccagaaattttattgtagacttgtagttttgggccttttggttttctgtcccgcatgagaatcgggtcgaacggttatgctcgagtgactagacaaagtagttcactagtgagccatgcattatttatttattttttttcactaagtgttgtcttcatttcattaagttcacggttacaaaaagtgttataatggctctgccatttacagctttgaagacatacacataaacaggtaaacaagcaaccatggcatcagaaaccaacaaggttagccatgttgcataccagaaagttacaagtaaacgttaaaacataacaactgcagctatagagtatgtcttgacccaaaaagtgttatgaaggccatactactgaggcagattattccaaagcatggatctgcatctgttgaaatcaatgcagtcctaaataaaaaaaatgacagaattcatagagtgtttatcttttctttggagggttcagaatccctcccttcatgtgcgctttgtcttgttcatcatgagttcctttctcttcttgcctcttccttgtttcccttgtttccacccctcttgaagattgaccaacttcaaaaacccgacgagaacccgttgagagtgctgttccaactgaaggcgtgatattagaatcagttgagacctgttgaccttgacagagcccttgatagtaagtccctcgaccctgatgattaaggccttctcttggagcaggaaaattcggatgggctgcaagaaactctccatgattcagtggaggggtaacaattcttggtggagggagcacaggtgctggaaatgaagactccgtcatttgagactgagaattcatagacgatctaagcctttcatcatggaagacagctctttcccttccataattaggtagccttggtctataagggcaatagttcctgtgatgtgtaactctgaagcagctactacaaatcctcctcaatctctcatattggaacctgatgagagcagtttccccagaatcaaaagtgattctttggaagaaacgaagcctatcagtgattccaattctaactctgactctaatataagcaatttgagtcatcgttgcatcatggaagtccagcgtgatgatctcaccaatctcatgagcaatctccaaagctgtctcctcacaaacatagagaagaggaatgcctcgcatctgcacccaaagatctatggtagtcacaaaatttaagacaggagcaggctcccatctatgatttgcaacaaaccaattattgaaaagccacagttcccttctttgcactgaaagtaaatcaacttcattctgaaacaagaactgaacataagtagcatccagcattctaccactgaaagccatgcattatttaatctacttattcgagaaaatttatctcaatttggaaatatacgatgcatttgaatagcaatccattaatataggattagatacacccattaaacacgtgttaaattgataagcaataaataaattttaaaaaatgaaaatgatacagaatcaaccatcttagttttaaaatgatattttttttaattgataaccaaattgataaaaaaaatctcaatctaatgtaattttaaaatgatatttttttggttcatattaactaatcattaatatatatattcaatcttcaacataaagaatgaaaacaaaatattattagaaatatatttaaaaattgaatttcacaaaatgaggttatatgataagacgagtttggatcgatattaagacggtacactataccacaagtaaagtcttagaattattaattaaaatataattaaataatctttaacactaaacaaaacaaacaatcttaataaaacatatgtaacttaaaatttaaactttttagttataaaaattgatctagggtgtactgaagggtaaaatctaagggttgtacataaaataatatagaaatagagttatatatttataaaatacaaaaaatagattatatataactaatctatcaaaaaattacattttcagttttttttttaataaatagtcccgcattgtaccgcatgttaaaatctagttttaatagatagaaattagtaattgttccaaaaaacaaaacataaaatgtaattatataaaaatggtctacatcaacttggtaacataaggtagatttgaatcactctattttggatagtcactatactattcaaatgttgatttggtaaaccgaaattgtaattagcttcgtttttcagataacaataaccgcaacaagtagataacacatggtttaagcgtctcgattgtaagatatacatttcagtagcttgtcaattgtcataaatgactacaatatcagcaggtgaaaactatattgatccatacagaactaactaaacactaaatgcattaatatttcataccaaagagcaagtttagttagtgcacaattcaaatg

SEQ ID NO: 33944 - DNA, 3003 bp, Unknown; identical to SEQ ID NO: 27850
  misc_feature (1)..( 3003): 2750-1469P.txt file - cDNA_ID_3073315; gDNA_ID_1620706; Annot_ID_165288

SEQ ID NO: 33945 - DNA, 3003 bp, Unknown; identical to SEQ ID NO: 20067
  misc_feature (1)..( 3003): 2750-1469P.txt file - cDNA_ID_3073332; gDNA_ID_1620707; Annot_ID_165349

SEQ ID NO: 33946 - DNA, 3003 bp, Unknown; identical to SEQ ID NO: 20067
  misc_feature (1)..( 3003): 2750-1469P.txt file - cDNA_ID_3073332; gDNA_ID_2926173; Annot_ID_199652

SEQ ID NO: 33947 - DNA, 3003 bp, Unknown; identical to SEQ ID NO: 20074
  misc_feature (1)..( 3003): 2750-1469P.txt file - cDNA_ID_3073341; gDNA_ID_1620707; Annot_ID_165342

SEQ ID NO: 33948 - DNA, 3003 bp, Unknown; identical to SEQ ID NO: 20074
  misc_feature (1)..( 3003): 2750-1469P.txt file - cDNA_ID_3073341; gDNA_ID_2926173; Annot_ID_199648

SEQ ID NO: 33949 - DNA, 3000 bp, Unknown; identical to SEQ ID NO: 4464
  misc_feature (1)..( 3000): 2750-1469P.txt file - cDNA_ID_3073345; gDNA_ID_1620707; Annot_ID_165340

SEQ ID NO: 33950 - DNA, 3000 bp, Unknown; identical to SEQ ID NO: 4464
  misc_feature (1)..( 3000): 2750-1469P.txt file - cDNA_ID_3073345; gDNA_ID_2926173; Annot_ID_199646

SEQ ID NO: 33951 - DNA, 3000 bp, Unknown
  misc_feature (1)..( 3000): 2750-1469P.txt file - cDNA_ID_3073353; gDNA_ID_1620707; Annot_ID_165333
taaatgttgatgtaataatatgatattgaaatgtatgaacacaatttttttttgttggaattcattgccttgcttgcaattatgattgacatcaaacctcaaggaaaaaaagcaggtgtaattcagccgaacacacaagaatttttttttattgctacattttcaacttttcatactttatatggtttttgagtattctttaattaagaaaagagagtgatgagattggtgtaaaagacctaaatgacacatgggaagatgatgcaccattaacagattccacatgggagaaggtgagtttccattttccaacttattagacttattcaaaagtatttggctcttaagtcacacaacactacaaattacgttatgacttctcacacttctgatcctatatacttcagttttagtagtaattggtttcttactttgactagacaaaaactttccaattccacgttgagatacaaacaaaaaaacatacacaagtgaccggttttatataagtgctaattatattccttccaataatataatttctttagctaagagaccgatactacactatgtacgacgatgaatttaaatagctagataacagtacagtatggaatatgcaaaatacagtagtatactgttggaagaggaattaaatttaaacgcgtctcaattagtcaacacttaataataattcagtcttgtcgtggaattcacaagtgacaaacccaccgactaaaactcggctaacttcaactaattaattaaatttggaatcttttaatattttcgtgttattttcatatattgtggttaatcagatagttaacatagtcatttttttttgttataacgttgttccgattttcatccaatcctacttttttttattggttgtgtaaccaaaggaagtggaaattaaacataaagagctaatttgatgaatgagaatattttagttaagattatacactaaatcgtatttttgctatttaaagtagtcaataataactgaaaacaaagtgaaaaaaactcgagccttgaaatcttaatttatgtgatttgtttttttaaactattgtggaatgtaaaaaaaaaaaaaaaagtaatttatatcatcactccaagaatatagggaaatatgggtatttgcatgggaggattgatataaggatagtcgtgacgccgacggtgaatcgttttgtcggtggtgggttccattttcatctctttttttttttacttatttataaattttaaaaaatctaaattagaactctaaaaaacgattggtgactttagtaaaaggaaaaacaacttgctactttttggcaacaaacctaaaattccgggaactacaatctataataatcttttacgattttctagagtggaggatctatcaatttatagaattttcgaattttcacagatttgttttctataacaattttttaaaattctcataattgttatattagtactagatattttagtgatgatacctactgaaaaataaatatcttgcaatagaaaacgatttttccatcatcattattaacaaagaaacaacatgtgactattattttgttctttgtttcatcaacattcaataacaaataaaattcatgaaaaataataattaaataaaaccaaaacaatagtgtaattatgtgaaaataatagttagattttaaaagaaatgaaaaagatagaaaacgaaaggagagacagagagtgaacggaaagaaaaaaagatggacgataaaataaataaatatttttttttttttgcacacccaaaaattgcagaaggaagctatatatgttaacgttagcttctctgcaaatctccttatctcactctctcgcgtccatttttttttctcaattcgtcttcaaaaattcgttagatagagaagaatctaaaagtctctctcggtcatcggaatatcttcttctcaggaattcgacgagactattcgaaatcggaaatcgcgctttgaatctgaaactcagaatttagaggacgcttactccaaagaatctagggtaaattctacgttcctttcgtctctataatcaaattatatatgcacagatcgagtttactgttttgttttccttcatgaagctcgacgaattttggtaaaaaccagatctggatttcgtaattttgctttctctgtttcgtattcttcatttgtcactgattcaaatagcatttgcttccgtataaacaaattctatcttaatctcctgtaagcaaatctgtggaataatctggataatctccagtatatagttttcgaatttggattcatttcgattttttcgctttgtgtatgtgcacaattccagattcattgtttttgattacattttgttgtttgtttggtgaaatttaagattaaagacgattccgtctctggcaagtaatgattaatgctaattctcttcatcttacactttttttttgaagtcctttatgctttttagctgtctctctgcaagctttttttttgggtacagatttgttttcagactttaaatgcgaaagtgaataagactttaaatagagattcattcatgtgtatgcatttattgttatttcatcgattcattgtttattgttctcgagttttgatggacaaatgtgagagcatgttatagcggtcgaatctgggtcccaaaacgccatgtgagattacattaaagcaacaatctattattgtcggcaatgttgtttgttccttttagatctcgattctatacatcctttgtttcctcaactttcgaaatactcatttgtcaaatagtaacacttggcccatcatttgtttattcaatgaattaaccaaataaagttctattttctaactttttcattaatggcagaagcttgtttgctgctcttgtctactgacttatttattcaatctcatgttgctaattttgtaggtgttaactttctaagaaaaggagtttgttaaaacaatg

SEQ ID NO: 33952 - DNA, 3000 bp, Unknown; identical to SEQ ID NO: 4465
  misc_feature (1)..( 3000): 2750-1469P.txt file - cDNA_ID_3073357; gDNA_ID_1620707; Annot_ID_165331

SEQ ID NO: 33953 - DNA, 3000 bp, Unknown; identical to SEQ ID NO: 4481
  misc_feature (1)..( 3000): 2750-1469P.txt file - cDNA_ID_3073372; gDNA_ID_1620708; Annot_ID_165386

SEQ ID NO: 33954 - DNA, 3003 bp, Unknown; identical to SEQ ID NO: 20130
  misc_feature (1)..( 3003): 2750-1469P.txt file - cDNA_ID_3073414; gDNA_ID_1620711; Annot_ID_165437

SEQ ID NO: 33955 - DNA, 3003 bp, Unknown; identical to SEQ ID NO: 20130
  misc_feature (1)..( 3003): 2750-1469P.txt file - cDNA_ID_3073414; gDNA_ID_2926156; Annot_ID_198408

SEQ ID NO: 33956 - DNA, 3003 bp, Unknown; identical to SEQ ID NO: 20132
  misc_feature (1)..( 3003): 2750-1469P.txt file - cDNA_ID_3073424; gDNA_ID_1620711; Annot_ID_165432

SEQ ID NO: 33957 - DNA, 3000 bp, Unknown; identical to SEQ ID NO: 20134
  misc_feature (1)..( 3000): 2750-1469P.txt file - cDNA_ID_3073428; gDNA_ID_1620711; Annot_ID_165426

SEQ ID NO: 33958 - DNA, 3000 bp, Unknown; identical to SEQ ID NO: 20134
  misc_feature (1)..( 3000): 2750-1469P.txt file - cDNA_ID_3073428; gDNA_ID_2926155; Annot_ID_198374

SEQ ID NO: 33959 - DNA, 3000 bp, Unknown; identical to SEQ ID NO: 4505
  misc_feature (1)..( 3000): 2750-1469P.txt file - cDNA_ID_3073432; gDNA_ID_1620711; Annot_ID_165424

SEQ ID NO: 33960 - DNA, 3000 bp, Unknown; identical to SEQ ID NO: 4491
  misc_feature (1)..( 3000): 2750-1469P.txt file - cDNA_ID_3073448; gDNA_ID_1620711; Annot_ID_48990

SEQ ID NO: 33961 - DNA, 3000 bp, Unknown; identical to SEQ ID NO: 4504
  misc_feature (1)..( 3000): 2750-1469P.txt file - cDNA_ID_3073448; gDNA_ID_1620711; Annot_ID_165408

SEQ ID NO: 33962 - DNA, 3003 bp, Unknown; identical to SEQ ID NO: 20146
  misc_feature (1)..( 3003): 2750-1469P.txt file - cDNA_ID_3073478; gDNA_ID_1620712; Annot_ID_165493

SEQ ID NO: 33963 - DNA, 3003 bp, Unknown; identical to SEQ ID NO: 20148
  misc_feature (1)..( 3003): 2750-1469P.txt file - cDNA_ID_3073482; gDNA_ID_1620712; Annot_ID_165491

SEQ ID NO: 33964 - DNA, 3003 bp, Unknown; identical to SEQ ID NO: 20148
  misc_feature (1)..( 3003): 2750-1469P.txt file - cDNA_ID_3073482; gDNA_ID_2926185; Annot_ID_200560

SEQ ID NO: 33965 - DNA, 3003 bp, Unknown; identical to SEQ ID NO: 22710
  misc_feature (1)..( 3003): 2750-1469P.txt file - cDNA_ID_3073486; gDNA_ID_1620712; Annot_ID_165489

SEQ ID NO: 33966 - DNA, 3003 bp, Unknown; identical to SEQ ID NO: 22710
  misc_feature (1)..( 3003): 2750-1469P.txt file - cDNA_ID_3073486; gDNA_ID_2926185; Annot_ID_200558

SEQ ID NO: 33967 - DNA, 3003 bp, Unknown
  misc_feature (1)..( 3003): 2750-1469P.txt file - cDNA_ID_3073490; gDNA_ID_1620712; Annot_ID_165487
ttcttcgcttacattacttatataaaaccctctctcgcatccttcctcagttaatcatcactgctctcttctccatctcgctttcactcgctctctctcttgccctagcttcccttttctcctgaatcggcctcacatcacggctttttccgactgttttccgtcgaatttcaatgggatctcgtgacggcgatccgccattttcgaaattcttgagctgactcgtctccaatagttcatcggttagtctgattccgtgtatatctattcttaacctgcaatttgatttgattgtacacattttttgttgagtcgtttttgtgatatttgtttttatccgtgagattagtttcgtagttatggcgtttatcatcgatagatcagctgcatgagctttaagattatataatttctgagctgcggatctaattttagtaatgtatggaatgattttgagtactaatgtatcataatttggttttgcatgtccagatttgtgagagcttttaaaatctttaagtggacctgtctcatgtattgaggtttgttttctcatctatattatttgtgtttgatgcatttacatatatgtatatatcttatgatctgttttattctacaagtattgtgagtgtcatttgttgattgttacttagttagtctatatattccttttacttagttagttatgagcataagataaaaacaaataatagactcgactcaattgatctgaagaaacacagaaaacaaatctatacccagatatttagttactgtggttattgatatctgcaccttctttagttagctactgtgaataagagactcgactcagttgatctgaagaaacatagtttgttactgtggttttttatatctgcaccttctttagttgtaattcctgagaagattttgaaagcatcattagattcttacttgagcccactttaaggtaaaaaggagctcgtggaaagtctatacccaaattatatgaaattaagcaaaatatgcttgttcgttcttcttcttcggcaaactaacactaattcacccactaaagagttttcgagtttgtctgagtatggtctttttttgtttaacatggtctgttaagtaaaaccctcaatatggaaccttctgagaattcaagcgtgatcatgatatccttgtcactcaactttgattcttggtcaaataagacttttcaaaaaactatatgataggctccttttagagaccatttattggatagcttcatctgtgtttgcagtctctaaatgtacaaaaatgcatttgcacaatgtcttcaaagaagagaaagtgaagaaaacttgctttactatgaggagattaagaaaaattttattgattgaatgcaagacaattttgtctcaaatcattaaaataaaaaatactactttgctgttgcataaactagcaatgcataaatatcaggtttatatctgcatatctttgtaattgtatgctgttcgttgtttttataatatgaattttaaatctgaaaattcatcttcccttgttaatgcagtggaaaactgctacagttgactgagataaggttctgacagtccagctgagatgctgagtatcaccatttgtacttgagttgtctctcatgtctagaccatttgtgagaagggagtttttgtttacaccaataccccccagtctctaaatttgtaagaagtattatgctcaattaaggaacatagctagttcgacataccatactaccctttttaaaactatcctatatgtttgatgctagcatagcgtaattttgtgttctcatggtgcagcagggttagtttattgtgtacctctagatatatattctcttgctgcgtagggttcccaagctgccaaaaacttttaaaaattagtgatctgttccccaaacccccattcaataagaaaggtctacctgtagctcacagtcacagctattagagctgtccttgcttctttgggtttactgttttagttaattagttaccctatgaaagtctgatccttcagaagttaggtatagaagtaagtcgattaagttcattcatgacttttccagatgttgcatacataactttttttatttgtattcgaactagtccaagccgattctcaaaatcatataaaatcatttacaccttggtcatggtagctaagaatattgtatctaaaattggggagtggggagatgtttggttatattcccttctcatcgatggtctagatgtgcgaggtgactctcatggaggtaaagaacaatggtgattttgtgaagaacccaacgtaatggtaattcctaaaaaggttagaagttttttcagcttgttgtattgctaaaatggggttgatgtactcaacgacatccaagtgtacttgagtgagcttttttggggttgagtacctcgacccattattcaaactaatgtaaatggtgaatgcagcagtgactttgttgccttttgcaagaactaaagaagacagaaacaggttgtaaaagagagccaagtgtgtgtttatggtagaaagagcaaagtgaacgaaaggtgtacctttttgacttgttgtcactggttttctcccacttcatccgtttcatgctgcatcagaaaacaacataaggaatgaatgacgtaacgcgaagcattaggagttgcttgtaaattaatacattgccattactaacgtaattcagtagattctaactacaaatgaagtcaatgtatctatttgtctactttagccaatgtatgataagaccaaatagtcttctcttttttcagaaactctctaggattaaaaagtttgtgggtgaaagaaatattatcgtgtggatgataagaataattgatcttgtgttagtaaattaggaatagatatacaagtaggtttctctctaaataaaaaataaaagagtttaaattgcatgcgtataaaagaaaaaagtaagaagaaaatatgttccggttaatg

SEQ ID NO: 33968 - DNA, 3003 bp, Unknown; identical to SEQ ID NO: 33967
  misc_feature (1)..( 3003): 2750-1469P.txt file - cDNA_ID_3073490; gDNA_ID_2926185; Annot_ID_200556

SEQ ID NO: 33969 - DNA, 3003 bp, Unknown; identical to SEQ ID NO: 20150
  misc_feature (1)..( 3003): 2750-1469P.txt file - cDNA_ID_3073497; gDNA_ID_1620712; Annot_ID_165483

SEQ ID NO: 33970 - DNA, 3003 bp, Unknown; identical to SEQ ID NO: 20150
  misc_feature (1)..( 3003): 2750-1469P.txt file - cDNA_ID_3073497; gDNA_ID_2926185; Annot_ID_200553

SEQ ID NO: 33971 - DNA, 3000 bp, Unknown; identical to SEQ ID NO: 4519
  misc_feature (1)..( 3000): 2750-1469P.txt file - cDNA_ID_3073501; gDNA_ID_1620712; Annot_ID_165477

SEQ ID NO: 33972 - DNA, 3000 bp, Unknown; identical to SEQ ID NO: 4519
  misc_feature (1)..( 3000): 2750-1469P.txt file - cDNA_ID_3073501; gDNA_ID_2926185; Annot_ID_200547

SEQ ID NO: 33973 - DNA, 3000 bp, Unknown; identical to SEQ ID NO: 4514
  misc_feature (1)..( 3000): 2750-1469P.txt file - cDNA_ID_3073522; gDNA_ID_1620712; Annot_ID_165459

SEQ ID NO: 33974 - DNA, 3000 bp, Unknown; identical to SEQ ID NO: 4514
  misc_feature (1)..( 3000): 2750-1469P.txt file - cDNA_ID_3073522; gDNA_ID_2926185; Annot_ID_200531

SEQ ID NO: 33975 - DNA, 3000 bp, Unknown
  misc_feature (1)..( 3000): 2750-1469P.txt file - cDNA_ID_3073533; gDNA_ID_1621138; Annot_ID_56587
gaaaatcgacgtttttgaaaaaactcaaattatcgtcgttttgttctcagatttcttctgctctcttcttcttctccttcttcttcgttccaccgcctctgttgctttatcttcttcttccttccttcgattgttgattacgtcggtggatctttgttctcctctgtgttgttttcattgctagatttcgtcaatgattggcttctcacgattcgatttttccggctcctgttcttaatttcctctgaggtagattagtaaaactctttgtctcgtaaacattgttcgatgatgaaattagaaagttctcactcttgtttgccaaatttgggatatttctggaattgaaaatgaatcgtcatttttttcaatttctgaggattttgttacaattgttttttatttatgttagaattgagattgtgtgatgaatatcagtaaccctagacaattgtgaaatcaaagctatgaaaatcttttgatgctatgtttcctatgatacagagaatgatggatgagggatcagtaggggatgtgagtaggattgatgaagctgatgttgctcaccttcaattcaagaatagtgagcagtcgtttaaaccggagaacattgaagtccgggaagtaaaagaagtgcaggttcagagagaagctggttctcctgattgttcttatggtgtaatagcagattttttagatggtaagaatggtggtgaccatgtggagcttatagggaatgaaccatgttctagccggcagaatacaaatgatgagggggatgttgtcgaggagttgactgttaaaacttgtgagggatcgagtatggctatagttggtagaccaagtagtagagctagattagagatgaatcgcagtcagtttctgcatcgttttccgctagacggtgatttaccgggtagtagttctatgagtaagaaggtaattgacaggggaacagtaagtatcttgagaaatgctgggaaaatgtctttgcctgagacttcaaatggacaactggctattattgctgttaatggagaagctaatgaacatttgacaaatgttgaacgaaatcctgtacctgtagaggcattgtctcatgaaggcatcaagacaaagatgttatcgcagtctgggttttctcagttttttgttagaaaaacattgaaagggaagggagttactttcagaggcccgccaaacaatagatctaaagcgaggaatatggatcagcaaactgtagctagttctggtagcgctttagtaatagctaatacttcagcaaagatttctagcagcatccctttggcggcttatgatggtttgccgtgcttaccttccaataccagtaaaccatcttcttgtgctaatccttcagatacacatagaggttgtggaggtgaaggtttaagtctgagagaatggttgaagtcggagcggcaggaagttaataaagcagaatgtatgtatatctttaggcagatcgtggatcatgtggactgttctcattctcaaggagttgttttatgtgacctgcgaccatcttcattcaaaattttcaaggaaaatgcagtaaagtatgtggtttcaggttctcaacgagagtcttttgacagcaacatgaacaaagagactttaagtcaactcgaaaaccctctggttagaagacggttaggagatacttctagtctctctatccctgcaaagaagcagaaatcaagtggaccaagctctagacagtggcctatgtttcaacgagctggtggcgtcaatatccaaactgaaaataatgatggcgcgatacaggagtttcatttcagatctagtcaacctcattgtagtacagttgcctgcccttttacttcagtgagtgagcagttggaagagaaatggtatgcgagccctgaggagctcaggggtgacatgcgttcagcctcttcaaacatctatagtttgggtattcttctttatgaggtatgccatcttaattgtagcttttgacctgcaattgtaagtatgtacatccatgagttgaaatgtgaatctgcaagcccttaatgttgacacacatatatatgttttcccgtgggattatgtctttaactgggacatatcgtgtgtgggtcatgtttgggtccagatagatttagatagtgtagcatgtttgttaatgagatggtaacagtgaagtttctcgttgaaagtacagttggctgcatggctcataggtttatgtatatattgattcgactgtttcttggtcaaaacataacattttcattgatatactaatttgtttttttccgtcagttgctgagccaatttcagtgtgaaagagctcgtgaggctgcaatgtctgatatccgacaccgcattcttcctcccaaatttctgtcggagaatccaaaggaagctgggttttgtctttggttacttcatccagaatcttcatgccgaccatcaaccaggcaatgcaaaatctttagctactataattctcaaatgatataaagcgtgttattgaacttttgtatgcttgtttctgttgatagtttaaggccatgaatccctagtgggtctattggaagataatcttgttgtatatctagaaatgtacatatgcaccaaatgtggaagttttgttctcctggctgtaaacgggaggacgattgtctcgtcaacagtttcacataggattgttaggttctactctgaaaaataattagtctttgtactaactgagctccctttatgtgttgatagtctccttcctgtcataatttatctgtcaagaatgtgagttggcttaatctctaaataagtttgatgttgttctgtattagggacatcttacaatctgaagtagttaatggaatcccggatttgtatgctgaaggcttatctttatccattgaacaagaggacacagagtctgaactcttgcagcatttccttttcttgtcccaagagaaaaggcagaagcatgctggaaatttgatg

SEQ ID NO: 33976 - DNA, 3003 bp, Unknown; identical to SEQ ID NO: 20174
  misc_feature (1)..( 3003): 2750-1469P.txt file - cDNA_ID_3073533; gDNA_ID_1620713; Annot_ID_165529

SEQ ID NO: 33977 - DNA, 3003 bp, Unknown; identical to SEQ ID NO: 20174
  misc_feature (1)..( 3003): 2750-1469P.txt file - cDNA_ID_3073533; gDNA_ID_2926152; Annot_ID_198132

SEQ ID NO: 33978 - DNA, 3003 bp, Unknown
  misc_feature (1)..( 3003): 2750-1469P.txt file - cDNA_ID_3073590; gDNA_ID_1620714; Annot_ID_49089
tggttatggcactaacttaacatatatattttatattttcaatgtttttaagaaaatgaaaatagtaaataataaacaagagtaaataaaagaaagcaaacaaaaaaagaaaatagcaactgaaatgagaaacaagagccaagaataattaaagaaaagtacgtaaaagtggtaaaaattaaaatagagttcaaaaagaagtgactaaaacccatactacaactctataacctcgtttgggtctcgctagttggaactttgacttttgatggctcaatcattaggatttatgcctaaccttaattagttaactcctatgattggatgatctaattataattaatcggtaaaggcacttttatcattggaattttaattaaataactgcgtacctatattagtcgttacatgtgattactgtatcagactatcagtgataaacataggtttttcttttttcttaacataacaacatggaaagaggttaagcgccaaaaataaaaaagactttctaatcgtaaaatagctagtagctaccgacagattgtgagtgcgaaacacacataacacagtagataaaataattgaaaagtagttaaaatagttctcttctgttttttttttgaaccagttttaacacgaaagaaaaagacaccagtcattgacctatcataataatatacacaagatttggcttatttaaatgtaatcccgaagagcgaatattaaatactcctctggatagcacaataattcgattctaacaataaattagaatatattgggaaaagtttaacaataaattagtactaactttttcctgtggatagcacaataattcgatcctaacaacaatgcctgtctattttagtcgccagtttcaaaatactgcaatacagtgaaaacattttaaaacacatgcttcatcttatctttttggctattcttcacagtggtaagtttccgtcggtgccgatattatatgtttgtgctattaattaatcatgaattgtataaatttccagatttgttggtggagccttgtaggccatcaaaagcttttgatttttgaacaaataatggcccatatatcgaccgacgaatatttgtactcccatgaatacaacaatctagtttcaagtaaaaagtgttcaaaatatttcagatttttgtatcgtagttttaaaagactaaaccaattgtataattacatttctattttccagctgcttggccggctgatatggcaatttttagcaacatttatataggagcgtattgtatatttttgttcacctgtggctatcttgtattcattttgatagaaagactaactttgtaccattcaaataatgattcggttatcatttcgccatcaaataatcgatttatacctaatactgcgaagatagagacattttaacaatactatttacgatagttcggtagaatatagtaatctatgcattgatgacatcgtcggctctaatcagcttttataatgcttattaacatcattatggcatattcataatttaatcgaagtaacctagtttattttaatgcatttagatcaattagatgggggaaaaactatgtgatctttcaaatgttgtttgttcaaagcagaatgatttatgtgttacgaattcgccagaataattttaatttagccaaccaaaaaaaacataatttgtaaactttttccacgttttaaactatttgtgaaatgtctccaaaatgaaagaaaaaggttatgccaccgacaatattttctaccttgtacaaagaaacaaattgtttattcaaagttggtttggaaaagatactgatccaacggtcacggatttgaataacattgtttagttaatacaaccaaattattcttatgctatgtgtacctacttagaagcttacacagaaaaaaaaaaaaaaaaaaaaacttctaaactttggttttcttttttttcccatcatttataatattcacgtgttacataataatttggatgtatataataaatgatccaataattaacaaaataaatctgatcatccaatcataataaagttgcgcatactaaacaatattttattttcctaaacacaacttctttgatatatggattggtcgataagaataataagatatgggttttaatagaagacaatcaatcttcaggggctttcttgaaattacagcgtggtaaaaaacaatgacatcaatctggacccgatcacgaggacccggatccgtatcgataaacagtgtagctttcactaccccattttcccagaaacacctctcaaaaatttctcaagaacttgtataaatatctcagtttcgttcacgcagtgtcttttttatttttgtatttcttttttcattgttcaccaactcctcttgaaggtgggacagagtccagctccaccaccaccatagccatcgcgtcgttttctccgggacccacttatttcgtgacgtttctctctttgtatatacatacaattgttttcagtctcaatttgctgtccacattttaacacaactctatctcaggggtggtgtctgaatctcgtctctctcattcctatttatcccaatctaatctatcacaaacccttccacattgcttttgtcagtctgtaaaattctctttgaatcagtgaatcactcacttaaatccaaaacagtttttttttctttctttctttatttgcttgttgtggaatcaatagctgtctccgggaaaattcgttttttttctccttcgggatctctttttttttttttttggttttatttaataattatccccgagccaacatttattgtcgattcggtttatttcgtctccttcgtcttccactcttactagtgcatgctctgaatctgtatgtaatgggagttcaacagtctggatccattatcctagccgggtcgggtcaaggtctttgagtaagagagacaattcgttttgattcggtgtagaagacatcatg

SEQ ID NO: 33979 - DNA, 3003 bp, Unknown
  misc_feature (1)..( 3003): 2750-1469P.txt file - cDNA_ID_3073590; gDNA_ID_1620714; Annot_ID_165584
tatctttttttttttttccacatatattggtatctatatatcttatcttacactttaccaatattttcatacttaatcctatgaaattctagtttttctggttatggcactaacttaacatatatattttatattttcaatgtttttaagaaaatgaaaatagtaaataataaacaagagtaaataaaagaaagcaaacaaaaaaagaaaatagcaactgaaatgagaaacaagagccaagaataattaaagaaaagtacgtaaaagtggtaaaaattaaaatagagttcaaaaagaagtgactaaaacccatactacaactctataacctcgtttgggtctcgctagttggaactttgacttttgatggctcaatcattaggatttatgcctaaccttaattagttaactcctatgattggatgatctaattataattaatcggtaaaggcacttttatcattggaattttaattaaataactgcgtacctatattagtcgttacatgtgattactgtatcagactatcagtgataaacataggtttttcttttttcttaacataacaacatggaaagaggttaagcgccaaaaataaaaaagactttctaatcgtaaaatagctagtagctaccgacagattgtgagtgcgaaacacacataacacagtagataaaataattgaaaagtagttaaaatagttctcttctgttttttttttgaaccagttttaacacgaaagaaaaagacaccagtcattgacctatcataataatatacacaagatttggcttatttaaatgtaatcccgaagagcgaatattaaatactcctctggatagcacaataattcgattctaacaataaattagaatatattgggaaaagtttaacaataaattagtactaactttttcctgtggatagcacaataattcgatcctaacaacaatgcctgtctattttagtcgccagtttcaaaatactgcaatacagtgaaaacattttaaaacacatgcttcatcttatctttttggctattcttcacagtggtaagtttccgtcggtgccgatattatatgtttgtgctattaattaatcatgaattgtataaatttccagatttgttggtggagccttgtaggccatcaaaagcttttgatttttgaacaaataatggcccatatatcgaccgacgaatatttgtactcccatgaatacaacaatctagtttcaagtaaaaagtgttcaaaatatttcagatttttgtatcgtagttttaaaagactaaaccaattgtataattacatttctattttccagctgcttggccggctgatatggcaatttttagcaacatttatataggagcgtattgtatatttttgttcacctgtggctatcttgtattcattttgatagaaagactaactttgtaccattcaaataatgattcggttatcatttcgccatcaaataatcgatttatacctaatactgcgaagatagagacattttaacaatactatttacgatagttcggtagaatatagtaatctatgcattgatgacatcgtcggctctaatcagcttttataatgcttattaacatcattatggcatattcataatttaatcgaagtaacctagtttattttaatgcatttagatcaattagatgggggaaaaactatgtgatctttcaaatgttgtttgttcaaagcagaatgatttatgtgttacgaattcgccagaataattttaatttagccaaccaaaaaaaacataatttgtaaactttttccacgttttaaactatttgtgaaatgtctccaaaatgaaagaaaaaggttatgccaccgacaatattttctaccttgtacaaagaaacaaattgtttattcaaagttggtttggaaaagatactgatccaacggtcacggatttgaataacattgtttagttaatacaaccaaattattcttatgctatgtgtacctacttagaagcttacacagaaaaaaaaaaaaaaaaaaaaacttctaaactttggttttcttttttttcccatcatttataatattcacgtgttacataataatttggatgtatataataaatgatccaataattaacaaaataaatctgatcatccaatcataataaagttgcgcatactaaacaatattttattttcctaaacacaacttctttgatatatggattggtcgataagaataataagatatgggttttaatagaagacaatcaatcttcaggggctttcttgaaattacagcgtggtaaaaaacaatgacatcaatctggacccgatcacgaggacccggatccgtatcgataaacagtgtagctttcactaccccattttcccagaaacacctctcaaaaatttctcaagaacttgtataaatatctcagtttcgttcacgcagtgtcttttttatttttgtatttcttttttcattgttcaccaactcctcttgaaggtgggacagagtccagctccaccaccaccatagccatcgcgtcgttttctccgggacccacttatttcgtgacgtttctctctttgtatatacatacaattgttttcagtctcaatttgctgtccacattttaacacaactctatctcaggggtggtgtctgaatctcgtctctctcattcctatttatcccaatctaatctatcacaaacccttccacattgcttttgtcagtctgtaaaattctctttgaatcagtgaatcactcacttaaatccaaaacagtttttttttctttctttctttatttgcttgttgtggaatcaatagctgtctccgggaaaattcgttttttttctccttcgggatctctttttttttttttttggttttatttaataattatccccgagccaacatttattgtcgattcggtttatttcgtctccttcgtcttccactcttactagtgcatgctctgaatctgtatgtaatg

SEQ ID NO: 33980 - DNA, 3003 bp, Unknown; identical to SEQ ID NO: 33978
  misc_feature (1)..( 3003): 2750-1469P.txt file - cDNA_ID_3073590; gDNA_ID_2926218; Annot_ID_142305

SEQ ID NO: 33981 - DNA, 3003 bp, Unknown; identical to SEQ ID NO: 33979
  misc_feature (1)..( 3003): 2750-1469P.txt file - cDNA_ID_3073590; gDNA_ID_2926218; Annot_ID_203118

SEQ ID NO: 33982 - DNA, 3000 bp, Unknown; identical to SEQ ID NO: 4554
  misc_feature (1)..( 3000): 2750-1469P.txt file - cDNA_ID_3073609; gDNA_ID_1620714; Annot_ID_165578

SEQ ID NO: 33983 - DNA, 3000 bp, Unknown; identical to SEQ ID NO: 4556
  misc_feature (1)..( 3000): 2750-1469P.txt file - cDNA_ID_3073627; gDNA_ID_1620714; Annot_ID_165576

SEQ ID NO: 33984 - DNA, 3000 bp, Unknown; identical to SEQ ID NO: 4552
  misc_feature (1)..( 3000): 2750-1469P.txt file - cDNA_ID_3073652; gDNA_ID_1620714; Annot_ID_165556

SEQ ID NO: 33985 - DNA, 3000 bp, Unknown; identical to SEQ ID NO: 4552
  misc_feature (1)..( 3000): 2750-1469P.txt file - cDNA_ID_3073652; gDNA_ID_2926217; Annot_ID_203067

SEQ ID NO: 33986 - DNA, 3003 bp, Unknown
  misc_feature (1)..( 3003): 2750-1469P.txt file - cDNA_ID_3073689; gDNA_ID_1620715; Annot_ID_165617
actcataagtaacaaattaagcattcattttttttttggctagatgactggactcgtgaaaccatcatcagggtcagcttttgttcaaggtttggacatatgcaaggatatggacaaagtctacattagcatgggtgtttgcccacagcacgagtaacaaattaaattcttgtaacatatttgttgttgttgaatgaagatcattattaagtttacgtgtttcctaacaatcatatagttattttattgttctcttatagtcttattgttcgtcattgaccagcttgctctgggaaacactgacagggaaagaacatcttctcttttatggaagacttaagaatctcaaaggccatgatctcaaccaagtatgttatcattatcaatcttacttctatcttatattagtgcaagagtcttaaacgtcaattcatggttaaatattaggccgtagaagaatcactaaagagtgtgaacctatttcatggaggagttgctgatatacctgccgggaaatatagcggaggaatgaaaaggcggcttagcgtagccatttcacttatcgggagtcctaaggtacaaaattgtatcttactcatctcctaacaaaaaacttattgaagcccttatttgaatgtgatttagagagctaaagtttttcaagctttaacaattatttttggtttttatattaaataaaaggttgtttatatggatgagccaagcacaggacttgatcctgcttcaagaataaacctatggacagtcatcaaacgcgcaaaaaaacacgcagcgataatcctaacgactcattcaatggaagaagcagagtttctctgtgaccgattgggaatttttgttgatggaaggttacaatgcatagggaacccaaaagagctgaagggcaggtatggtggatcctatgtgttaacgattacaacatcaccagaacatgaaaaagatgtggagacattggttcaagaagtttcctcaaatgcaagaaagatatatcacatcgcagggactcagaagtttgagttcccaaaggaggaggttcgaatttcagaagtctttcaggccgtggagaatgcgaaacgcaatttcactgtatttgcttggggatttgcggacacaactcttgaagatgttttcatcaaggttgctaaaaccggcctttaactaatgtcttcttttgaatacttttaagattattagttatgtctgttccacgtcaatattttgcttgttcatgtttgataaattgataatgcagaggtttgattcatgtacattgttggctcttcgcctgcaagtttgcgaattagtctgaggtcttgtattagtttgtttgtggatgatgcatgtaaccacaatttttttatttaaacgtggctatatttaattgtggataaaccactgaatatgaaattttatttcatctaccattcagatcctaaatgtatatcttaccatttaattcatatagggtttacgatttaaaatttagaatttcgaaaatagtatctatattaaaagatagtaattaggtctttttttcattgaattttacttaaacattggtaaaatttcatatgccatcgaaaaaagaaaatatcactgaaaactatgttagctgccggagacaacatttctaaaaagaaagacaatttttaaaaaagactacaaaatactctgttgttcctttttgtttgattgtttagaaaaaaaatttgtttttaagaaattaattttttaagttttccatgcaatatttattggttaatattggtgaattgtaattttcaagaaaaatagttagttatcattggtttagagttataaaaaattgtaaaacactaaaaataatacatttataatcaaaatttaatatgttttcttaatatatgtgtttttctaaacaatataaaaaaaggaacagagggagtataaatcaaaactgttaaaccaaattttttaccaattaaatcttaattatatcaattggttcttctccgaaataagaaattgtcttgatgtctatgaaaatcacaaatttcactaaaaatttatggaggattcctaattaactttagaccaggaatttttcaaaaaataaatttaaagatgacattatcatgaacacattcaaactgaaatcaaaccaaagtaaatttattttccctgtaatggaccatagagtataaagtatttaaaactgctacttattaaatcaaagacttttgtgttttttattgtgtgcaaagactttttatgtttgaaaactgaaataagactgctagtaaaaatataaactgaaataagaatttttcttaggacatcataacatttttgcttcttgtccaagtaactgccacattggaaaaaaatgtttagatttgaacaaatctttttaaaatggtcaaaaaattatcatagtcaaccaaattacccgacacttttacgtgagacattaaaatagactagtttaatcgattatgttcacacgtgattacgtctgagatgacgtatgaatcatctttatacaaatacaaatatacagtaaacaaataattgaaactcacctcttccactagtcgaagaatctattggtcgtggcatcactctccttcgcagcttcctaccaaatttacattgaaaatattctccattgtcactttctcgatttcgtaaaattacctttttgttatttgaccaaaagaataaccccaaaaaaacaatactaatatattcgagaaaaataactaattaaaggtatacttaacgagaaattaaagcgtgtgcacaagggtattactgtaatttcacattccgtatctgatctctgttcttctttcctccgcctgctataaaccaaaaggcggtgactcgatttgttccttctaagttcaaaaattgggtttccattaggattcaatttttactaaccctaaaaaacagaatctaatacacagagaaaagcgaaggttgttaccttcatcaatg

SEQ ID NO: 33987 - DNA, 3000 bp, Unknown; identical to SEQ ID NO: 4573
  misc_feature (1)..( 3000): 2750-1469P.txt file - cDNA_ID_3073693; gDNA_ID_1620715; Annot_ID_165612

SEQ ID NO: 33988 - DNA, 1228 bp, Unknown
  misc_feature (1)..( 1228): 2750-1469P.txt file - cDNA_ID_3073697; gDNA_ID_1972159; Annot_ID_179563
ttccaagaaagattacggagatctctttgccatatggtttctgtctcaatgattcgcttctatgttattgtgtaagatgatttatatatacaaatatgtacgagactcaatactacacatttccttagacaactcgaaatttattgtttattttaggaatcatatgtacttaaatatacatgcgcgtgtacatcacactctcggttttatatgaaatgcatgcaaaatactaatcctgagtttgctggtgcgattccattgattaattatcctaatttggcttaaaagaatggaaacaatgtcatcaaaatcctcaaattgtttaaaacgttaatttaaatcctcaattttccacgaaacaaaataaatatcaaatttctgtcgatttttcaaatactgtaaaataccaaacttttattgactttccaaataaataataaaattttgttgatatagccatattagacataccgttaagtgggataacaaatcctgctatcaaagttcattttctcttaatagactcgttaattgaaaatgacaacgttctctctaagaataaaacatcgtctttttgtcataacgggtcaattaaatttttaatttcaagtcatataggaatttaaggttaaagattttgctcgatttggggatccatgattgattgaatttggagattttgctcgacgtcactttgttttttttttgtttttttttcgctttgttgttatagaaaacaataacgttttgttgttatagaaagcaataatgttttgaattaacgggtatgttaataaaaaattaattttgttaacggaatctgttaatctacttaacatcatgtctaatatgaccattagcaaatattttgtatttattaagaaagtcacataagtttgatatttattagaaaaatcaacataaatttgatatttatttcgtttcgttggatgttgagaatttaaacaaatgttttcaaataaaagttggagattttagtgataattttccgataaaagaatgtcatttctttgagaatgccattacagttttaatttacttgatatgttaaaaacatttttgtgggcttaaccagggcccattaatccgagttaccaaaactcgcaactcgttaacactccgagtcattgactcagtatcttcttccaacgaaatttcaatttttcattgttcttgatgaaactgaggccacgacgaatcgcaaatg

SEQ ID NO: 33989 - DNA, 3000 bp, Unknown; identical to SEQ ID NO: 4571
  misc_feature (1)..( 3000): 2750-1469P.txt file - cDNA_ID_3073697; gDNA_ID_1620715; Annot_ID_165609

SEQ ID NO: 33990 - DNA, 3003 bp, Unknown; identical to SEQ ID NO: 16936
  misc_feature (1)..( 3003): 2750-1469P.txt file - cDNA_ID_3073724; gDNA_ID_1620716; Annot_ID_165641

SEQ ID NO: 33991 - DNA, 3000 bp, Unknown; identical to SEQ ID NO: 4605
  misc_feature (1)..( 3000): 2750-1469P.txt file - cDNA_ID_3073751; gDNA_ID_1620717; Annot_ID_165683

SEQ ID NO: 33992 - DNA, 3000 bp, Unknown; identical to SEQ ID NO: 4605
  misc_feature (1)..( 3000): 2750-1469P.txt file - cDNA_ID_3073751; gDNA_ID_2926188; Annot_ID_200827

SEQ ID NO: 33993 - DNA, 3000 bp, Unknown; identical to SEQ ID NO: 4605
  misc_feature (1)..( 3000): 2750-1469P.txt file - cDNA_ID_3073751; gDNA_ID_2926189; Annot_ID_200849

SEQ ID NO: 33994 - DNA, 3000 bp, Unknown; identical to SEQ ID NO: 4609
  misc_feature (1)..( 3000): 2750-1469P.txt file - cDNA_ID_3073773; gDNA_ID_1620717; Annot_ID_165667

SEQ ID NO: 33995 - DNA, 2277 bp, Unknown; identical to SEQ ID NO: 3453
  misc_feature (1)..( 2277): 2750-1469P.txt file - cDNA_ID_3073773; gDNA_ID_1620647; Annot_ID_163304

SEQ ID NO: 33996 - DNA, 3000 bp, Unknown; identical to SEQ ID NO: 19136
  misc_feature (1)..( 3000): 2750-1469P.txt file - cDNA_ID_3073773; gDNA_ID_2926188; Annot_ID_200816

SEQ ID NO: 33997 - DNA, 3000 bp, Unknown; identical to SEQ ID NO: 4622
  misc_feature (1)..( 3000): 2750-1469P.txt file - cDNA_ID_3073792; gDNA_ID_1620718; Annot_ID_165726

SEQ ID NO: 33998 - DNA, 3000 bp, Unknown; identical to SEQ ID NO: 4622
  misc_feature (1)..( 3000): 2750-1469P.txt file - cDNA_ID_3073792; gDNA_ID_2926154; Annot_ID_198257

SEQ ID NO: 33999 - DNA, 3003 bp, Unknown
  misc_feature (1)..( 3003): 2750-1469P.txt file - cDNA_ID_3073796; gDNA_ID_1620718; Annot_ID_165725
aagaggttgattggtagaaatagtgtcagttgaagaagaaacttgaaaagacaagaacaccaacactccgtagtataataaaaacacattcttcttgcaaatctgcatgtttgttttgaaaataaaagacagaaagagtcttcttggctcacgagtcaactagactacagagtagatgaataacaagttgttcttgcaggtctccacgtttctacaccacacgatagtttgaagataaaagaggtttatgtaacataattacataatgaaagagtcttcttgaccctcgagtcaactcactagcagcgtaagtcaagagcaaacttccaaatttcagggaaataaatgggataataaaaatctcgattaaaggataatttgatatagatgatatgtccccttgttattttctcaacaaattcttattcactcatagccaaaaaaattttaacaatatgccacggaattaaaaataaattaaaataaaaataaaaagataaaataaattaaaataaaaaaataaaaaaatatgtatacttttaagcttaagtacattccgcatgggtttataaacgagtattagcgtttagatttttacaattaaagaaaactatatgtcggtttgggtttataaataaagattaaatttagattttacaactaaacaaatttatatgttagtttagagttatcaaaaaatgataagtttagattttataattaaacaaaattatatgttggtctggtttgggtttataaaaaaagtaattaaggtttatatgtctatttggatttataaatgaggttaatcaggatttagatattaaaattaaacgaattatatatcattttagatttataaaagagtagattgagtagtggtttaatttttataatgaaataaaattagatgtcggtttggatttataaaacaatggttaagattatagtttttatttagattatagtatttgttttagtaaatttaattagattacataagaaattttgattggctacttaaaagggggtgaataagagaagttcactcctaggggagaacccaagaactattctattttcttagtcatttttaagaaaaaaaattgccagctacctgaattgttacaaaatgcatggctagatatatcaagtaaactaaacgatgctgagctacctgacctatatgtattacataacgatatatacgcgatatataacgtcatgtggtcaacatcgtaaagatagaatttatgttaaccggtcgactaatattaatattttttatttggtgttgtataataaaaaaaaacagattctatattcaatatatatataatttgcatctatatatacatttttgcagccattttgtgaaataaatcctggagttggaacttatttacaatggctgccactggcttttaattattagttttttcagcaataaattgattaacaaacgaaaaacattccaaatatattccaatcccatatatcacgcagatttttccaaaatttgaactagatttcggcaactatttaaaacaaaaaatgtttgataacccaaaagacaattgcaatcccttaaaatgagcaaaacgcaactaaatacatttcttatcaattcactaaatcttatttctccaaaatttgaactagatttcgacaactatttaaaacaaaattttgtttgacaaactaaaacacaattgcaatcccgtaaaatatttgttttaattataaatttaaattagcggggtatcgcagtttttttacaggacgggtttggcgaaacgggtttggagggacgttacttaataacaattgtaaactataaaataaaaatattttatagatagatataatttgcaaaattttatatatactaatttaaaaaaaaaaaattgtctccacggtgtatcgcggattaaaatctagtatatattataatagttagctttttatttttaaaactaaattaaaaatgtgaaaaatattaagagatttgcaaaattactttttctactacttttttacaacaatagcgtgactctttttaaaataaaaataaatgagcaaacagatttgtttagtaaattagtttagatatttctacaatttgctacccctcatttttttatcaatagtacaaattattattaattataatattataaactatacttttacattaaaataaaataaaattattatattattattttatcaatatcagttaatttttacattaatctaacttaaaaccaataaaatttattcatttataacgtttattaactttatagaatattaattttaaaaaattctactgtagtaatattttattacttgcaaatagataagttaatcgagttggatcaatcattgttaactcaattaattcaatgtatttttgagaaattaaccgattcataccagaaataaccgataattaacgtttaaaccagtcaaaaccggagcatacggataacatttaaggtaatggcaaaaagtaacattttggctaaaaccggactacttatcatgttcgtaaacggtgaacagttatccaaaaaccgaactataaccgcaattaaagccacgtgtgaaccttaatctcacgacacatgctaagctcatgcagtgaagaagctgaacaccacgtcctcgtggcactctcagtctcacctgttcaaagagatctttgaagaactgagaagaagtctagaaatagaaccaaccttcgtttaaacccgtatatatagttatctaacccaacacgcaacaaaaaagagaaagaaagaaaaagtaaaccgaaagcgaaagcaagcttgatatttcgtgggtttcaaagttacaagttttgattacgaacacgcaagaataacgcgagatcttgattagagagagttcttgcaaaaagggtctctgtatttagttattaaattcttcaatcttgtttctgtaaatttcggatatttttgagaacaagcaaagatg

SEQ ID NO: 34000 - DNA, 3003 bp, Unknown; identical to SEQ ID NO: 33999
  misc_feature (1)..( 3003): 2750-1469P.txt file - cDNA_ID_3073796; gDNA_ID_2926154; Annot_ID_198256

SEQ ID NO: 34001 - DNA, 3000 bp, Unknown
  misc_feature (1)..( 3000): 2750-1469P.txt file - cDNA_ID_3073808; gDNA_ID_1620718; Annot_ID_165714
agtcatagcttagtttaagtagtaactactggaaggagttcgctatgttttccctcgtaacttgttggagccaaggagttgcaacaagtcagacaggaaaaactcaatacaattattagaatagggaagcagataaggatttgttgacttgctcttctctatgcaatttgtcagcaaatgataataatgtcaagattcttgagattttcttcttccatttgatcatgagtagattcataagtttgcagacatttttccgaattttttttacttacatccccattttctgaaagtgttattacattttcttgcagtggccatggagcattcaacgcgtcacaccatcttttttcctttctatcttctctgatctatctatattatctctaaaagatttgagagatggtgttgaattcaccacaattctgcattccaacctaaatcaacagatcaaaaaaaaaaaaaaaaaaattgaataaaaattatcttttatacaatatctttttggtcatgacatatatccctatttacaagttttgttcctttataagaactaagaagtgtgtgtctttttttttttgtgtgcaaccaggtgtgtgtgtctttaggttagagttatttggtatgttaagaggcgatgacgtgtcgatacaccattggtgggattataatgacaaaacccaaaaaaaaaagtactcacgtgacaaattttgtttgtttccccatttcatcgtctctctctttttgtcgaccttcaacgcgaaatcactcgatccgatgaattatgaggagatatgcgtcggatccgatctgtcgttatattcatttcaacgtcggtggagaccctcgacgatttcaaatcggagagtatgctccaatctatttcccatggtacgtatctctctgttttcatttttttcagttccttttagccgagattgatgattggaattgaaaccatcaaatttcgaaactgggttttcttagatcttgtcaattggaattaattttagtgagtctggtagttaacgatagatttgggtgatggtttgtgtttgaacgttctccttttcctgcttaagcatgaaccttacttaatcaagctctgtaatgctggcatttattttggtgaatatattgattcaatgtttctttatctctctgagtgatctgtatttgaagtcgtaaaattttgtttatctttcatcggtttttaggatgggaatcccaggttgtcttgctttggactcatgaaaagtagcagagatgggaagagttatatagcactaacttggcatttactcctacagagaaatttgctaacgggtaaaactctctctgcttcatgtttatatatgtccaaaatatttcagggcacaaagttcccaaagctaaatccactttcttcatcttgtgtcaggtagagttacaccagagagtgtattatgttttcagttttggaaccgttttgctcgatctcattagtggaaaacatattccaccgagccatgtaagttctctactaatagaagatatataaactttagatgtaatgtaggacctggctctttgtttcttgctggatagttcttggaaggaatctctagttcagtccttactaaaatctaaatgatgatcatcatcgtttttcctgcctcattctttctcagacatcctttggtgatgatgcatgcttaagagtgaatcttacagccatacaggaaatactgcttaagaatggatcttacagccatacaggaaatacttagtaagattggatacaaggaattgccattgaggtgttaatctattccttcctctcgcttactacttagtcttttgcattagggacttgttttgaatatgattttatttaccttcttctgcagctctcgtttcaaatgtggacaacccagatgcaggaatctctcttttcaaagaagcaaggggacttagctttccgatccaaagattttacaaccgcaatcgattgctacactcaggtaatatctctaaatgcaacatacctctttaattacatgccaagagccatcatagggctagacattcagtcatcatagggctacacataactggaatgattcatgggccgaaaaggatgaaaaaagtttgtatggttccttgtattgaaagacatctaaatacaaaaatttgatttttgtcccttatgaaccttaaccattggaggactatttttataagatactctcattttgttcttagcttagaaataacaaaactttaatagaaataattgttaagatccaaggttaaccattagagatgctcttagtttacatgtctaatctgggatccaaaaagacatagtagcaaaaaaaaaatttaaagcttgtaactgatttcatttaaagaaaatttcatgctttatttattaattacactactatatgatttaatttaataattatgtcaatcaaattgaagttacatcaaaagagggaccagagagaaagagtttcgtgagcagctaaaaaccaaagtggggaagtcttctttcttagtcgtcgttactaaaacacaaatagtttatttggcatttgtgtttaagtaaagatgaaacatcttatatatgtgtcattaatggctaaagttagacgattccacaacggcagccaaaaatccttgaaattttccgattcttccgtttcaagtcaacgttttccttcgctccctctcaccttcttcttcacaaaaacctgaactttaatttgaatttgcccatatttttagatccacatttattcattgatttgctctgagtttgtattatctcaaagttttatccttttgttgaatcttgatctctcgattattccccaccaagcaccaagtgatcgatcttttgtctcactgaactgggttatgcttgagatttgatctgacaactaagagtttcctacttttgcgttttgagttttgtttttcatggcgtatcatccagtttataacgagactatg

SEQ ID NO: 34002 - DNA, 3000 bp, Unknown; identical to SEQ ID NO: 34001
  misc_feature (1)..( 3000): 2750-1469P.txt file - cDNA_ID_3073808; gDNA_ID_2926153; Annot_ID_198232

SEQ ID NO: 34003 - DNA, 3000 bp, Unknown; identical to SEQ ID NO: 4628
  misc_feature (1)..( 3000): 2750-1469P.txt file - cDNA_ID_3073812; gDNA_ID_1620718; Annot_ID_165712

SEQ ID NO: 34004 - DNA, 3000 bp, Unknown; identical to SEQ ID NO: 4628
  misc_feature (1)..( 3000): 2750-1469P.txt file - cDNA_ID_3073812; gDNA_ID_2926153; Annot_ID_198230

SEQ ID NO: 34005 - DNA, 3003 bp, Unknown; identical to SEQ ID NO: 20223
  misc_feature (1)..( 3003): 2750-1469P.txt file - cDNA_ID_3073819; gDNA_ID_1620718; Annot_ID_165709

SEQ ID NO: 34006 - DNA, 3003 bp, Unknown; identical to SEQ ID NO: 20223
  misc_feature (1)..( 3003): 2750-1469P.txt file - cDNA_ID_3073819; gDNA_ID_2926153; Annot_ID_198227

SEQ ID NO: 34007 - DNA, 3003 bp, Unknown; identical to SEQ ID NO: 20238
  misc_feature (1)..( 3003): 2750-1469P.txt file - cDNA_ID_3073833; gDNA_ID_1971690; Annot_ID_175076

SEQ ID NO: 34008 - DNA, 3003 bp, Unknown; identical to SEQ ID NO: 20238
  misc_feature (1)..( 3003): 2750-1469P.txt file - cDNA_ID_3073833; gDNA_ID_1620719; Annot_ID_165745

SEQ ID NO: 34009 - DNA, 3003 bp, Unknown; identical to SEQ ID NO: 20238
  misc_feature (1)..( 3003): 2750-1469P.txt file - cDNA_ID_3073833; gDNA_ID_2926191; Annot_ID_201076

SEQ ID NO: 34010 - DNA, 3000 bp, Unknown; identical to SEQ ID NO: 4642
  misc_feature (1)..( 3000): 2750-1469P.txt file - cDNA_ID_3073839; gDNA_ID_1620719; Annot_ID_165742

SEQ ID NO: 34011 - DNA, 3003 bp, Unknown
  misc_feature (1)..( 3003): 2750-1469P.txt file - cDNA_ID_3073913; gDNA_ID_1620721; Annot_ID_49209
tgtacatgtgaatgggctggtgcagtaaatgcattattacgtgttaatgtacatgtgaatgggctggtagcagtaaacgcataatctcaaaaccaccggtcaccgatgcgtgtgcaagtctcagtcagaacgtgattggaccaagtctcggtgtataaagacacacagtccatcaccgctaaataatgaccacacggatgggcccatcaatatatcaaatttgtgggtcttttaatcttgtttcacaagtgaattattcaaatgggcctttatttatacaccataaatggcccattagtccaacaacatacaataatgcaagtggtcggggtcaacgcactagaaattccacaagaactaaacgataagaacaaataatcttcatagtctctcatccaatcttacaaactttctgatttcctttctacattcatcgaccaatggcagcaaacaaaactcttcctacgtatttttgcagaaactgcgagaatccactagctctcggtgaagatctcatctccaaaaaatttgtggtaacaaaaaaaaaaaactaaagaatgttatagctttaccaaaaaaaatcactttttcatttcttatcggatgattttctagagatgatcaagtctcttcataatctccattggttataaaatgcaaaatgtttttgaatatggattatagggagcttcagggccagcgtttatgttttcacacgcgatgaacgtggtggttggaccgaagattgggaggaaactgataaccggatcgtatgtagtggcagatgtgatgtgcagtaagtgtggtgagacgttgggttggaaatatgttgagacattcgatcttaaacagaggtataaagaaggcatgtttgtcatcgagaagctcaagttgaccaaaagatattgaaacctagtcaagaagaataatactcttggagggttaagctaataaataaatgaaggaaacttgaggattgtatatgtatatataacctttgttgtataaatgtcatcactatattggttgttctctataaagggatttgaaaacaaagtaaaaaagatttaatctaagataagattttttttttcttaaactatatagaaatttacagtaagaaattaaataattatgaaaaagtataagaaaatatgaagagattccacatttccattattcatcactgctgatacgatttactttctcaatttaccagtcataaagcaaaaacccagaaagaaagaagtcacaaggtagtcgctacacggcatatatgatcagagactaaagatcaaaactttcatccaactccaaccttattctcctctcaattttgtcttgcgtccttgttcgatctgttaaacccttgtaagatccctctgaaatttcctcagaaaaattcatttcaaagatcaaaatcgaatctttcgtctgatttttctcaatttcgttgaaccatatatcttactgcgtaatttcctctccggtaatatctcattttgtttcccttaccctaccaaatatatataatctgtggtctcttcttttgacccactcttatttgtttattattgaaattgaggtactatcgtggaatctctagtcttgcacgctaacacctgcccactgttcttatcctctatttttcagacattgacgtttgaagcttggtgaatttttggattctggtaaggtttagaaaccctgatttctggttttccatgtgggttctggatatattgatggatttttatgtttttggtgaaaaggtgagaacttggttggagcaattgatcacgccttgaaagtgtttgataaaatggctcaggcaattggtccaagactgtatagttgctgcaactgcagaaaccatgttggacttcacgatgatatcatctctaaggcttttcaggtgaatcaccttgatcatttcttttgttttgtttgtgtcccatatgattgatgtagaaaattaagtggagaatcgatgtaagactagctgcagctgagcttagaatctaagaaaacctgtgactttattgtctttcctgatcaacgatcgatgctactgatcatgattcagttttcctactaagttacatgttggtgttagagtcaaatcaaaacttgaaagttgatccttggaaatggaaacaaaacataagacacaaagtagcctttgactcaaattgttacaaatcacaaaagtagtcattctttgagtatgcttgtggtaggttgtggactcaattcaaaatcttatgttagacagcccggcttttgtgtttcttgattgtgaataccaaattcttaatcacggttcttcattaccacttaccagggaagaactgggcgagccttcctgttctcccacgcaatgaacattgtggtaggacctaaagaagaccggaatcttctaactggtctacacaccgtggctgatatatcttgtgttgactgtaacgaaccattgggttggaaatacgagcgagcttatgagacctcacagaagtacaaggagggcaagttcatattcgaaaaggctaagattgtcaaggaggattggtagagctgaggaacatgatgaattcattattggattggctcaaaaatgtatatagataaaatttggctttgtgatttcacaagtcatcatcagccatttttccagttcttcattgtctctctctgtatgttaattatgtcgtctcttgtgttcaaactatggatttgttcgaacaaggtttctctgttaataaagatgttaatagcttctcttgtgtttcgcctcagaaccttcctttgtaagtgtaatatgaatctccatactttgtctttgagtagcttggaagataacttactagggaaaaagaaaggtctgccgtttaaaatttagactacgtgctgctttatgtttaccaaagctaagtggttgtcgttttggcgcaataaatgtgattaccagaggagagggagagagaaaacggagcgagagagatg

SEQ ID NO: 34012 - DNA, 3003 bp, Unknown
  misc_feature (1)..( 3003): 2750-1469P.txt file - cDNA_ID_3073913; gDNA_ID_1620721; Annot_ID_165835
atatttgcagtcgcaggtccactcttcctagtttagtaccccatctaggcacatatatcgaaatagtttaataaattgaatcaaatactgaattgttactgatatatatactctgtatgtttctcgaaaatacttaaatttggtgtcatggagttgataaatttctgtaagaaattgaacgtctacagttcttatggtttagggtttctaagatggatccaaaaaaatgcaggaaccgaactatatacggcttttgagaacttaggttatcctttagacgtgactttcaaataagtatgtcgatgatttgataagacatgtcgttttatgatatgtagggacagggaaataaaagcacaatgtgaattaagactttagattcaaaaagatgcttcatgcttgtagaaatgatgacgattgcgacttgggacaatggacaagtgctatgtcattacatatactgatacacctaacctaatgaccaaataaggactctttacacgggttaactaaacaaatatatcccaactaacatttccaacaaaataagccgataaatgtaacatgtaccgaacaaaacattattaatcatcgtaacttttttttaggtttgaattaatcattataatttaaaaccctaaaaccaacttataagaaccataattgatcagaatccagtttaagtaaataacatagaaaattttgagtcagataaaaaagaggaaattgtatggttagcaacatttacattttacagaatatggatatggtaaatgagaagtgtgtggatcacaagaagtgaatgtgctttttctgctttttaaaggatgaatatgaaaacgaggctaccctcgttattttatttaatgtgaccactgtttagctggaaatcacttggagacgactttaaagtaggctccaaaatctaaagctagacaccagacaaaagactttctatattgtttgtcttaagataattctaaaaatatcagcatcgttactttattgaatgaatacttataagaattgacagtgaaaatgaaactagtgttgaaaagagatgtttggtcattaaaatcaaacaccgaccttaaactaaaaaagaatatcacttcatcggctcctccttttttcacaacttatatacaatatacacacacacaaactgagaattagaatgtacatgtgaatgggctggtgcagtaaatgcattattacgtgttaatgtacatgtgaatgggctggtagcagtaaacgcataatctcaaaaccaccggtcaccgatgcgtgtgcaagtctcagtcagaacgtgattggaccaagtctcggtgtataaagacacacagtccatcaccgctaaataatgaccacacggatgggcccatcaatatatcaaatttgtgggtcttttaatcttgtttcacaagtgaattattcaaatgggcctttatttatacaccataaatggcccattagtccaacaacatacaataatgcaagtggtcggggtcaacgcactagaaattccacaagaactaaacgataagaacaaataatcttcatagtctctcatccaatcttacaaactttctgatttcctttctacattcatcgaccaatggcagcaaacaaaactcttcctacgtatttttgcagaaactgcgagaatccactagctctcggtgaagatctcatctccaaaaaatttgtggtaacaaaaaaaaaaaactaaagaatgttatagctttaccaaaaaaaatcactttttcatttcttatcggatgattttctagagatgatcaagtctcttcataatctccattggttataaaatgcaaaatgtttttgaatatggattatagggagcttcagggccagcgtttatgttttcacacgcgatgaacgtggtggttggaccgaagattgggaggaaactgataaccggatcgtatgtagtggcagatgtgatgtgcagtaagtgtggtgagacgttgggttggaaatatgttgagacattcgatcttaaacagaggtataaagaaggcatgtttgtcatcgagaagctcaagttgaccaaaagatattgaaacctagtcaagaagaataatactcttggagggttaagctaataaataaatgaaggaaacttgaggattgtatatgtatatataacctttgttgtataaatgtcatcactatattggttgttctctataaagggatttgaaaacaaagtaaaaaagatttaatctaagataagattttttttttcttaaactatatagaaatttacagtaagaaattaaataattatgaaaaagtataagaaaatatgaagagattccacatttccattattcatcactgctgatacgatttactttctcaatttaccagtcataaagcaaaaacccagaaagaaagaagtcacaaggtagtcgctacacggcatatatgatcagagactaaagatcaaaactttcatccaactccaaccttattctcctctcaattttgtcttgcgtccttgttcgatctgttaaacccttgtaagatccctctgaaatttcctcagaaaaattcatttcaaagatcaaaatcgaatctttcgtctgatttttctcaatttcgttgaaccatatatcttactgcgtaatttcctctccggtaatatctcattttgtttcccttaccctaccaaatatatataatctgtggtctcttcttttgacccactcttatttgtttattattgaaattgaggtactatcgtggaatctctagtcttgcacgctaacacctgcccactgttcttatcctctatttttcagacattgacgtttgaagcttggtgaatttttggattctggtaaggtttagaaaccctgatttctggttttccatgtgggttctggatatattgatggatttttatgtttttggtgaaaaggtgagaacttggttggagcaattgatcacgccttgaaagtgtttgataaaatg

SEQ ID NO: 34013 - DNA, 3003 bp, Unknown; identical to SEQ ID NO: 34011
  misc_feature (1)..( 3003): 2750-1469P.txt file - cDNA_ID_3073913; gDNA_ID_2926191; Annot_ID_141058

SEQ ID NO: 34014 - DNA, 3003 bp, Unknown; identical to SEQ ID NO: 34012
  misc_feature (1)..( 3003): 2750-1469P.txt file - cDNA_ID_3073913; gDNA_ID_2926191; Annot_ID_201067

SEQ ID NO: 34015 - DNA, 3003 bp, Unknown
  misc_feature (1)..( 3003): 2750-1469P.txt file - cDNA_ID_3073921; gDNA_ID_1620721; Annot_ID_165829
atcatattgaaaaagagagagaaaaaaagcaactcaccaagtcaccattatgtgtgctaacttgcagaaacatatgagaaatggaatgcccaagtaaactaaaaatatatatctacgggagaaattagaaaattttgtctagtttgatcatatcagctacacgtatgtcatatacagtatcaaacaggcttattagcttacgtataaactatctatagcatgttgaattgttcaagtcgttttttttttttttttctttatcacagaattgttcaagtcgttttatataataattgttgtacataaattatacaaatagcatgacatgactctatattaattttgattggtataaaattatacaaaatttaagctctaatctattaatccgcaatccgatcaaatgttcaatgatccaaaagactttatgttttgtgtatagatttggttttagaaacattgaatgatttttctctatattttcaaaaggctgctagaataagatcagatgatgtaatagactaaaaaagaaaaaacaagacacacattgaactgatataagatgatgatgatgcaatagtacctacaaaatctagtggacgccgaacagtactttaattcggttttagaacattctgaattgaaggcctattaaaggcccttcttgacacaatctagttacacgacttacgacggtgcagctaaggctatttcggtaatttcagcttctcctttcctcgatctccaagtattcgagaaacccccaccaaggcaaaagctctgtcgtcgtccacaagaacaaccaaatttgtttccgtcttctgctaacatatcctctttttcatctgggaaccctaatttcttgactaacttagggttttatttatccatttgagatactctgtaattgaaaggttgaatttttagaagagacatgggaggttcgtcggagacaaagatcttacaagaactcatactttacgcggcgagcgctgctttcagctgcttggttctctttgcgggtcttcgtcatctcgatcctaatcgtgaggcttctaaaaaagctctcgagcataagaaggaaatctctaaacgtttgggtcgtcctcttgttcagaccaatccatacgaggtaatctactatgaattaagcatcttagaatcctcactggttggtagctacctgagaatgcgatatgtggtttcgataaccaatttgtattggtctctctgtttaatattgaaatttggatacttttgagttccaatcgtctttttgcgcaaactcatgaaatgagctcgagaaattgctcactagtttctaattttgtgaataggatgtaattgcatgtgatgtgataaatccagaccacattgatgtggagtttggttctattggagggttggagaccatcaagcaggctttgtatgagcttgtgattttaccactgaaaagacctgagctttttgcttacgggaagcttcttggacctcaaaaaggtgtcttgctctatggacctcctggtactggaaagactatgcttgctaaggctattgccaaagagtcaggagctgttttcattaatgttagggtttcaaacctgatgagcaagtggtttggagatgctcagaagcttggtaagtgcatattattattttgtgtgtgataaaggaacacactttgagtaggcctgtcttcatgctcgtcgtgttttcttcctgtgcttttatcagcttcacattgtgcaactttgttggcagttttttgttttttgtgtgtggttattatatcaattacactttttttggtctgttgatggtgtttctaatctatgagctgctctgttctgtttcgttctctcagtttctgctgtgtttagcttggcctacaaactccaacctgctatcatttttattgatgaggttgagagctttcttggtcagcgccgttcaacagatcatgaagctatggccaacatgaagactgagtttatggctttatgggatggattctctactgatcgtaagttgaattcttcactgttcggcttactttgccatgcagactagtgtaacctggagtatgtgggtttcttatgaatagaaatggttgcttttgtagcgcatgcaagggttatggttcttgctgcaactaacagaccgtcagagcttgatgaagcaatattaaggcgtcttcctcaggcctttgagattggaatacctgatcgccgggagagagctgagatattgaaagtgactctgaaaggagagagggtggaacctgatattgactttgatcacatagctcgcttatgcgaaggctataccggatcagacatttttgagctatgcaagaaagcagcttacttccctatcagagaaatcctagatgcagagagaaaggggaaaccatgtttggtaagtttaaaaagaaaacatggtccactgaaatgttcagtgttgcatccactagtttcaaggtactgatgttatgagtttgtcacgtttgcaggaccctaggccattatcacagttagatttggagaaggttcttgcaacgtcaaagaagacacaagttgcagcaggcgagtactcattgagctcgcagtcctcggcttggagaggctcaagggaaccagatgaggtccaggcagcgataagtgggatctcgaagcttctagtttctcagatcattaacctacagtcagaatctcaggattcatggcagcgggatcccgaagaagattcccgatgaaattccggatcacttttataaacgttctggtgttttcattggaagtttagaatttgtcacacacttcagtttattctgtaaaacttttcttttctttttggtaggatcatttgataacttatgactgtactaaaaagtctctcaagtttctacattactgaatctctcttgttcataatatggccactgttctcactcatgggttacttaagtgttaactctttcttcactttacttaatcgttaatg

SEQ ID NO: 34016 - DNA, 3000 bp, Unknown; identical to SEQ ID NO: 4676
  misc_feature (1)..( 3000): 2750-1469P.txt file - cDNA_ID_3073925; gDNA_ID_1620721; Annot_ID_165820

SEQ ID NO: 34017 - DNA, 3000 bp, Unknown; identical to SEQ ID NO: 4676
  misc_feature (1)..( 3000): 2750-1469P.txt file - cDNA_ID_3073925; gDNA_ID_2926191; Annot_ID_201053

SEQ ID NO: 34018 - DNA, 3000 bp, Unknown; identical to SEQ ID NO: 6743
  misc_feature (1)..( 3000): 2750-1469P.txt file - cDNA_ID_3073941; gDNA_ID_1621103; Annot_ID_171496

SEQ ID NO: 34019 - DNA, 3003 bp, Unknown
  misc_feature (1)..( 3003): 2750-1469P.txt file - cDNA_ID_3073941; gDNA_ID_1620723; Annot_ID_165879
acaatttataaacatagacaaccatgattagtttcggaagtcaaaataaaaagcatgttaatcaattgtcttttatctcgtatccccaattttacttctcaaagtactaaaatagtctaaaaacaatcatacgtacgtaataagaaaataatttacttcctgctgtgtttaaacaaaacttctatgagatgtaaaaaaagaaaaagagtctacgatggatgatcaagcgtaattgctttgttacgtctaaaaggtgtttaacaaaactatagcgcagaaaataatcagtttaattaactaaacaaaaacatgttagtggattaagccaagaattagtccgatagaactataaaatctacaaaatatctcaaatctcaataatacgtatataatatctcaataatacctatataatatctcaactccaatcagaaagctaaataaaatatcagcataagttatattcgcttccaaaaaaagtctgcctcgttacctacctctcacactcaagtctctcacgttatttgagatatttaggagaagcaagacgacaacgagaagaaaaaagagtgggtatggtcaagaaaaagacaaattatgattttagtggaaaatagaaagtaaagagtgaagtgacgcgacacgtggtacgagactccacagcgagccacgtaaggggggacaaagaagagaaggtatggacaatggtttccgcggtcgagccacgctttcagaattctgattggcactgggttatcttgtggaacccatctgaaagatatttttggttgtcgtacggatttgtttatttcgggtttgttgaattagtttgtttcggttttatacactattttaggaaacttttttttatattctttatagtgaactgggctgaatttttttggttgctagattcgagacgagccaatttatgtaatattttgtggctttctgttgctaaattgtaagatctgtaacttacatgagatagaataaaataatgtaatgcaggttttgtggcatatttacaaacatcatccacgtgtaatgatctgtccacatattttgccttgaaagcaactacaatatgacttttaatatcttttttgttaaatatttgacttttaacttatgtgaagcaaagaagtagaaaacgatttgttttgtattgaattattttccactcgtttctacaacaataaaataaaataaaatgaaggaaccattctaaaaaaaggaactagaatattttcaaactatagtacaaaaatggaaacgactatcgaatattagtaactccaaagcgacacgtcaccatctccttcgccgtcataattatgattccattgaacagacggcggcggtaaaagcatgccttcagccatattatccaacaaagtcggcatcccaaacattgtctcctcatccatataaaacgcaccttcgctctgttccggtgtataaatagcttccaccatcgtctcctccatgtccaggccatgattcgtggtcgtcgtatcacacgtctcatcttgaaaagccaacgccgcttcagcagccgctttttggatatccttggcgcatgttgactccgggattcgtagccgccaagccgagtcagcgaagttgagacatgctgatcggccacggagggctaatgcagcgacgtcgtgagcacgagctgccatctcagcggtttggaaagtcccgagccaaatcctggttttcttgtttggctctctcacttcagaaacccacttaccggagtttctttgacgaactcctctgtaaattgggtgacgagtctcacgaaacttcttacggcccgccggtttcttcggacaactcgtggccaacgtcggacaataatctccgccttgaggctcgtaatcggagccaaacatttcagaaaaagctgaaaatgagttcattgatcagagtactctgtttcaagaaactggataaggtttaagtagtacgtagttactagagttctcagtctttttggattaataaaagatagtatatctgtcttggtaaagctatttatatctctctctcttttttttcttttcaggtagattctttttcaagtgtgtagttagtataaaaagtgagagtgagaattggtgtttatattggccggaggagagataacggatatgtggggagcacacggagtttttgtctctgtgaatgacacgtgtatagtacatagcgaagcaatcccacgatgttccactcgctgtctgacgtgtgtcctttgacccttgtaaagagacttttgactcttcactcgttaacctttatgagttctttaaattctatcgagtgtgtgcctgtgtggttggctggctgctgttgttacaatcgtttttaaattcctatgaataaacaaattgtcattaattgtcacccgtctataacataatagacataaatatctctgtgaaatgatattttaaatactcatgtagtatttgtattggaagtagatgtcctaatatttaaccaaaaataatactacaatatagaaaagcttgattttttaaaaaaattaatcagatttggtaatggataattatcaatttcgatggacggttaaaaatgagtcataaatgcatatgatgaacaaaattattcagtttaaacaaactataaccaaaaacatgtaaatggaccaggacaggactaagcgaaggattagaccaatacaaaatagcaagttatcttgaatcccaataattcccacaaaatatctcaatctcaataatagctatattgtattgacaaaaaaaaggtataaaaaatcttcacaataagatatgcatgaaatatattcgctgacaaaaatatctctctcgttacctctcgctctcacgttattgacatttaggagaaaagaagacacaacaaagagggaaaaaaagagtggtaaggtgaagaaaacaacaaaattggctttagtggaaaatagaaagtaaagcttgagagtgacgtatg

SEQ ID NO: 34020 - DNA, 3003 bp, Unknown; identical to SEQ ID NO: 34019
  misc_feature (1)..( 3003): 2750-1469P.txt file - cDNA_ID_3073941; gDNA_ID_2926187; Annot_ID_200728

SEQ ID NO: 34021 - DNA, 3000 bp, Unknown
  misc_feature (1)..( 3000): 2750-1469P.txt file - cDNA_ID_3073948; gDNA_ID_1620723; Annot_ID_165873
ttttagaatggatcttcttctttttttggttgtgagaaacgaatgtaaatggtaaaagttgttgtcaaatgcaaatgtttttgagtgcagaatatataatctttggtctccccataagcaacaaatcaaaatataatactattacgtaattcagtgaattgaaaacaaaaagtttgggctcacctgtaaaattaaagttagatgattctggcatttccgtgtctaagaaaagttctaggcacttatgtaaatagcaaaagttccaggttggttgatagcaacagtttctgcctttctgctaattcagcaaatatcaagactcaaggacgtttggtaaatatccaaagttccgtgagtttttgtaaatatgataaattataggcactatatagatatctaacgtttcaaaaaatgtttgaccccaaaaaaaaaaaaaagggtttcaaaaaatgtctgcaaataaaaaaaaaaggatgcggagacacttttaatttagtcaaagctttaggcagtaatgtaactgagaaacgatcctatgtaaatagcaaaagatacaaaaaaaaaataaaaaaaaaaaaatagcaaaagatacaagatagtgatagtgtataagtagtatcaagagatttatatacagtatttatggaaataacaaatgtttcgagattgtaaagagaaaatgatccatatagtaaaaatctacgggatattttattggtgagtagcagtaaaatccgaacacttgtatatagcaagatacctacccggcaaagcacttcacataagtttcgggtacttcgttgaatatcaaaagatctaaggcagtaaggctctttggtaaatagaaagttgggtaacgctttggtaaataaaattttgggtaacttgggttatattcttctttgaatagcaaaagaagaagtgagcaactggggtaagtagtacagttttgatgatagcaaaagttccaagtgctatttggatttctcaattaggagacatgatgatcaattttgatgacagctaaagtttgcatcgagtccataacccaagaagaactttcacgtaaaccttttcttttggaaaagaaaaaagtgtaactatcatgatttttgtttttctttgttttgatgacaagtatttctcctcgtgaaatcagttttttttttcttttaatgaatataaagaataaatcagattattgagattcacaaaaatccatcatcgcaagttcttacgtattcgaaagacgttactacggttactaacttactgtatatgtatgtgatgtcgaaaaagaagaagagaagacgttacgtcactacttgtatgttcatcgatcagtccacgtggctttttgtaaggtccgagagaggaaagtgaaattcagacgccgcttttttttttttggatgaagttccaaaattagccattttatacagtggttaagctcgttggaccaatatcaatggcgtctgcaacgactcttctcttccaccacggttccactcgagtcctcgtcgctcgtagacggtgccaagcttcagtccttagaccctacggcggtttaaagccctttctttccttctgcagcttacctaactccactgcgccgttccgggattcgttgagagcaaaatccgatggattggctcgggcctatgttaccggagcgccgcctatcgtggaagaaccagacccaaagattgaagaatccaaatctgaggctgaatcgaaggatttaattagttgggggcttctgtggagcttgatgagcaagcacaagctcaggctcagtgtttgcttattgactctccttggatgcagtacttgcactctctctatgcctgttttttctggtaatcggttcttcaatccactctcccaccattagcaaattgtaactgtactctttttttctctttgggtttgatgtagtttaagtttgggtatgatgatttagcttgtcatctgtgtttctctttatcttggtgaagctgttttataatggtaagtgttattgttttgagtaaaggtagattctttgaagtactgattggggtgagaccggagcctttgtggcggctgctgagcaaaattgctgttttgtactcgttggaacccatctttactattgcttttgtgaccaacatgactgctatctgggaaaacgttatggcaatattaagagctcagattttcagaagggttttgatccagaaggtatgttttgtttagtatgatcaaagttcgcttaagctatattgttggctgtattgaaatatcattgatgggtttcttttttttgtcttttatatattcaggcagagttcttcgacaaatacaaggtctgttccttttattcttggtttgctcaggtttgagacattttggcacaaaccttccttatgttagattgagttcatttgttttaggttggagagctaacggggctactcacgtctgatcttggtgctctgaatagcattgtgaatgataacatctcacgagatcgtggatttagggcatttacagaggcaagccatttctttactatgcaaatgtgagatttttgtgtttgtacatacatttttcataatgaatacagatttaatcttagcctggtgttggtgtctgctgttatttttggagttctataaatgacaaagactatcctgttgcatctcaagaatgcccagttctcatggcttatgcgttatcccttttgtaggtttttggaacaatatgtatcctatttactctatctcctcaacttgcacctgtacttggtctattgatgctagctgtgtcagttctagttggtaaattctctatgtctttttcattctcctaaactttttatttttggtaattactttggtcatctttgcttactttgcttacctctacatctactccctcggtcaaatctcaaaagctgtgtacaagagatcgactgttcctgtttataaatcgcatggattagctcaagcaacaatg

SEQ ID NO: 34022 - DNA, 3000 bp, Unknown; identical to SEQ ID NO: 34021
  misc_feature (1)..( 3000): 2750-1469P.txt file - cDNA_ID_3073948; gDNA_ID_2926187; Annot_ID_200722

SEQ ID NO: 34023 - DNA, 3000 bp, Unknown; identical to SEQ ID NO: 20995
  misc_feature (1)..( 3000): 2750-1469P.txt file - cDNA_ID_3073974; gDNA_ID_1620864; Annot_ID_170431

SEQ ID NO: 34024 - DNA, 3003 bp, Unknown; identical to SEQ ID NO: 20287
  misc_feature (1)..( 3003): 2750-1469P.txt file - cDNA_ID_3073974; gDNA_ID_1620724; Annot_ID_165910

SEQ ID NO: 34025 - DNA, 3003 bp, Unknown; identical to SEQ ID NO: 21047
  misc_feature (1)..( 3003): 2750-1469P.txt file - cDNA_ID_3073978; gDNA_ID_1620724; Annot_ID_165908

SEQ ID NO: 34026 - DNA, 3003 bp, Unknown
  misc_feature (1)..( 3003): 2750-1469P.txt file - cDNA_ID_3073985; gDNA_ID_1620724; Annot_ID_165896
ggcattgcagcttcagagggaaagagtcaggtggcaaatgaagctgatacattgttcttctccaatttgaacaacatccaaaagactactggcgggaaggcatcatcgcagccaaagcgcacgccagtttcaaacgaagaaatggaagccattttggtatgtaacttcattttgacatgtataacaacacttagatgaacatgtatctaacagtataatgtgtgaccaactactaagttataattatgtgaccaattacaagttgagagaacccttttcatgatttaataatattgttctgtttctaacttccttatccttttctgaattttttttacagttgggaggctgcatctgatcatttcaacatgatctgttgacaagaatggtggatcacttctcatctttaccatttacagaatatactcgatagtcaagaagaaactgatatggttgatgtttacaacaaccaatgataacaataaaactactccattgcagtttttaacttctatactgattcatcattgattgagtgcatttgaatctctattattaagtgctttatgattgaaattcatcgtttattcttttttttatatcacatgatgaagctcttttagaaccagtcagaaatattgtagcctaaaacgcaaaggtacgttacatatacattcacaggaacttacatacagagaagagaagatcacttatggtgctgcctcttccttttgcatctgttcgataagaggctcgagaatacaagactttggattcttacccggtggacctttttctcttcgttcaagctcttcaagcctgaaagtaatgagacggtcccagtttcctccttcgaacaagacaccagcttttccatcagtgatcctctgcacaattccacaatacatgtgatacggactgttctggttcttgactatagcaatcatccccggcatgagaaggggtagcttgggcgctttcggcttcttatctgtagcaaccgcggatgcatcgcttccttgttttgcaggtggtggtggtggaggaggtggtggatttttttcgataaacgtttttaaacccttttcgccaccgggaaatcctcctgtgagacccatcatctctttctcgaaaccatcttcaggtactttaaaagacaagttactgtcatcgctctctctctctgtctcgttgttctcagcctttgatgtctcttgctcgtcttcaatgttcctctggagctccttctcaatacctttctctccgttgcataatcctcttcctcccatcacttcccatagattgaatttacccatggcctttacttgatacagttttgactgctgttttggaggcgggaaaaccgaccggtttacagttgaaaattgatgtgtttggcctagaaattttgatcgatgaatcggagttctaatggtcgggatagtgatcgaagaagtcgccataactatttttgcctgcagagtagagtagaggtgactaagggagatatgaagaagatggaagaggaaggaagaagcgtgtgattgattcgcttgttataatgaccacatatcatgatttcagttagatgagttctatctatttccaaattaccagtggacctgaaccggttaatgcgtaaccggtgtttggaataatgatttaggagaaagagtaggaacatttgggctttgtcataagtttaacctggaccaagtttgaatattcttaagagatatgggcctagattaaaaacaatggtaatgtaattaaacatattgctaaatgctaataatgtggatttgtttgtttattaagaaaaaagcagcaagaagaagataaatcatttgggtcaacgacattaataattggaatcccatactcccaaatcataattagacatacacttttgtcttaggctgtcctttacactcatcggcatcaccaaatacttagttggcaactttgatcaattaatgtattaagcatgaatgaaaacaacttttacattgattcgataaattcattatattgtagataagattagtcaaaagtttacaaacattcgttaacaaattacaaaacttgtaatatctgcagcaatgcccatgtgggtagagctggctgacgcaacctaaccgggggataaaagcgtctttttggtaccaaatttaaagtttctttatgagtaaaattcccaaacccaacatcttcttcctgctgaagcagtaagcactcaaccaaaaaaccaattgcgtaaacactttcccttgaatacagagatcacattcgatcaggtaaaaacaaggtctcgatcttctcttcagtcaattttttcaaattattcgaggttcccgtcattcgattccgacttccgagcttctatttctgctcaatgtttttgtattttgttagggtttccagaaaattcgattctgttgtttttaatttgagctaataaaatctagaatgggaaaaagaaagagttcattttcgtcctctttctttttgtagaagctgaactttgtttttcttttacagcgagctgatttctcacaagggatatcaaaatttctggtgaagtgggattgtaaaattcggcgttgaaagatatataaagaggtatgtttgatcctcagtgaggaataaggatttttagtagttatatatctctccaagtgatgatacatacatacttgtggattagatctatgataagaataagcataagatagagactgagagacaagtcatttagggagattaaataatgttcatggaatgctaaagttcatataggagtttgtctcatatcagaatctagattagatcatgctcagatgacatctcttgaatggacaaaaaagtttttaactatgtgattttttcgacttcttttggggaatcaatgtactacaagctgagagttttagagtagtttcatctctggctaagctttgattcattttctagtggaaggttctggagtcgtttcaattcatg

SEQ ID NO: 34027 - DNA, 3003 bp, Unknown; identical to SEQ ID NO: 34026
  misc_feature (1)..( 3003): 2750-1469P.txt file - cDNA_ID_3073985; gDNA_ID_2926184; Annot_ID_200483

SEQ ID NO: 34028 - DNA, 3000 bp, Unknown; identical to SEQ ID NO: 4708
  misc_feature (1)..( 3000): 2750-1469P.txt file - cDNA_ID_3073992; gDNA_ID_1620724; Annot_ID_165888

SEQ ID NO: 34029 - DNA, 3000 bp, Unknown; identical to SEQ ID NO: 4708
  misc_feature (1)..( 3000): 2750-1469P.txt file - cDNA_ID_3073992; gDNA_ID_2926184; Annot_ID_200476

SEQ ID NO: 34030 - DNA, 3000 bp, Unknown; identical to SEQ ID NO: 20306
  misc_feature (1)..( 3000): 2750-1469P.txt file - cDNA_ID_3074020; gDNA_ID_2926149; Annot_ID_197946

SEQ ID NO: 34031 - DNA, 3000 bp, Unknown; identical to SEQ ID NO: 20306
  misc_feature (1)..( 3000): 2750-1469P.txt file - cDNA_ID_3074020; gDNA_ID_1620725; Annot_ID_165925

SEQ ID NO: 34032 - DNA, 3000 bp, Unknown; identical to SEQ ID NO: 4743
  misc_feature (1)..( 3000): 2750-1469P.txt file - cDNA_ID_3074040; gDNA_ID_1620726; Annot_ID_165964

SEQ ID NO: 34033 - DNA, 3000 bp, Unknown; identical to SEQ ID NO: 4742
  misc_feature (1)..( 3000): 2750-1469P.txt file - cDNA_ID_3074044; gDNA_ID_1620726; Annot_ID_165961

SEQ ID NO: 34034 - DNA, 3000 bp, Unknown; identical to SEQ ID NO: 4742
  misc_feature (1)..( 3000): 2750-1469P.txt file - cDNA_ID_3074044; gDNA_ID_2926153; Annot_ID_198212

SEQ ID NO: 34035 - DNA, 3000 bp, Unknown; identical to SEQ ID NO: 4740
  misc_feature (1)..( 3000): 2750-1469P.txt file - cDNA_ID_3074054; gDNA_ID_1620726; Annot_ID_165956

SEQ ID NO: 34036 - DNA, 3000 bp, Unknown; identical to SEQ ID NO: 4740
  misc_feature (1)..( 3000): 2750-1469P.txt file - cDNA_ID_3074054; gDNA_ID_2926153; Annot_ID_198208

SEQ ID NO: 34037 - DNA, 3003 bp, Unknown; identical to SEQ ID NO: 28078
  misc_feature (1)..( 3003): 2750-1469P.txt file - cDNA_ID_3074057; gDNA_ID_1620726; Annot_ID_165955

SEQ ID NO: 34038 - DNA, 3003 bp, Unknown; identical to SEQ ID NO: 28078
  misc_feature (1)..( 3003): 2750-1469P.txt file - cDNA_ID_3074057; gDNA_ID_2926153; Annot_ID_198207

SEQ ID NO: 34039 - DNA, 3003 bp, Unknown
  misc_feature (1)..( 3003): 2750-1469P.txt file - cDNA_ID_3074083; gDNA_ID_1620728; Annot_ID_165994
tggtgcatgacataaacatccctctctctaagagtatatgcaacttctgttgacatgaagtatacatgcattaagcttaagtagtactcatcaacaagctaagttcgtttctatacacccactgacactgagcctctaaaagatcaacacaaaattcactctaataaaaaaatagcactaattggcataattaatcaaaacacgaatgcaattcatttgtaagagaataaagaaaagaaatatgtttaatttatgcggaaaatagtgtggtttaggttcaattttgtatactaattggcatgaatcaaacaaaacacaggcagtttatttggaggaaaaaaaaaaaaaaaagtttaggaggaaaaatcggtgacgcttaggttcaatatgtttatgtgctaattgatggcccatgaagcccaatatgtagcaacggcacatcatttgcctctcgtataaatctcattttcacgtaatattctaaattaattaacaagagattgagagattgagaaagagcgagagagagagagagagcgagagcaagaaactcgagaaagatttactaaaagagcctttattctccccttgatcttcccgcgatttccttcggctgaagaacaatataatggagcgtgagacttcgtcatcttcaactcctccggaggatcttgttacatcgatgatcggaaagttcgtcgctgtcatgtctaacaacgacatacgatacgaaggcgttattagccttctcaatctgcaagattcgaaattaggtctccaaaacggtaacaattcgattccaaaccctctccaagatctactgtttatgattttcttcttttcaagttcttcatatttgtttctttggtcgttgttagaatatttccgtgaaaactatacgtttcatatatataaaacagtatcatgtgatagattaaggcctcaaatttatgtatgcagtcgttagggtttatggaagagaggttgagaatgataatgagcaacgagtgttccaggttcttaaagaagttcacagtcacatggtatttagaggaagtgacattaaggttagttttcgttaattttttgggttcaagattcctcgctagtcttcttcctagttagttgcttgctgcacaagaaacacttttcttgaagcttaaactggttattttaattgcaccaatagcagataacgaagcacacgttactgtgtttagatttcgaggttagttagtttagggtttgagggtcgttaatgataaatcatctacttggttacttgctatataagataagtttttttttatataaagttatatatattcagtatttgtgacattagtttgttggtttttgtgtccatatgtttcagtcagtcgaagttctctctctgccgccaccagctaggcataattctgctatagggcacgtaggtagcttgattactaccgaagacgtgaggattgagggggttatcagccatgttaaatttcatgattcgatgatattcatgaagaattgtgagaacctttttttcctgatttctattctactaataaataaatatatatataatgttgattcattttaatttacaggtatgtgttatggtactgaggggaggacgaagagaagacgttcaatagtagcttgcaatcaattagctggttcaatccacttcaaattcagagacattaaagtacgtggaccaatacttactcatgcatacatatttgattaattagtttgtgtactgtacaatttacgatcaatctacaatttacaggctctcgaaatcatctttgttcgggaacttctacacaatgatgatcgtgagtttgctgatcagtttcctctactaagtagatcacacatttgtcatcgccaaggtggcgtctgatagtctcatgccaaggcacagcctctttcacatgataattagagacgacgagagaagaagtattagagaggctgctccttgatttgtgtagaataaaacatatacctaattattaatggatttacatggtttttctacgtgtgcattatttggttgactccaattatttaacaattgcatatttgtctcaggtctcatttagcaactaggtaatgtaggaatttaaatagctctataacctactttttaattgtttttttggtgaaacttttttctcataacatggtttttttttttttttttggtttaacggatatcttctcgtaacatatgttcttctcacatgttaacactaaagcagacacaagaaaacaaattagtacgttacgttgttgcatgtgttattttgatggctaactggaaaaatacaagtcgttgtgattagccatccaatgggcctctaaaaataatgacttggtaaaactagacaacccaaaatcacaaaacaaatattctcttcttctattaagtaaaaaaaaaaatcttattaaaatctggtttaaatgtttgttcattcaaataaataatggagtgtattttagaatcaaataaaaaaaaactttatcaaatgatttatttggtagataacaaccaaatcttgagctaaaaagggtgaaaaaatattgagaattttgttaataagtaaatagttatggttttgactgggtataggagatatatctaggctggtgaaaaaaaaaagaaaaaaaaggatatatctaggctttaaaatattcacatgcatacaatcagattttcatcggtgttcgataagaaaacaaaaagcaagtgtttgttttgtaaaaaactaatggcatacttaagcttcaagtctaatatggaaccaccacggggatataggagatatatctaggctggtgaaaaacagaaaagcaaaaaaaaaggagagttaatctaggctggtgaaaaaaaaaaggatatatctaggctataaaatattcacatgcatacaataagattttgatcggtgttcgattagaaaacaaaaagcaagtgtttgttttgtaaaaaaactaatg

SEQ ID NO: 34040 - DNA, 3003 bp, Unknown; identical to SEQ ID NO: 34039
  misc_feature (1)..( 3003): 2750-1469P.txt file - cDNA_ID_3074083; gDNA_ID_2926173; Annot_ID_199665

SEQ ID NO: 34041 - DNA, 3003 bp, Unknown
  misc_feature (1)..( 3003): 2750-1469P.txt file - cDNA_ID_3074102; gDNA_ID_1620728; Annot_ID_165983
cgtcgtaaagatcggaagtgatggtcgacggtgaagcacctgggaaaaacacctgccagcaatgaagctcgtcgtgtgtcgtcgacgttttcaccggaaaaggcacaactgatggtccaagagaatctcctgccatcaacgaaatccagtgagaaggaactaaaggcgttaccgctaatagggcagatctggagccaaaggatgtgtcgatgaaaaactgctctagaattttggaaagggcgatgatgaagaagtgcgattcttctcttgtcgggttcaaaggcggatctgcgtctgagttatgattcggggcaaggcttgtagagtaaacattcactcttccgtcgcaaagaagaccctaagagaagaagactaaaggaaatgaaagttttggattttgcacgagagaagaacttaacggagagaaaaaccaagaccagaagcttaagaaagactgaaacaggctaagaagattttgcaggtcccgacgccagcgaacatgagtctcaccggcgccggaaagcatgtttacagaagatgtcttgattaccgtgtctgggagagaacgaagctttttatttttacccatcataatctctaaattatacaaattcttaaaatttattactataaatttttaaagagactctctcaagggcttagagcaaccccaatggtttagaaccaattggttcttaattttcaattttaaccttattttaaattaaaatgttacttttactaagttaagaaaagttaagaagaagctgaattaatttttactccaatggttaagaactattgaattcctaaaagacaacaattcaaactatttcaaaacaatgtctacccactcaaaacacaacacatatactcttcttaattttaagaaaacatcttaactaagatgtttatcttagctaagacttgttggtttcattaaatttaatcagttttatagctaagaattagttaagatacaaagttgaggttgttcttaccattgaacatgctctaagattaccttgtaacataaaaagacacttaccttgttaatattattattatattccttcaatatcacactcaacattcattttttaacaagtatatatgtgaggtgcactaaaaaaaaaaaaaaaaaaaagaaaaaacaagtatatatgtgtataaacactcacacacgaaatgatatcatttctctgacattaacattaatcactttaaaatttgatagaacaaaccatttatctatgaagtgtgatgattcatatggtcggtagaaagtacacaatcacaaggggttgtttgttgagtgacttgagtcccagtcatccattactaatgtctactgatacaccaacagtttgattttatttattcagaaagaatatagatcattttactattttagggggaaaatatgtgtaaagtcacacgatgatcatttctcaacaaatcttatggttgtgataaaagtcacaatgtgtttgtttatctaataacttatgaacatcttttctaaccttctacaatacgtttgtatgaattataaaatcgaactaaaaccaaagtgtgctcatctttttttttttttttgtcgaaagtgtgtactcatcttaagcattttttgtgttttgttttgttttaatatgtttttgcatgtttttttgataattaccttaatcgaaccagttaaccaaaacacaatgaaaaaaaaactggtttaatccagcttctcagtagtgatttacacagtgaagcgatctagagttgttactagattgataagactctaataaagcaaatatacaaatgcagggaacgcaaaagcggcaaacacacactttttcattgcaattgtcttgaaactatttctcggagaacaagtgcaagtgtgtcggggaaaatcaaaaacgattaatcaacgttcaaaatcctcaaattcgttttgaaaacaactacatcaagacgaatatcatggtaatataaaagtcgccagtttagttctcacgtttctcacattcaaaaagaaaattaaatcgaaaaccgttttaacagaaagaagaagattgaaatagtaacggtcaaaccggtttagactgggttggatatattattttagttaaataaagggattggtgtacaagttgtcggaaattgatcctatacttaaccctacttgagagacgagagtggagaagatgagaagagactgcaacaaagagagaaaaagagatcgtagaagaggaagaagaagaaaaaaaaaaagaaaaaaaaagaaagaaaaagaaaagaaagctttgtcgtaggaagaagaagaattagaaagaagaaagagacaaatggccgatgtgttatatgttaagtggactgttttgtgtgttgttaagacaaaactatagtttgagatgatcaagaacacaaagatttaagaataactctctttattagtttaggaaaattactcaaaacctaaactctcttgtttctcaatctctcaactcataagttatgcaacacacttgcatctccttatatagagatctcttaaacaatcctaatcataacttaatttagataactcttaaatattctctagatatctccaagagtttatagtcctaacctctctaggatttaatgacttagtgctcaagtcatattcaaacttaactcaacaaaaacaattaagctaagtaagttaaaagtagaagtagtataaatatgcttctaatgaatcaagacaagttaaggttcctaccttggaacccgaaaaccatgtgtttatgtctgccttcaatctcccacccatccttttgatcgtagatggttcggtctctggataaaaccctatgatcatcagcccctaacccattggacgatcgacatcaagtgtaccggacattggttgctaccgatgccctctccctattctcgttgcttacaaatagtccacgaaactgttggttcagaacatacgaaatcggtggacaaaacatg

SEQ ID NO: 34042 - DNA, 3000 bp, Unknown; identical to SEQ ID NO: 20341
  misc_feature (1)..( 3000): 2750-1469P.txt file - cDNA_ID_3074135; gDNA_ID_2926148; Annot_ID_197875

SEQ ID NO: 34043 - DNA, 3000 bp, Unknown; identical to SEQ ID NO: 3853
  misc_feature (1)..( 3000): 2750-1469P.txt file - cDNA_ID_3074135; gDNA_ID_1620729; Annot_ID_166057

SEQ ID NO: 34044 - DNA, 3000 bp, Unknown; identical to SEQ ID NO: 20343
  misc_feature (1)..( 3000): 2750-1469P.txt file - cDNA_ID_3074137; gDNA_ID_2926148; Annot_ID_197874

SEQ ID NO: 34045 - DNA, 3000 bp, Unknown; identical to SEQ ID NO: 3858
  misc_feature (1)..( 3000): 2750-1469P.txt file - cDNA_ID_3074137; gDNA_ID_1620729; Annot_ID_166056

SEQ ID NO: 34046 - DNA, 3000 bp, Unknown
  misc_feature (1)..( 3000): 2750-1469P.txt file - cDNA_ID_3074141; gDNA_ID_2926148; Annot_ID_197868
ccccagaagtttatgtcctactcaagaatctcaaactttagtatcgttgccattgaaatgtgatcaaatcacgatacaaacaccgaagatacacataccagcaaatgtggaaacacagtcgtgtcactcacttcctcaaagtaaaaagtgtgtccaagactcgctgtattcactagatgatccactgcatcgaattcatcatcaagcacaaacaacattttcgttaaaaccaaaaatattgcttgacctacaagttaacctatccttcgcattttatgtggtaatggcgagaaagtagtgtaccgcggccgtaatagttgacggcttgggtgataaaacggcggcagtcatcttctttgatgacatcagcagcgatgatgatcacatggttggctccaatctgtttagccttattactcacaactctcagtctctgctctctcctcgccaccaacaccaaattcgctcctctttttgcatattcatatgctatttgctgcgttccatttcattaccaagatcatcagcatccatgcaaaattgagaaactcatgataaacataatctcacttaacctatgatcggcctttgacaacatatgtattatgacctccctctccaaaaacatatttgctaaccaagttattcatcgatttgtttgtaattaagaattttaacaaagcaacaccatatattttgaaaatacaataaccattttgtaggaattaatatggttttaaagaaaataattttgcaggagagtaagtagttttattcttaattttagtacctctccaatggccgatgaagctccggtgatgacaactactttatcttccatattttcggtggcgaaataagagttgtaagcccgttcggagaagctaatgaaagacagtaatggccatgcaaaggccatcaccaccatggtcgctggaggcgccaccaggttcatcaccgagttcaatagatccaccatttttctcttcactttcgaaaataacaagagatgtttagtgaggctatagaaacgaagaagaaagataggaggaatgcagttaaattaaaatggagtttttttctttgttgagaatatgaaaatattaatatttgtggggcggattttgacgtatagtgatggatggtgaacaacatggctgcatgcagactgaggtacagagccacgtgcttgttcctttgagttttagataagataaaaccgtgaagctcatgttccggtttaatccgggttggctgttttgcatctggttgactggttcaataagttcgtgctacgtacacatgctccatttgaaataaagattcggttattggtttcttggtcttataagtgtaacccaccaaaagtatttaacaatttttcctgtaacgtttttaatatatgtttccttggtcttagtcggatattgatttatgcatacgtacaagctccatttgaacctcacttttagtgggtctatgggcggccataagtaagacctagtttatacttaattagttaatgttggttctctctactgttaatctttacttaacaagaaactttgatcagacagatcataggttataataattctcttaaaatgttgcaaacaagagactatcccaaggccgtgcttaatgtgatacaaaataaggcatgagcttctgaaatctggacccaatcagtacatatatgagttttgaaatgatcattgctacaacaaaaggttttagaagttcttattatttttattttgtttcaaggattaagttttatggtgtttgatttgaaatcaatgcatgatttctatagacaaagagatcatgagcttctagaagatatagatacattatgaaggtgtttttctttttctattttgcaagagtctctcacttcacaagatatccttttgaaaatttccacctcgtagtttataactagttgatattttaaaaaaaaagaatcatataactagttgatatcaatgtcgttatgcagtctcttatcattgtgcaacatacatttattttctaataatctactcgacgatgtcgaggacaatgtagatactttgtgggagacttgaacttagaagagtctttgggataaatgttcttgcaggtagatgaaaatatatcaagtgggacccacgatctccgacaaaacatcctacgtgggtcattgtcgtaacaacaacaaacaaaacaacttcattttcgaccgttggatcaaatcttcacttcatgcaaattcgttagtctgtttcctaacatttcaaaaatagaaaaagatgagatattgtgagttgtcttcttccggagaatctagggcttctccataatttccggcgacacaaaaaccaaatcccatctctcctgattcctaaagaaatttccatatcagaattaactacattctgttcgtcatttttctctttccgcattttccgttatcgacgaacagaatttgctgcaacgttttttctatcttgcagtgagataacggaaaaaaaaacacagaggatttctgaaatttctcttgtttcttgaatcacaagtcttctcttctctgatttttaatctctcttattgtattttggtgtttagctttctgaattttgctattgctttgcctccaaagtctttttaattctctccttcctctgcttcttagttctttctctcatcatctctctcgtttcttgaaccacaagtcttcttttctctgcctccaaagtctttaatcctcattgtttctaggttttaaaagatcttcttcctattcatttgggatcatataagatcaaaagatccctgacacataacatttgaagagaattgcattaattttcttagaggaggagcaaaatctgatcgtcctcctctgtgtctttagctaataaacctgagattcctgagttttatgcttaggaatcattcaggataagatttgttcttgatgcgaaaaaaatcgtgaaacggtctttgagtattatg

SEQ ID NO: 34047 - DNA, 3000 bp, Unknown; identical to SEQ ID NO: 34046
  misc_feature (1)..( 3000): 2750-1469P.txt file - cDNA_ID_3074141; gDNA_ID_1620729; Annot_ID_166044

SEQ ID NO: 34048 - DNA, 3003 bp, Unknown; identical to SEQ ID NO: 21111
  misc_feature (1)..( 3003): 2750-1469P.txt file - cDNA_ID_3074179; gDNA_ID_1620730; Annot_ID_166098

SEQ ID NO: 34049 - DNA, 3003 bp, Unknown; identical to SEQ ID NO: 21111
  misc_feature (1)..( 3003): 2750-1469P.txt file - cDNA_ID_3074179; gDNA_ID_2926158; Annot_ID_198540

SEQ ID NO: 34050 - DNA, 3000 bp, Unknown; identical to SEQ ID NO: 4776
  misc_feature (1)..( 3000): 2750-1469P.txt file - cDNA_ID_3074187; gDNA_ID_1620730; Annot_ID_166096

SEQ ID NO: 34051 - DNA, 3000 bp, Unknown; identical to SEQ ID NO: 4776
  misc_feature (1)..( 3000): 2750-1469P.txt file - cDNA_ID_3074187; gDNA_ID_2926157; Annot_ID_198528

SEQ ID NO: 34052 - DNA, 3000 bp, Unknown; identical to SEQ ID NO: 4774
  misc_feature (1)..( 3000): 2750-1469P.txt file - cDNA_ID_3074193; gDNA_ID_1620730; Annot_ID_166091

SEQ ID NO: 34053 - DNA, 3000 bp, Unknown; identical to SEQ ID NO: 4773
  misc_feature (1)..( 3000): 2750-1469P.txt file - cDNA_ID_3074199; gDNA_ID_1620730; Annot_ID_166086

SEQ ID NO: 34054 - DNA, 3000 bp, Unknown; identical to SEQ ID NO: 4773
  misc_feature (1)..( 3000): 2750-1469P.txt file - cDNA_ID_3074199; gDNA_ID_2926157; Annot_ID_198521

SEQ ID NO: 34055 - DNA, 3003 bp, Unknown; identical to SEQ ID NO: 27500
  misc_feature (1)..( 3003): 2750-1469P.txt file - cDNA_ID_3074203; gDNA_ID_1620730; Annot_ID_166082

SEQ ID NO: 34056 - DNA, 3000 bp, Unknown; identical to SEQ ID NO: 3325
  misc_feature (1)..( 3000): 2750-1469P.txt file - cDNA_ID_3074219; gDNA_ID_1620732; Annot_ID_166129

SEQ ID NO: 34057 - DNA, 3000 bp, Unknown; identical to SEQ ID NO: 3325
  misc_feature (1)..( 3000): 2750-1469P.txt file - cDNA_ID_3074219; gDNA_ID_1620640; Annot_ID_163010

SEQ ID NO: 34058 - DNA, 3000 bp, Unknown; identical to SEQ ID NO: 3325
  misc_feature (1)..( 3000): 2750-1469P.txt file - cDNA_ID_3074219; gDNA_ID_2926178; Annot_ID_199984

SEQ ID NO: 34059 - DNA, 3000 bp, Unknown; identical to SEQ ID NO: 3324
  misc_feature (1)..( 3000): 2750-1469P.txt file - cDNA_ID_3074222; gDNA_ID_1620732; Annot_ID_166128

SEQ ID NO: 34060 - DNA, 3000 bp, Unknown; identical to SEQ ID NO: 3324
  misc_feature (1)..( 3000): 2750-1469P.txt file - cDNA_ID_3074222; gDNA_ID_1620640; Annot_ID_163009

SEQ ID NO: 34061 - DNA, 3000 bp, Unknown; identical to SEQ ID NO: 3324
  misc_feature (1)..( 3000): 2750-1469P.txt file - cDNA_ID_3074222; gDNA_ID_2926178; Annot_ID_199983

SEQ ID NO: 34062 - DNA, 3003 bp, Unknown
  misc_feature (1)..( 3003): 2750-1469P.txt file - cDNA_ID_3074235; gDNA_ID_1620732; Annot_ID_166113
agacacccaccaagaaaattagccgttacatgggctaacaccaaaaggatgcacgcagctaaaccgtacttgaaggctgtgtaactcgggtctctacactcgaatatccacatcttcaaatgcttcacctgcacccgaaaataaacaaattagtgaaatctgcatctcctatcgacttgtggctgtgtaatgtaccttgttctgagctatttcggcttcaatgccgagaattccagccgaaacatccatggctaggatcaagatgcagatgaagaaccctacattcctcgccattgtcgatgaaacaagttcttactagcaaacaaagaagcaggaagtattgttgttgaagtaataacttgttcttgtaatttataggcaattagagttttaagctttgagagactctcttcgttggatggaataagaataaagttcaacataagtttccttttcttgcatttgtactaaagatcatgttaagagaataaaatttagctgggatcctctctttttcaggagaaaattttaacttttataaaatcatatttgatgtttctgaggaattgaagaagtttattagtaatgtgcaatgtcctcgaaaagatttgttttctttattcctctcttccattccatgtttaataataaaaccttttcaatattcgattcttgacagagcagccaagcaaagaagaggacgtttgcgttttgaatcgctgttgaagacaaaaatttcgttttccagtcgctctggcccaataaatttaagtgggcctttacagagacttatcctaaatcccgtctcgttgatgataatgacgtggctacgtacaaaagagtaacaaattcgagaacatgacgtggcatatttctctagaagcagctccattcttcgacttggacatttgtcttcttaaaagttttcgagaaatgttcgattcttcgagagttcgaattctcaggagaagaagaagaagaagaagtgaacagagaaaatggcggcttactacagatggaagagtttcgaggagaacgaagatcgtccagagaagcctcgccgttacggtgttacggagatgcgaggtcctcattactccgttctcagccagaaccttcttcaggtccctacacgttaattattccggttatgattcacaattttgcttgagattaaaccgaacatttagcggatttaggctcttacaaatttggttaatcgttttgttaggaaatttttgaatcgatgggacagtttgttgatgggttaaagttctctggaggatccaacagtttgattccaaaatcattcatcaaacaagctattgaaatggctcatgaacatggtgtttatgttagcactggtgattgggctgaacatatgcttcgtagtggtccttcagctttcaaagactatgtggaggtaaaaatctttgacattccataggaaatggttggtattggagaagaattaggtttttgtgaggttaaattgtgttttatggcgcaggagtgtaagcagttggggtttgacactattgagctgaatgcaaatttgcttgaagttcctgaggaaactcttctacgatatgtacgtttgattaagaacggtggtctcagagccaaaccaatgtttgctgtgaaattcaacaagtctgatattcctggtaggaatagagcatttggttcctatgttgttccagaacctcggtcaagcggtaagaagaaacaactaggagttatttgttggatttgcagtgagagtttcagatttatatgcttactgtgagaatgcctttgtttcacagagtttgtggaggacatagatctcttgatcagaaaggctgaacggtgtttagaagccggggcagacactattatgatagatgcggatgatgtctgcaaatacgcggattcccttcgagcagacataattgctaaagtcataggacgtttgggaatagagaagactatgtttgaagcatctgatgcgaagttggttgagtggttcatcaaacgttatggtccaaatgtatttgctgatactctagtcctctctattatttttaaccttctgtttgaatggtcaccctcacaagattcatatctcttcgtcttggtttttcaggtgaatctctatgtggatcattctcagattatggatctcgagtgcctccgtggtcgtcatctgggtaaagatcaccaatctgttctcagttcctcctacttcttgttttaaagtagtagctctcgcactacatctagtgttgtgtgaatttcctatatatgtattatgtcgtatgtgtctgatgttatgtgcttctttgatgctgtaagaatgcaaatgttttgagaataatgtgatatgcgatttttcggtgatcacataatatcttggtccatctcctaagttaagtctctcagaattgatacaacctagtatagtaataatcgtaagccttggttgttctcgtatgtcttatattattaagagttttactcactgaaacacgtgagcaataaaataagctgttcattatcctttaagttatgaacccaagatatcaattctgtaaccatgctttgtactattttgatagaaacctctctgtaatatcttttgaaaatagagaagactcataaattcctaccaatcataatcagtggcctaattttaccccaacacatgtgtcatgatgaaatttcagtatatttttttgcaactattgtaaccatagtcatcataattatattctaaatatagcttgtgcctaactgtcatatgacaatagcacctattttcgtacgttgatttttgtgcttgttagtagttacaacgtttatttactgcaagatacaatcagtatgtgtattaattggttattctgtcattttttggagccaaagtttgttaatcagtttagcttaaaaagtaaaaacaatggagatctatctataaaacaaggaaaatcttttgagaacgaacactttcgttgaaaaatg

SEQ ID NO: 34063 - DNA, 3003 bp, Unknown; identical to SEQ ID NO: 34062
  misc_feature (1)..( 3003): 2750-1469P.txt file - cDNA_ID_3074235; gDNA_ID_2926177; Annot_ID_199960

SEQ ID NO: 34064 - DNA, 3003 bp, Unknown; identical to SEQ ID NO: 23190
  misc_feature (1)..( 3003): 2750-1469P.txt file - cDNA_ID_3074263; gDNA_ID_1620733; Annot_ID_166148

SEQ ID NO: 34065 - DNA, 3 bp, Unknown
  misc_feature (1)..( 3): 2750-1469P.txt file - cDNA_ID_3074273; gDNA_ID_1620733; Annot_ID_166138
aag

SEQ ID NO: 34066 - DNA, 3003 bp, Unknown
  misc_feature (1)..( 3003): 2750-1469P.txt file - cDNA_ID_3074273; gDNA_ID_1620635; Annot_ID_162875
ttgtatagtttgattgattgtttctgtagtttatttctgggtttagttagttgtgttgcaatttctgaccttttgtttgaaatgggattatgattggtaggttcaactgataaggatccaaatgagagtgcctgagtatggttggactactcagaaggtgtttcatcttatgaactttgtcgtcaatggaggtgattattgtgtgtttctattgaccaattgatagggtttttgtgtttgtcagcacctttgggattatgttttgttgaatttctctgttgtgtgtgtgcagttcgtgcggttctgtttggatttcacatgcaagtatttcttgttcatcccaaggtgagagtgttctcaacttagttctggtttttgcatgtttgatttggaaatggtggattttgaaagctgcatctttttaagtatctaatgtttctgtgaggtaatgcaggctctttgctgggtactattggatcttcctggccttctctttttctcggcatacacgctgcttgtgctgttctgggcagagatatatcaccaggtacctaaaaagaaatttttgatgtgtgttgactgtcttttaaacctgccaacaagctctgagtatatattttgttgccactaatgagcaggctagaagcttacctacagataagctgcggataacctatatttctgtcaacgtggctgtatatttggctcaggttcatatctgatttttagcttcttttttttttaattcccgtttatgttgtagttgctgagtttcctgagatccatttatatacatcttttgcaattattggtgtttcgaaactgtagattgtgcgtgtttcctaccttgtccttctttcattaactctgtaaccattctttgctaccaagaatctgtgtgaccttagtcactagacattttaggtgaatcaaaagatgtagaataagtttgacatgtatttgatgtctctatcagattggtatctgggcatacatctgggtacatgataacagcactgtggagttagttggaaagatatttatcgcaggtaggttctttgtctggtcaagcaagtttgctaaaacctttactgcttaatctataatattccctctcttatctaaaatctatattgacctattcttttggttaatcttcttcttctagttgtgtctttcatcgccgcattaggcttcttgctgtatggaggaaggtctgtgtttttgttattttcatatgtctcatcatcaaaatgtctgcaagttcttcattggctttactgggccgtcttttcttatgtgtttttttttatgccatagattgtttttcatgctaagaaggttccctatcgagtcaaaaggaagaaggaagaaactccacgaggtacttagattcatatatctgtatgtgaataatttgtcttatatagttccataaaactttgaacccaaacatttctaccttcaaatattcgtctcttttcattgcaggttggatctgtgacagctatatgcttcacctgcttcctcataagatgcgttgtggtaagctcaaaattaaatctttagcttccgtcattgttttagttatcctgtgatgtgttatttaatgtattccatgcaaacatcaggtggctgtatcagcttttgacaaggatttaacacttgatgttcttgatcatccggttctgaacttaatctactatatggtaagtaacactacatcttcattctttctctttcttattctcattcattaactcgaaaaaaaaaaaactacaggtggtagaagtacttccatcggcactagtcctcttcattctccgaaagctacctccaaagagagtatcagctcaataccatccgatccagtagaaacctttgtcactgaaccatctcacacggtgagtatgatgctgtttaagagaagagtaaagattaaaaaaaaaattggggcaaaaaatgaaaggtgaagaagaaatcggtgtggaatctgcgtgagtttttggaatgcacgttcatataaatgattttacagcttttagttgttgtagcccgccgtgacttttggtttggtagtttatgtctgttaaaattataaattgctcttctgctactttgaaaaatctggtcagtagtacaagaggtttaacatttgttgcgtcgatggttgattgttatgttatgtttggtaaaaaataaacgaatgctcttctccagtttcctttatgcttttgtcaactgttacatcttcttctcctaatgatttgtatatacttaagcttttccataaaactaagtcccagtgaagaaagaaactacgtaaaccgagaaaaccaagcaaaaagagggtttacacaacataaaatgattaaattgagaatcatttgcattacctcggtattacatgggctggaaataacttattgggccttggacctgattttccaaaaatggtcgctcacattaatatttatatgtgattttacagtgacaactccacaaatcagccctaactctgtttttgttttcttcgacgactgaggtcttttctctctcgctctcgtcttcctcttgattctcttcttcttttctggagtttcgctgcttttttagcctgtaaaaatgacgaaaattttgtatgaatttgtgtgctgatatgctcgaatccacatgttacgcttgtgttgaataatcatatcatttggttatcgaatcaattctagttccaatttacaaaaatctatcaaactctttacgttttctggagtatgttgagcttgaaactagtgacatagatgaaacattaaaaaaacatggaattgttaagtttgtgaaaattggattcgtctttgtgattctttattctttgtctttgctgtgatatataaagattttgtatagaacaacaatttgggagatggagacactgaaattgctgtatttgggattattggcagataaaagattcatacaagaaaaaagcaaatttcgccactgatg

SEQ ID NO: 34067 - DNA, 3003 bp, Unknown; identical to SEQ ID NO: 34066
  misc_feature (1)..( 3003): 2750-1469P.txt file - cDNA_ID_3074273; gDNA_ID_2926178; Annot_ID_200028

SEQ ID NO: 34068 - DNA, 1242 bp, Unknown
  misc_feature (1)..( 1242): 2750-1469P.txt file - cDNA_ID_3074273; gDNA_ID_2926179; Annot_ID_200052
tcgaaaaaaaaaaaactacaggtggtagaagtacttccatcggcactagtcctcttcattctccgaaagctacctccaaagagagtatcagctcaataccatccgatccagtagaaacctttgtcactgaaccatctcacacggtgagtatgatgctgtttaagagaagagtaaagattaaaaaaaaaattggggcaaaaaatgaaaggtgaagaagaaatcggtgtggaatctgcgtgagtttttggaatgcacgttcatataaatgattttacagcttttagttgttgtagcccgccgtgacttttggtttggtagtttatgtctgttaaaattataaattgctcttctgctactttgaaaaatctggtcagtagtacaagaggtttaacatttgttgcgtcgatggttgattgttatgttatgtttggtaaaaaataaacgaatgctcttctccagtttcctttatgcttttgtcaactgttacatcttcttctcctaatgatttgtatatacttaagcttttccataaaactaagtcccagtgaagaaagaaactacgtaaaccgagaaaaccaagcaaaaagagggtttacacaacataaaatgattaaattgagaatcatttgcattacctcggtattacatgggctggaaataacttattgggccttggacctgattttccaaaaatggtcgctcacattaatatttatatgtgattttacagtgacaactccacaaatcagccctaactctgtttttgttttcttcgacgactgaggtcttttctctctcgctctcgtcttcctcttgattctcttcttcttttctggagtttcgctgcttttttagcctgtaaaaatgacgaaaattttgtatgaatttgtgtgctgatatgctcgaatccacatgttacgcttgtgttgaataatcatatcatttggttatcgaatcaattctagttccaatttacaaaaatctatcaaactctttacgttttctggagtatgttgagcttgaaactagtgacatagatgaaacattaaaaaaacatggaattgttaagtttgtgaaaattggattcgtctttgtgattctttattctttgtctttgctgtgatatataaagattttgtatagaacaacaatttgggagatggagacactgaaattgctgtatttgggattattggcagataaaagattcatacaagaaaaaagcaaatttcgccactgatg

SEQ ID NO: 34069 - DNA, 3003 bp, Unknown; identical to SEQ ID NO: 20400
  misc_feature (1)..( 3003): 2750-1469P.txt file - cDNA_ID_3074285; gDNA_ID_1620734; Annot_ID_166201

SEQ ID NO: 34070 - DNA, 3003 bp, Unknown; identical to SEQ ID NO: 20400
  misc_feature (1)..( 3003): 2750-1469P.txt file - cDNA_ID_3074285; gDNA_ID_2926217; Annot_ID_203030

SEQ ID NO: 34071 - DNA, 3000 bp, Unknown; identical to SEQ ID NO: 20402
  misc_feature (1)..( 3000): 2750-1469P.txt file - cDNA_ID_3074289; gDNA_ID_1620734; Annot_ID_166200

SEQ ID NO: 34072 - DNA, 3000 bp, Unknown; identical to SEQ ID NO: 20402
  misc_feature (1)..( 3000): 2750-1469P.txt file - cDNA_ID_3074289; gDNA_ID_2926217; Annot_ID_203029

SEQ ID NO: 34073 - DNA, 3000 bp, Unknown; identical to SEQ ID NO: 4825
  misc_feature (1)..( 3000): 2750-1469P.txt file - cDNA_ID_3074293; gDNA_ID_1620734; Annot_ID_166198

SEQ ID NO: 34074 - DNA, 3000 bp, Unknown; identical to SEQ ID NO: 4825
  misc_feature (1)..( 3000): 2750-1469P.txt file - cDNA_ID_3074293; gDNA_ID_2926217; Annot_ID_203027

SEQ ID NO: 34075 - DNA, 3000 bp, Unknown; identical to SEQ ID NO: 33630
  misc_feature (1)..( 3000): 2750-1469P.txt file - cDNA_ID_3074297; gDNA_ID_1620734; Annot_ID_166191

SEQ ID NO: 34076 - DNA, 3000 bp, Unknown; identical to SEQ ID NO: 3528
  misc_feature (1)..( 3000): 2750-1469P.txt file - cDNA_ID_3074301; gDNA_ID_1620649; Annot_ID_47699

SEQ ID NO: 34077 - DNA, 3000 bp, Unknown; identical to SEQ ID NO: 4828
  misc_feature (1)..( 3000): 2750-1469P.txt file - cDNA_ID_3074301; gDNA_ID_1620734; Annot_ID_166186

SEQ ID NO: 34078 - DNA, 3000 bp, Unknown; identical to SEQ ID NO: 3528
  misc_feature (1)..( 3000): 2750-1469P.txt file - cDNA_ID_3074301; gDNA_ID_1620649; Annot_ID_163404

SEQ ID NO: 34079 - DNA, 3000 bp, Unknown; identical to SEQ ID NO: 3528
  misc_feature (1)..( 3000): 2750-1469P.txt file - cDNA_ID_3074301; gDNA_ID_2926215; Annot_ID_142202

SEQ ID NO: 34080 - DNA, 3000 bp, Unknown; identical to SEQ ID NO: 3528
  misc_feature (1)..( 3000): 2750-1469P.txt file - cDNA_ID_3074301; gDNA_ID_2926215; Annot_ID_202942

SEQ ID NO: 34081 - DNA, 3003 bp, Unknown
  misc_feature (1)..( 3003): 2750-1469P.txt file - cDNA_ID_3074336; gDNA_ID_1620735; Annot_ID_166227
ccaatgaccgattgattgtatcatcatcaaaatgaaaaatgcgtggatattgtaaaaataaaaattttagttgacaaactcatgtcatgcgacataactcattgggtcaggcaaaatactacattcgaatccaaatctggcaattatagctagcactattccttgtatcaaaccggtaataaagctagaggtaaagttggcaaacatagatagtttataaacaactatgctttcggatatcattggtcttctttttgacttacattcatattatataatgttgttgcaagtatatgatatgtttcgaatgaaaagaaaaaaagtttcgaatgaccaatcttctcttctcgatcaataattggattttgctggtaaatgaattatttactatatatcttctttgatacgtctcttcttatttaaatgacataaaacaaatacaataatccaaattttaggcacgtcaacattattaactcttaagtggacataaataatctcactcttgacggtctttcaaaggtattgtattagcatgaaattctatattaattcttaacatttacctttatcttgtttttgttcctaagaacgttttctaaaattctccaaaatgggcccaaaagtatgaaatccaaattgagcccaaagttgtgatccagtgaaacgataaagctctcacgaggttcaagctcccacaagctcagatcgtgggcggtaaaagaaacggttaactaattgtaaaaaatgatttttttttttctacttcactaaaatattacagttttttttagcaaaagtaaaagtttcgagaaactctgaaaaagcagttttcaatcttaggagcagtgtatgtgtcatgtacatcgagatggagaattttcgttacctgaaatttttcttcttcttcatctttgtaatattatctccttctgaagcaggaaatatagtagacaaaagctctgttttccttgttgatgtccgtagctttggtgctcgagctaatgaccacagagaccacaccaaggtttttttcaaacaacattagatctgtgttttttgtttttgtttttggtagattcatctgtttagttacaataaatcagctaataacttgatgttttaaaaggcctttgtagcagcatgggacaaagcatgcaaatcatcttcaagctctgtgaatcttataatcccaagaggtgaattctctgttggttctctcagattctctggtccttgcactaatgtatccaatctcactgtccgagttaaggtagttttatcaacactctccaaaatctgtctttgttgcgttgtgtgcttgatttaatgctttctttctgtccacgtaactgaaattagggtcatctcaaggcatcaactgatctgtcaaagtatagatcaggcggtggttggattcagtttggatggatcaatggcttaactcttaccggaggtggaacatttgacggtcaaggcgctttagcttggccgtttaataactgtacttctgattctaactgcaaactccttccaactgtgagattaactctacaaacattgaatttgatcttaaggttttctccttttttaaagtatattaattgatttcagagcttgaagtttgtggggatgaacagaacagttgtgagaaggataagctcagtgaatagcaagttctttcatatagcattagtagaatgcagagacttcaaagggacaagactcaacatcactgctccttctgatagtccaaatacagatggtatacatatcgaacgcagttcgaatgtgtatttctcgcgttcacatatcgcaactggagatgattgtgtctcgataggacaaggaaattctcagattacaatcacaagtatcaaatgtggaccaggacatggtatcaggtaaaaatataacagaaccgcttcttttttttggtctgtttctgctgttgagtttattaaacggtttgatttcttgcgtttcaagcgttgggagtttagggagatatccaaatgagaaagatgttaatggactggtggtgaaggattgcaagataagcggtacgacgaatgggataaggatcaaaacttgggctaattctcctggtctaagtgctgctaccaacatgacttttgagaatattattatgaacaatgtgactaatccaatcatcattgatcagtcttattgtcctttctcttcttgcatttcaaatgtgagtcttctttaacactcaaataagatttttttactgaaatgggtatgagagatttgtttttgatatattttgttgttgtaggtaccttcaaaggttgagctgagtgagatatacttcaagaatataagagggacatcatcttcactggtcgcggtgcagctgcattgtagcagaggaatgccatgtaaaaaagtgtacttagagaatgttcatcttgatctttcttcgtctgatggaggaagaaaacagagtagtaacagaggaaatgaagctgtctcttcttcttgtagaaacgttagagctaattacattgggactcaaatcccacctccatgtcactaatcatcatcatcatcattactatcgtcaattcatcattttgaagtttatctagtacttaaacttttgtgctttctttttggacacgttatcttcatatggtcatattaagtttgctacttttgttgtctatagataaagtgctactacgctaaggaatatttttggctaaataataaaagaaatatgacaagaaaaaactggttggtaataaaaatttaaatttggttcgtgtttaacggttgataatactggttggtaagtttgatacttttgtctatagataacttgctagtaccctaaggatttgttttggctaaatataaaatatggcaagaaaattctggttggtaataaaatttggttcgtttaaagataggatcctacaaaaatggaggagatgattcattccaagagtgccatttaacaattcacgggaaatg

SEQ ID NO: 34082 - DNA, 3000 bp, Unknown; identical to SEQ ID NO: 4852
  misc_feature (1)..( 3000): 2750-1469P.txt file - cDNA_ID_3074356; gDNA_ID_1620736; Annot_ID_166273

SEQ ID NO: 34083 - DNA, 3003 bp, Unknown
  misc_feature (1)..( 3003): 2750-1469P.txt file - cDNA_ID_3074378; gDNA_ID_1620736; Annot_ID_49482
cacgactatcaatatgttatttgacacatctcgttcatcttaaccctcaaaccatgggttaagacatcatagtcatcatgacctatcacaatgacataatgatattagcataatgttacattttctcaattagtgtcaaaaccatatttaaatatatatacattcataatcgttgtatataatgtgtctaatataggaaaattagtaatattaaatatcatatataacgaaaatggaatttgtgaacaatatatatatgaaaatgatttcactggtcaattctcgtttttcattttctaactggcctattatttctccttaagaaggctaacatcatcatatatactatatgcatatacgtagtagagtcaatataaggtctgtatttttaacttcttatataactcatatttttttcatctagttggaacaccgtaaattttattctaaaataaaacaaaattcttacgggttcatttattaatcaaattgatacattttcttcccacacacatttttacagttagagtcatgtaagacttatcgattcctatgctagaaaaaaacgtgcgactataccaaattatatggagaaaaatatgtggtcaacttaaaaaagtattccctagtttagtggtgattaaatattaccaatactttagcaaaggatataatagtgctttataagtcattattaatagtataatagagtgatgccaaatcaattaacatacctactagataacgatgacaactcattttttattttattttcaattgaaacatgcattaacattagacagataaatgatatatttaacataatttacttaatgactcgaattgggaaatttttcttctaaaatacagattttaacatatagagtgatgttagatttagctctttaaaatcatcaacacgttggaaaacaaataagctattataccaatttatatggagactaatatcatgaacggtacttcgttatcactcgtgcccgtcaacagtgccattggatatatgatgtattacatatcatggtattatgtaaaatgatcgagatcaaatatcatggacattctataagtgcatcgaggtcagttagacttagtatcgtggagcatacttcttgaccaccttactgtcggctaaaatttatatgtaaatattctcttgatacctcataatgatgtgacgtacgattctatttatgatgttgcactgttatttgttagatacacagtcattattttcctttgatatggttgtgaattcctctaatatgattatgtttttcttatatgacttggtctgaggtaactgatttgaacaagctgctgttagatttatcaccaactttatagaagaaaagattctgccactatgagaaattggcaaataatatagagaaaaatgtagtcaatttaaaataattattcctttatgagtgcttacaaattaatgatattttggcaaaacaattattagtattttataagtcaatgtttattagcaaagtattgtaaagccacgtcaattaagattatctaaatcaagtagcatgttcattaccattagatggattaaaaatatatttaagtttattttgttgggttgtgcataacttccacttccaatattgttccattttaaaaagtataatatgcatatagtagaacatacatcacaattacctagagaaattgttcagaaatgaatatttattcaatacatttttaagaatatttcaacaggaaaacaaaaaaaattgcagtacgaatttcattggttaattagaaatatctccttttttgtcttcatctagaaggaatacctaaacttgatctgaaaataattattttttactttaattttaaaaaaaaattagaagtcaaactgaaaacatttgagtacaaagttttttatttagagtgatggtaaattttctcaagcaactatatcatagaagataatctgcggcttgtcagaaaaaataataataatctgccactatgccaaattaccgaattatatagagaaagaattagttagtattaagaaacttgttccttagataagtagtgcttacataatatcagtattggcagaaaaagagaattagtgacataatattaatattttttcaaaaagaatattagagttctaaaagtcattgtttaatagtatataaatcaattaacacgtgcattatcattagatagataaataatatatttaagcttgttttatgtggttatgcgtattatttcacttcgaacattgttccatttaaacgaaaatatgatatacatataagaaatacatcacaattacctaaggaaattttgggcatatttttaaaaactatttgttatttaatttttttttccaaaatttgtcatagacccttggtttttgcccatgctgccaccccctagagacgggcctggttctatggtataatagagagtaaacatttgatttatgcttcaaactccttctatttcctttcaaaaaggtaaacaatagctgatgtagttttacattcaactaaaaaaaaaaactacttcaagcgaaaaatattataacttggttttaaattttgttcatcgagcagtatgtggagggctcgtaggacgttggcttgattgttaagtgttgtgattgttggtcaaaaaaagatatagaaaaaaagtcttatcaaattagccaccagacgaaagtgaaatttacggtccgagaacatgcgtttaccacaaatggttgtagtcagggtgtcatatcataagaaccacaacatgaggatccatagtgatgtgaattgttgactttgcctggctacatggtttttttctgtctgaaaaaaaaaaggccaaggaaaaaacaaatgtatccaaaaccctataaattacaaagtagagaggaagaagaaatgcacaaatttcagaataacatatattcactaaatacttacatgagagattgaataagaaatggaaatg

SEQ ID NO: 34084 - DNA, 3003 bp, Unknown
  misc_feature (1)..( 3003): 2750-1469P.txt file - cDNA_ID_3074378; gDNA_ID_1620736; Annot_ID_166256
tctcaccacgactatcaatatgttatttgacacatctcgttcatcttaaccctcaaaccatgggttaagacatcatagtcatcatgacctatcacaatgacataatgatattagcataatgttacattttctcaattagtgtcaaaaccatatttaaatatatatacattcataatcgttgtatataatgtgtctaatataggaaaattagtaatattaaatatcatatataacgaaaatggaatttgtgaacaatatatatatgaaaatgatttcactggtcaattctcgtttttcattttctaactggcctattatttctccttaagaaggctaacatcatcatatatactatatgcatatacgtagtagagtcaatataaggtctgtatttttaacttcttatataactcatatttttttcatctagttggaacaccgtaaattttattctaaaataaaacaaaattcttacgggttcatttattaatcaaattgatacattttcttcccacacacatttttacagttagagtcatgtaagacttatcgattcctatgctagaaaaaaacgtgcgactataccaaattatatggagaaaaatatgtggtcaacttaaaaaagtattccctagtttagtggtgattaaatattaccaatactttagcaaaggatataatagtgctttataagtcattattaatagtataatagagtgatgccaaatcaattaacatacctactagataacgatgacaactcattttttattttattttcaattgaaacatgcattaacattagacagataaatgatatatttaacataatttacttaatgactcgaattgggaaatttttcttctaaaatacagattttaacatatagagtgatgttagatttagctctttaaaatcatcaacacgttggaaaacaaataagctattataccaatttatatggagactaatatcatgaacggtacttcgttatcactcgtgcccgtcaacagtgccattggatatatgatgtattacatatcatggtattatgtaaaatgatcgagatcaaatatcatggacattctataagtgcatcgaggtcagttagacttagtatcgtggagcatacttcttgaccaccttactgtcggctaaaatttatatgtaaatattctcttgatacctcataatgatgtgacgtacgattctatttatgatgttgcactgttatttgttagatacacagtcattattttcctttgatatggttgtgaattcctctaatatgattatgtttttcttatatgacttggtctgaggtaactgatttgaacaagctgctgttagatttatcaccaactttatagaagaaaagattctgccactatgagaaattggcaaataatatagagaaaaatgtagtcaatttaaaataattattcctttatgagtgcttacaaattaatgatattttggcaaaacaattattagtattttataagtcaatgtttattagcaaagtattgtaaagccacgtcaattaagattatctaaatcaagtagcatgttcattaccattagatggattaaaaatatatttaagtttattttgttgggttgtgcataacttccacttccaatattgttccattttaaaaagtataatatgcatatagtagaacatacatcacaattacctagagaaattgttcagaaatgaatatttattcaatacatttttaagaatatttcaacaggaaaacaaaaaaaattgcagtacgaatttcattggttaattagaaatatctccttttttgtcttcatctagaaggaatacctaaacttgatctgaaaataattattttttactttaattttaaaaaaaaattagaagtcaaactgaaaacatttgagtacaaagttttttatttagagtgatggtaaattttctcaagcaactatatcatagaagataatctgcggcttgtcagaaaaaataataataatctgccactatgccaaattaccgaattatatagagaaagaattagttagtattaagaaacttgttccttagataagtagtgcttacataatatcagtattggcagaaaaagagaattagtgacataatattaatattttttcaaaaagaatattagagttctaaaagtcattgtttaatagtatataaatcaattaacacgtgcattatcattagatagataaataatatatttaagcttgttttatgtggttatgcgtattatttcacttcgaacattgttccatttaaacgaaaatatgatatacatataagaaatacatcacaattacctaaggaaattttgggcatatttttaaaaactatttgttatttaatttttttttccaaaatttgtcatagacccttggtttttgcccatgctgccaccccctagagacgggcctggttctatggtataatagagagtaaacatttgatttatgcttcaaactccttctatttcctttcaaaaaggtaaacaatagctgatgtagttttacattcaactaaaaaaaaaaactacttcaagcgaaaaatattataacttggttttaaattttgttcatcgagcagtatgtggagggctcgtaggacgttggcttgattgttaagtgttgtgattgttggtcaaaaaaagatatagaaaaaaagtcttatcaaattagccaccagacgaaagtgaaatttacggtccgagaacatgcgtttaccacaaatggttgtagtcagggtgtcatatcataagaaccacaacatgaggatccatagtgatgtgaattgttgactttgcctggctacatggtttttttctgtctgaaaaaaaaaaggccaaggaaaaaacaaatgtatccaaaaccctataaattacaaagtagagaggaagaagaaatgcacaaatttcagaataacatatattcactaaatacttacatgagagattgaataagaaatg

SEQ ID NO: 34085 - DNA, 3003 bp, Unknown; identical to SEQ ID NO: 34083
  misc_feature (1)..( 3003): 2750-1469P.txt file - cDNA_ID_3074378; gDNA_ID_2926157; Annot_ID_139556

SEQ ID NO: 34086 - DNA, 3003 bp, Unknown; identical to SEQ ID NO: 34084
  misc_feature (1)..( 3003): 2750-1469P.txt file - cDNA_ID_3074378; gDNA_ID_2926157; Annot_ID_198490

SEQ ID NO: 34087 - DNA, 3000 bp, Unknown
  misc_feature (1)..( 3000): 2750-1469P.txt file - cDNA_ID_3074382; gDNA_ID_1620736; Annot_ID_166255
ttcagtttgacttctaatttttttttaaaattaaagtaaaaaataattattttcagatcaagtttaggtattccttctagatgaagacaaaaaaggagatatttctaattaaccaatgaaattcgtactgcaattttttttgttttcctgttgaaatattcttaaaaatgtattgaataaatattcatttctgaacaatttctctaggtaattgtgatgtatgttctactatatgcatattatactttttaaaatggaacaatattggaagtggaagttatgcacaacccaacaaaataaacttaaatatatttttaatccatctaatggtaatgaacatgctacttgatttagataatcttaattgacgtggctttacaatactttgctaataaacattgacttataaaatactaataattgttttgccaaaatatcattaatttgtaagcactcataaaggaataattattttaaattgactacatttttctctatattatttgccaatttctcatagtggcagaatcttttcttctataaagttggtgataaatctaacagcagcttgttcaaatcagttacctcagaccaagtcatataagaaaaacataatcatattagaggaattcacaaccatatcaaaggaaaataatgactgtgtatctaacaaataacagtgcaacatcataaatagaatcgtacgtcacatcattatgaggtatcaagagaatatttacatataaattttagccgacagtaaggtggtcaagaagtatgctccacgatactaagtctaactgacctcgatgcacttatagaatgtccatgatatttgatctcgatcattttacataataccatgatatgtaatacatcatatatccaatggcactgttgacgggcacgagtgataacgaagtaccgttcatgatattagtctccatataaattggtataatagcttatttgttttccaacgtgttgatgattttaaagagctaaatctaacatcactctatatgttaaaatctgtattttagaagaaaaatttcccaattcgagtcattaagtaaattatgttaaatatatcatttatctgtctaatgttaatgcatgtttcaattgaaaataaaataaaaaatgagttgtcatcgttatctagtaggtatgttaattgatttggcatcactctattatactattaataatgacttataaagcactattatatcctttgctaaagtattggtaatatttaatcaccactaaactagggaatacttttttaagttgaccacatatttttctccatataatttggtatagtcgcacgtttttttctagcataggaatcgataagtcttacatgactctaactgtaaaaatgtgtgtgggaagaaaatgtatcaatttgattaataaatgaacccgtaagaattttgttttattttagaataaaatttacggtgttccaactagatgaaaaaaatatgagttatataagaagttaaaaatacagaccttatattgactctactacgtatatgcatatagtatatatgatgatgttagccttcttaaggagaaataataggccagttagaaaatgaaaaacgagaattgaccagtgaaatcattttcatatatatattgttcacaaattccattttcgttatatatgatatttaatattactaattttcctatattagacacattatatacaacgattatgaatgtatatatatttaaatatggttttgacactaattgagaaaatgtaacattatgctaatatcattatgtcattgtgataggtcatgatgactatgatgtcttaacccatggtttgagggttaagatgaacgagatgtgtcaaataacatattgatagtcgtggtgagagagagatgtcccaaaccatctatttgagggagtgatgactaaattattgcgaatcaagagttctaggatcgtgatgactgatgactaagttatgatgaaccaaagggtttgagcgtcacgataattaatatattacaaacctagggttctgatatcattgaccaagatttgtcgaatcaagagtttgaggatcatcgagatgaccaacatgtgtcaaaccatcaacttgggagtcgaaataattgatatcagagagtgatgctgagcatgctacttgagggctgaatggtagagatagtggcctgattttgacgtagatgtttgagggtcctaaatataaatgtttgaaatctctgaaaattctagtaagaaatataaaacgatgtaatattaatggaaatatatatcacccaatatcggtgtgggagtgaccatccttagtgaataatttgtttgttttttttttggatcaaaagtgaataatttgttacttatgtctttttgtgatgcagatgaggattagtatgttgatgtgtgtgcgagattaccattgatggtctattggtcttcaagattatgatgaactaatttatgcatttttaggtttcacgccttttttccacactgatcgagtttttcgttgcgaataaagtatcgtattttcctaacaaagcttcggaataaacctagatataaaaatcattttgccatttataaaatgttgtgtattatcatagttacgatgatacaatgtatgctttgtcagtttaatcaagtatacaatgttagttgatgtggcaattatactttcatattaaacattgaattatataaagcactaatatactttttccaaagtatattaattttgtgtaagcactcccaatctaagaattttttttagttgactacatttttctccatataaattgattttacttttcaatattctaattattaaccctattttattatccacttgtttatctaaaaaacactatttcattagtatatattttagtttttcccacactgcttctttaactctctaaactctatttctctcgctctctatctctctcaaacactatg

SEQ ID NO: 34088 - DNA, 3000 bp, Unknown; identical to SEQ ID NO: 34087
  misc_feature (1)..( 3000): 2750-1469P.txt file - cDNA_ID_3074382; gDNA_ID_2926157; Annot_ID_198489

SEQ ID NO: 34089 - DNA, 3003 bp, Unknown; identical to SEQ ID NO: 20432
  misc_feature (1)..( 3003): 2750-1469P.txt file - cDNA_ID_3074386; gDNA_ID_1620736; Annot_ID_166254

SEQ ID NO: 34090 - DNA, 3003 bp, Unknown; identical to SEQ ID NO: 20432
  misc_feature (1)..( 3003): 2750-1469P.txt file - cDNA_ID_3074386; gDNA_ID_2926157; Annot_ID_198488

SEQ ID NO: 34091 - DNA, 3000 bp, Unknown; identical to SEQ ID NO: 4844
  misc_feature (1)..( 3000): 2750-1469P.txt file - cDNA_ID_3074390; gDNA_ID_1620736; Annot_ID_166253

SEQ ID NO: 34092 - DNA, 3003 bp, Unknown
  misc_feature (1)..( 3003): 2750-1469P.txt file - cDNA_ID_3074395; gDNA_ID_1620737; Annot_ID_166294
aacggaatgaatagtccgtcctatcgattcttcaacgccgcctcaatagactggaaagccgatatccaaaactgtttaaactgggaagctcacagcttgctctccacaactatgcctactcagtttctcgacactgcggctcgggaactcggctgtactatatccttgtcccaataacgagcacccacttttgtttttggtaaattttagttctctagacaaaacatttggacgtagaccaagaagaatatatatatagtttgttgtatgtaatgttgtaatgatgagtgactgacgcaatcactcccaccggcgttggatttgctctcgctcggtgtcttatataactcaacctcttctctgtacattttaaatgacgaagtagctcaatctttttttttgtgcgtctggtgtttagtcttcagtggattctaaatcgtaatgtatagaagtgaaaaatttacaaatttacttatttccgaatactcttaaaacagcaaaaattaatattgcaaaagataatttatagtattttaatctttttcctccaaaaaaaacattaaagggtaaattagtaattaactacaggagcttcatattaggttggaaaaccctaaatatgccgcttataacagacctgagcttaagctgtggtggcgcctccagagtctggtaaaagagcttaatcctcctctcgcgatctttctcggcatccaaaaatggtacgattatcgttcttcaactcttgtctggttctccaattgctcgtgcttcattttgcgtatcgctcgtttttcattgctggttttgggattggagttttaagctcaaatgttttttgtattcccttacacgatttgcgactgacggatctgttttttttttttcgtattcgtgtgtgtgtagtctctagttgcgaacgaggagtttcagcatattctgcgtgtgctcaatactaatgtcgatgggaagcaaaaaattatgtttgctttgacctcaatcaagggtattggaaggcgattggctaacattgtgtgcaagaaggctgatgttgacatgaacaagaggtttgtttcttagcttggttcttaatactttcagttacttaggaattctatggataaggattatgaatcttgcgaggttttggatgttagtagaaaatgtagctctttgactagaattgtacctgctcgatctggtttgattgatttctaggaaatcagatatttaggttttctttgcacatagaacttctctagattgatattcttgaagaagtttggtctagtgtgtgtttttaaatgttttttcctttgctggtatattcagggctggagaactaagtgctgctgagattgataacctcatgacaatcgttgctaaccctcgccagttcaagatcccagactggtttcttaacagacaaaaggattacaaggatgggaaatactcccaagttgtttccaatgctcttgacatgaagttgagagatgatcttgagcgtctcaagaagatcaggtaacaaacaacacatacagacactctcctctgtagtttttagataccatgttaatagtataatgatgcccatcataactttctatatggaagaagctaagtacacaactcttgtgttaaatcatgtatacactcattttcggcaacaaaacctaatctgtagtgtaatgatttactgatgcatcctttgtttctctcttgttgttctgataatcgatatagaactttgtttgtactgactgagattgtcactgtaatgtaaacagaaaccatcgtggtctgaggcactactggggtctccgtgtacgtggacagcacaccaaaaccaccggacgccgtggaaagactgttggtgtttccaagaagcgttaaaaagagtttgagcttggttcaatggctttgttttgttttttttgtattgttgttttttgcagaagagatagtttaagagatgttgtttcatcaaaagacggtcttagcttttacaatatataattgaatccaaaaactagtctctatttattacattctcttctctcaaaatctgctttaaacaaagttaataatagcacactcctccatacgcaagaattatataattagagaaaacttttaagtgtcacaagcggctgtctctataatgcgcaaatacatcgttatcagttttaatcactatcagtaactttactgaacttaattgatcattttaatttttcatgttactctctccttcttcttcacttgttctctttctcatcgcctcttgattcacgcgaacgagaaagcgacgatcgtaaccaccggcgctgaccaaaaagtaatcgattctcttcccgagctgatctctcaggtgcgtgaattcacttttttttttttcgatttttcccgagaaaaaaatccagcaaagagtagtagcgatgaagaagacgaggtttgaattgagattcgtattctttcggtggcttgaagtagcttatgcatgtttaaactcttgttcagttgtttgctcatgattcgaaaatggctttgtagatcttctaatataatctcttctctttatcaattcactagtgttctatatctgaagaaatttacggctacagatccaatctcatttcgtttcgttacactatctctactaagattttgttttttgttttttttccctctttttttgcgttttagatctcctccatgattgaagttgatccatgcttttgagtttaagtgatttatttaagatcctctaaacttttttttcttcacttagtggtggttccagtcaatttagcaagtaagatgttgtatgtgtcaatgctataactgtgaattttcagctattgtagtttgatttttgtctttgttagcttcaggtgtcttgaatctgaatctgtggctatatttggtgctcggtggtgagcaggaagggagggggatattgtcagggttttaatgtacgtcagatgaatagagcaactaatg

SEQ ID NO: 34093 - DNA, 3003 bp, Unknown; identical to SEQ ID NO: 15740
  misc_feature (1)..( 3003): 2750-1469P.txt file - cDNA_ID_3074398; gDNA_ID_1620737; Annot_ID_166293

SEQ ID NO: 34094 - DNA, 3003 bp, Unknown
  misc_feature (1)..( 3003): 2750-1469P.txt file - cDNA_ID_3074402; gDNA_ID_1620737; Annot_ID_166292
agtatccgaggctttggatgttctcaggctatctgttgatccaactgatcatgatcttggtttctctaccaccgactgaaatttgcaatgcgtttgctcaactctgttttcttcttttagttttgatatcgactccttttcttttcttttttgggttttagtcttcctttactattttagcagtttttttttgtttacttagtttatggtttttgtgtctttaacttagtttatggtgtttttctttttctttggacaatgatgatttcttaataatctgagtagacttcttcttccgaatccccaaataatccatctctacttgaaatttaagttgttcggtattcatggtcagcaacaagggacaatccttctattatggtagcagccttctattatgaatttattcgaatgtgtctactcataatttgtggtttgtatttcaacttgtagttgatatcaattatatgcacacagactttttctttttgaggggttggaagcaagcgattcaatgattgtaccactcatttcataatagtgtttgatatgacgttaatttgaatggtttatgttgatcgaaaatactctcagtcacaacaagaatctaattcgattaatttatttgaaaaacatatgttggcatggtacatgaaccagctcgttcatatgaaaatattttaaaaagtcaacatcagtgctaatttcaaattgaccatacattagcacacaagaagactaacaaaaaaaatgagtgaataaagaagagagtgagtggggttgatacatgtcaccgtccaaaatgtgtctgacccttctcattggagctacaagagccgaccctttgcctcatcatttgttgacttcactctccttttacatatttaaattataacttgctcatatttccattcattgtgttcggttctagattgttccatccactttcttttttctcttactttgaaatttagaaatatatgaatacttgacaaatatttgaatattgtaactgatttgtttgttcgtaatacttgacaaacttttttgaatatacacctttacatatattttgagttgagataaaaagggaattatgttagtttatggattatattatgtaaataccacatctaactatgatcggatgaaaactaaaccagcatatctctaatcagtaatatttactaaatttatatatcattaaagattttttgaatttagcaaaaaaagaagaagatatcattaaagatttttaaatttaaagtataacataatgaataaatcaagtgttgagcttagtttcgcgttgcaaagatgttcatttgatttttttttttttttttccatttgatttttcttatactaaattgattgatgtcacggtccttctgtgaaaaaagtatattgtactgtataaatttataatagtcatacttgaagataactaatatcattttctaaaggttttgttgacatgaaatgggtgaatgatgaacatctcgtttgctaaaccacaaaagaaataattcgttggactataacttaaacttataatatatcaactgaaatgcctacaatttgagaatacgccttttcaaaaagttttagaattttataaaaatttctccaccataatattactttaataaaagcttgttattaaaatgatatattaacaaaaaaaaaagaggtaggcaaagtagcttttattaaaattaatgttttccctaattggtaaatcataaaccaaaaaattgaggtaattcttaatatatttactatgattagaatgatacattaatgtaacattttatcatcttcattaataatagtaagttctcctcaaaattacaatttgatatcaaaaaatatatttgtattacaagcaattactgaaaaattaaaattacaatttagcccagttacataactccacgtaaggtttgagcccatcacatcacatggtacatgaccaaagcccagttatgttaccatggagtattcttcagacaagagccatccagacagaagtggaccacacaatcacgaatcgtatggagatcattacaatatattgctcacatcttattgcgccacgtctcttatttggcgagtgatcaacgtccacagatctcttgctccactctgattggtacacgtcatcattttattgtgctacttgtttatgtggtacagtagagacaagtggtaagattttaaaatatcttaaaagatgtgtgaggcccatttagatattttctcaacgggctgttcctcaaaagctgcccgtttatctacaaccatcgaacggctcgaaactattctgggctagctgcccgaaatctcttaaaggaatttgttgagtgggcttgaatcaacggtggataattcgaaggtgtacgtaacatctcgtagcatctgaacttagctcccctcaaaatatctgtggacatatgtcactagctttttttttgtgtaatgaaactattaattaattaggcaatcacatgagagatgttatatacttaaattaataactcaataatacaatcatgaccaccaaaccttgaaataaaataatctctctgattacttgtacaaattctttaccaatatatgccatactgtgaatgtaatggtttattttaaaacagccaaatattattgatataattatatgtttaagtagattttaaacttagctcatggttaaaaatagacagaattttggagtaaatctgagtttacaaaatttatttattaggattaaaattaattacttaaattggcaaacatttttcttggtgattgtaacatacaatatacgaatttgaattcgcattgtgattccaaaacaacactaacataaactaccagtaaaattttttaaaataaaatttcatatatatatgcttaaaaaatgtaacaaaaatatggtaaattttttaaccatggtatgggtggagatgtatgtgggatgatgatggttatatggtaatg

SEQ ID NO: 34095 - DNA, 3003 bp, Unknown
  misc_feature (1)..( 3003): 2750-1469P.txt file - cDNA_ID_3074412; gDNA_ID_1620738; Annot_ID_166310
tgtgaacacaaggacatggaattcttaaaattggttacctgttttggaagatgttggtgagatttgttttggaaacaaggctttcatatggagaatcagaagcgttggtttgtgctggactagggcttatacttgctactgattgtatattcactgagttctcactatcaactgaatctataagaatgaaaatgaagaagattcttatgttagggcacgacaggagttttctctttatagtattttagattagaaattgaagatcatttagggaaggattcaaaaaattacttctgctgggagtgcatgaatacattgtagaagatgatctatctggagagtttgaagctgtcttcataaacttagagctattgctgtcaacagagcctgcaagattgaccagaaagtgtatgtagcattccatatattctttcttggtggtggactacagtaaagagaagaagaattggtagggagaggtttacctcgtgatgtgaagctgtcgtataccgggattaattcatcaattgaacctgcagggcagttgagaaattaattgaggggtttgatttataagctatgaacttgattattatcactaataagaatagtgagacatgagatgcttaaactcaccatgacacgagcctttcacttgtaaaccaagcattaagctgtaatccatgatgccttcatcttccaaaagttcacaatctagcttcgtttgcctgcacaattgaaagttcacatctaaatcattctctacgacaagaatcaatataagaagagagagaaaaagactgacttaatgagacggtgtctggccaaagaatccacatagaaacaaaaatcaaggtcgatatccttcaatatggttttatctctcactttgatcttcttgttagtccgaccttgagatgaaccctttagatcatagaccttgttcataaaaacatccgactgcagtatgtttgacatgacgacaaaatatgtctgctcacaccaaaaaaaacttttttgttttaatagtttctcagcgaaacatcagatcaaagataagttccattacataattattactagtttaccttaacacctccaataggcttcacagagtgagctccataattcttggacaacaaggttgacctgtatttatggatatgacggaagtaaccaggcaacatctctagtataacctacaatattgaaaaagattgatacataaaaacatgaaacgagagatgagaatattaaacatatattttagcaaattagtaaaaaggtaccttgatttcggatttgcgtagaatcttaatgagaaaacggtcatctttggaaagaagaaacatgttaccaactttgctagtagaaagcttccttaaggtctcatcattacagatagacttcatgtactcatcatgattgatatcctcaagttcctgtataagtctgcaagaaaagaaccaaccaaaagtaaagaaaaatgagacaatgagaaatcctcaaagacatacagagagagagagagggaaaagaacctgaatcccaagggacaataatccttccattcgaactcagtaatggttccaggaggaagatgttttatgtgtttggaagagtatcgaatcctgtttttctcagtggctttcacgtcctttgctgttatctcccgcgtaaacatttccaaattaccctctctctctcaacttctcctgatatcaaatctcatctatgcccacatcttttaatttgtatactcctatacattagaagaaataatcccacatttttcaataagaaattgacataaatctgcagatatagatccaaaatttatggaattgagggacaacatgaaaacggagaaccctaaaaattgttcggctcaaaaccctagaaatcgaacacaataattgatcataccaacacaaatatatcatgatcaaattcgcataagatccggtaaacaaaaaatgagaggaagaggttgttacctgttccaggagctgggtaaacgagagaggaggaggagaagaagaagagtgcgttgaattttaaaagaaacaagaaattttaaaaatgaagaagaagaagaattctgttttgtttctttatttgtttgtgttgagaaaaacaattgttttgccaaatttggccgtcgaagttcgccgctcgatccaactcattttcctctgttttcaaagacgggaaaaaccaattcccgcgtcttctgtttcattcatttccgttactcgttttagttattattatattactcacaaggcccatagcttaagacaaggcccataaacaaaaactacccaatcatgtctttaagttcaacttagccaaatcttgaccatgattcaacaatgcttattgagaagttatgcaacctacagactggctacaattttcccatttatttattttcccctgaagttaagttattgatcggccccaaaaaaaacttggcttgtggcccaataatagtcagagccggctctgggagaagtgtaggacgtgcttccctcacgtatttaaacgtgacggcgatgacatgcatcatttaccgactagcgacgagatgatctttttcatttagatagatatcgttagataaaaaaaaagtagaggtcaaacatacgagctgtatactttcatatatacatggtggtcactatcttaaactaagtcccgatccatatattgtcatcacaaagacacttacgtacagcacaagaaagcaaacggggatgtaaaacgctgagcagtttgcattccataaatccaaacggcacgcatgttgtagtaacgacgtgggcccagtttcgaatgaatcatatcgattctgtctttgttgctgttacgtagaagaatcaagttatattttggtgaaagaatctaaaaccccacacatataaatctgtcatttttggaaacttctcaaaaagttctaattctgaaaaccctaaagtgttttagttagggctaaacatg

SEQ ID NO: 34096 - DNA, 3000 bp, Unknown; identical to SEQ ID NO: 4876
  misc_feature (1)..( 3000): 2750-1469P.txt file - cDNA_ID_3074429; gDNA_ID_1620738; Annot_ID_166302

SEQ ID NO: 34097 - DNA, 3003 bp, Unknown
  misc_feature (1)..( 3003): 2750-1469P.txt file - cDNA_ID_3074443; gDNA_ID_1620739; Annot_ID_166373
agcaccggctccacgaagtctgaatcgaatctttctgttggctttcccaaattcattcgtaaatcaaaatcaaagggctagaagcgagcgcttctagctgcttcgcctgcttcttcttattatggcggccatgttggcgtggcgaaaatgaacgaaaagcgagatgaacgtgctattttcaaatcggattgatagattgatctgttctgatagatctaaagagtagaaatagatagagaatagagagggaatcaataataaggtctttgagcctatttctatctattgatgagacaactatctattcttgatccatcagaaagaaattatttatccatcagaaagaaatcgatatgtatctgatggagtcttctacatcgtacgtagagcgcccaagcgctttttgggccagctcagttctcttatccatcggtccaatgcactgggctcatctcatggagggaaaagccaaaatgtagttgtcttgttgttgttcgccgcctcgacgcattcccttctctccccggcatcgtcccacacagaaagaaagagcgcggagccccggcccgagccgtaggtccgctaacgtaaagcgaggagttgagcctgaactggcgaaccgaagtcactttcggaaccatacttcctacagctgctaacatgtgcccagtcctgcggaaaggcgcaaacgaacgtgagctgctataccggaatcccccgctggccatcggggaccgagtggtaaggccatgatctgcaggggaacggatcactcattcttccattggggacaggtgcacgaacgacaactccaaacgtcacacatccgccgcctacttaccgtttaggtggcaccagcgagatccagctaaggaaaaagagtgtcgcggctgctccactccgccgcggtctcatgaacttcacttcgttgccttcccgcgcgcaaagcgaatgggcgctgtgctgtgggtcagtttcggggcggggggcgcagagataccagaataaatgattcatttgtttggatcgacgagctttttcagccccaaaactcagaatcaatggaatgtctgtccataaacatctattctatctgtatatataggggatctctctatacatatcaaagtcttttatggcattgatatgatcgcctagctgtagccgcatatcacagctgcactcaatatgcggatttctgttggatcagatcttttctttcgctttgacggaagctttttgacctagcgaaaagcactttcgcgcaagcaaagtagaagctttgccagaagcaagacgaggaagtggagctgtcgtataagcggtagcttcccccgaccgactaaaatacaagagtcgcggcctactttgattgcgaaggggtttggcaacaagcaaacggctttctatcatagttgcaagggttcaaaaccttagttcgctgcttttcccagtaccagagaagggcttatactgctcgcctttgtttggtttgatatattcattcagtcaaaatacaaactacaacaaagtggaagtggaagggccgctatagaagctagaacttgctttataagtcggcctaaccaaagcgtcacgacaacaaaaaattatccttatgaatggaatcttaagtagggggggctttgaccgcccgcctaccaatcaaagaggcagagagtaaacgtaagctcacccgtaagctcgaagagagcttcccttcattcgcttcgcgggagccgcacaagcacatagctggaagtcagagggcccatactacctgcctaaccctttgttccgagggaccgtagatcggaaagcaccccatttatccaaaagagaagggaaggggcctatgtatttgcatgacccctgcggatttgaccctatcccggagccaatcccctattggtcctgccaccacgccgcagaacgagagctcgtgtggaaccttttctttctggcgtaacagccggtggaacgtaacaaaagattacggtcgcctaacattaacataagggcggggggtacggtaaactcggccaaaatatgacacccgaagggcccgaacgcacaatcctatcccatccgagtccgagtttaccccttgcacttcggacagccgaccgtagcatcataaggaggaccccctttcgaggtaaaaaaaaaaaaaggtacggtacatataggaggttggactttctcaacgtggtgtatagcacgaaaaacttttcgatacaagaaagggccgttctcacatgaaagaagagaagaaatcctttcttctcttctttctctttctcgagaaggaaagaaagaggatggggggagggggggaatggggccggtgcccttcttttacggccgtcactcttatttgtcagccgtgaggaactaccggctcggtctcggtgggaaaggaaaggcttgggcctacctatcccgataagacctcataaaggaacggcgggagtgataggttccatattgccgagctgaagggcaagacttttgtacgtgatcgtagtatgtgacgtcgtctcgtccacgctgcattgaagagtacctacgcactaagttccggttcactgataaggaagatagagttgggcgggggtctacgatgtgatactcaagtatatgacccggggagatacatgctaactatgggtaggaagcaggaacccttatgtaaataatttcgggggggggttacagatctcttatactaccctcgatcgacagagcggaacgaccagaaaaataagtgatgttagaaagccgtatgataggtggtaactatcttgtacggttcggggggtaatcggcgtactccgggagaaatctttcgctctatcgaacatacagggaattggaggtagcattctaccgatgttaagtcatggactggttccttcagccctttttctatgtgttggtgttttatatgaccgacataagactcgacttgttagatattacggaggtttagtgagcaccatg

SEQ ID NO: 34098 - DNA, 3003 bp, Unknown
  misc_feature (1)..( 3003): 2750-1469P.txt file - cDNA_ID_3074466; gDNA_ID_1620739; Annot_ID_166350
gcgacggagaagccagcactgagagaagacctccctttcaaagtccatcgcctgcacttgaaccggatacctactatttattttattgaactagacgatcagcggacttttatatcatatcaccaacaacgggtttcgcccacagtacagagatgatctcaatcgcatcggcataaaggtccggattccaactttcaaaaaggatttacgcgcgaattcaactatagacaaaggtccggattccacttcaaaaggatttacgcgcgaattcaactatagacatatctctttggcgacccagggacggggattcatcaatcccggggttcgagggagactttagaacccctatatatgagtctcgaaaccattatttatacatttctcgatgacagagatcatctttaaggagaataaacattggtcctttatttaataaccccgatattatcaaaaccatgatttccttatttctcgatggcataggttccagggaaggaaaacagtccggtcctttttcaccccgaaattcgagagtagccgtataaaccaataccggcagaaccacccaaactcggctcaaagcaggaacaaagacatctagaaagcccacatcacgtggggacttggccttggtgggacattcaaccgacatacacaaccaaataataataggttttagccatgtattccgctacaccgccctattgatctacgctttcgaagcaaccaccggtaccattttcacacaacagagccgacttacttattacatttataggacagggaacccgtctcggtaggacttccaaatcctacctcaagcaaccgacatctctttacttacttgaccgctagccaggggcttgaaaccccttacaaccttccttgcttgccgggcttacatcgctatcatcgctagccagggactggaaatcccttacaatcacatgcctgcgctcgtcgtgcctttaatacttatttattaaccaaaccctccttggccccaattggtctaagactcaccaacatcttacgatgagacatcgggctacctggcaagagtcaataaattggtgaacctatgagagacgcttctaattcttttctttctcctgacactcactatcctacccgatcctgctaacaggaaatttgatgaaataaggaaacttaggctgttgttgaatcaacttagaatacaaccggtacccacgtcgcaactaaagcactcgtagcatacgttccatccacatccggccagttgaagtgaagatcgagaaaatgttcttcaaagcttgctaataaccaaaaaagaattggactagtgtaagggacttccttttcaagctagcattttagaccaatgcaatcgagtgaaagtgcttcctatcatttgtctgcttgaaaccttgcattgagtgtgcaccttgggaatacttgagtttggaggtcttcaagcctttctatgggaaaggtttccaatacgtattcttgccgttgttcgagcttaaaagcggatgatgatcctaatcaagagtttggtctagcttttcgattcatttgagtctgtcctcgcaaagatatgaagggcgctttcaggacggatacggatacaggtgacccctttttcccctttgctttctttattacttctcgtacgtgcccagtctcaacgtcacttccaaaaccgcctttcccagatctatgaaaggtgaaaggttgaaggtccacaaaaggtaacataaatgaacaagtttattttgtattcgagctgctgagggccggagctcgtatggatacattacttcattgttctatgaggccttgcacaaagcccatactcggataaggatcgcgaagtgcaaagatccggtctttgacaacccaaccgtcgtaaggacaacaaaacctatacttatgtgtgttcgacactataggcgagaccagttgtcagatgatcgccgagtggcgttctgcttgattaggcgaatgcgagtgaggtatctaatcccgttcgctaggagggaaactcaggaagagttcgggcagaaatagatggtgaaaagccctttatattatataataaagcgcgctccttgcatgactccatatcattcattattaaagcgaaagcacaacgtgtcaccctaaccttcaaatcgataaacgggaatgcgttacctaataataatgagcaatgctgctaagagcaaatggttcctaacctcataaaaaaagagatagtcatatccgactatccggcaacacgcttggataagtaaggcgatgaaccgtacctttatctctaggcgcctatgatgtcttattatgtagatcatgtcttgcttgagagttccaaacctcgcccttctaaaaaagtacaaacccacgtctagggatatacgagcgccattcttcagatggatcgctcttcgatagttatttattgtagccgggataagcaggggttcctccttccgtcctagtttttttttagtacaagtagctaagggggctgggttgcgtctttcttgtgaaagaatacttctgcgcacctgctgaaaggaagtcaaacggagattaccggttccggagggaccaaccattgtacttatagggtcaggtctatcttgcccttccaaatcacccatgtgtagctccaccgcacgagtcagaccttgtacgggcttttccacaggcttgaggcagactctttccttattgggcttcaatccgtttgtctttgcctcctctactgagtcagtgacagaagtgcagcagccaataatacgtatataagaagaggactgcttacgggatcaaactatcaatctcataagagaagaaatctctatgccccctttttcttggttttctcccatgcttttgttggtcaacaaccaaccacaactttctatagttcttcactactcctagaggcttgacggagtgaagctgtctggagggaatcattttgttgaaatcaattaatccaatatg

SEQ ID NO: 34099 - DNA, 3003 bp, Unknown
  misc_feature (1)..( 3003): 2750-1469P.txt file - cDNA_ID_3074501; gDNA_ID_1620740; Annot_ID_49574
tagatttaatatttggacacctgaacatactaaccgatttaagccatcttatttatcatgcatatcaaattatgtcttaaccagaatcaactttaagacattgatgtctccattatttgcaaattcattacaagttgttttcttttcttgcatgtttgtgtcttcacttccatatatttattcctaaaaactaaagtttttttgctaagaattcctaaactaaagttgcttactctgaagttccaaataaataaataaaactctgaagttctaatgaattttgttgccatatatgcggtaaattcttgtgattcattttttctcatatgatctatattttttttttgggggcaaaattaatctgtatatattgtttacataacctcactaatcaaagcttatttgtttacatggtcaaaatatgaataaattttaaaactttgactagacaaccaatattaaaattgagcatcttttattttataagttctttttttttttgtgcaaaatttttataagttctttatacgaataaatcaaagaaaactacatatagtaaaagtacgaccaactcaaataattgtaggatgtgtgataaagtacatatagcgtatctagtttcttttttgaagtacagagtataatctattaaccaaacatttttaaagtaatatatagctatgttcaaaagaacgaaataatccgtagaccgtgattgtgccgagattagtgggagacattcggacgaagttggctttatactattacaaaatcattatttacgctactaaatgcaagtaatcaacatcaagtgtatatttatttcgtccttatacacccaattgcttgtttaaatattaataatcattttgactttggaatgataattataaagttctgattatgatgttttaacaattcagaaactaaataatcatacaaaatctgttatcatgtaaaggttattagagagaagcggtcgctactcgatattggaagagcagtacttacgcatgacacaaaaatgtcaaatatttatttaattcatatccatattttaattacggatttacataaaactgagagagtttttaggaaatcttccagatttagttgacaaaatttccaaaattagctagcgatcaagagaatcatccgcttcctttgggaaacacacaaatacgaatatctctcttaatccgattttctcttctcatttgtgtgattttggaacaataacaatatgttcaacaaaaaccaaggatccaacggtggttcatcttccaatgtcggcatcggagctgattcaccttaccttcaaaaggcacgttcaggcaaaacagagatcagagaactcgaagcagttttcaagaaattcgacgtgaacggagatggtaagatctcgtcaaaggaacttggtgcaataatgacgagtctaggtcatgaggtaccagaagaagaactagagaaagcgatcactgagatagatcgtaaaggagatggttacataaactttgaagagtttgtggagctgaacacgaaaggtatggatcaaaatgatgttttggagaatctgaaagatgcgttttcggtttacgatatcgatgggaatggttcgatatcggctgaggagttgcatgaggttttgaggagtcttggtgatgaatgttcgatcgcggagtgtaggaagatgattggtggtgttgataaagatggtgatggtacgattgattttgaagagtttaagattatgatgactatgggatctagacgtgataatgtcatgggaggtggtccgaggtagagtttctttcgtggacactgctgaaactgaattctccgtttcttcttctttttcgtgttcttccttttcgtcgtcattgtttattattccaccattgtttcaatcttttttttttttgttgttgtctttgttctttgggatttgtaattcccttcaagataacgtgattttaaaattttaatttatctctcttttttttgtattcagttctgctttgggacttgattaatttgaatgcatatacagtgaaaattatgtgaataaataataaccacaaatctcatttcttactctacattataagctaatttctttgacatatgtctattgcatttgtttcgaatgctagtttttgggtttgtttttacacctaaaaattatccctttattattaaaagggaagtacaaattgaaattttgtctaatttggcctcaattttgattttaattttggattttgttctttgctattccaaatcattaagggtaatttggtcttaacaatcttctaaattttatatgattcgattcaatttaaaccgttcaataaaattaatttccttcaatctaaaccgctcaacaaaaataaggaatttatgtcgtttttgaaatcaaaatatgatcacatttcatccctaaaaacactattcaatctcaaaatcaataatcaataatattcaaatcatatattacgattcttcactaatcattagaaatttatatttataagtttagggtaccaaatttattcaaatatttagtataagaaccaaatatgttgataatcgaacatcaaaatgtaacatctgttcatctttgtctttaagtttttacaaatgctttgaatggttccaaatttgcaatgaacaaaacgatttttatttaccgtttatgaattttggttcgcaacaaactaacataaaaagatgaactcatttgtaaaatttttggtgtatgcatattaaaaaaaaatgatttaacataactaaattttgtaaatttttaatacaaacgcaaacgttatttttttcaaaagcccatttacgacgaaaaactaactaacaagcccattagttttagtattccttttaacaatggacccaggcgccgaataaaaactaaacccggtccggatcttaatcctctagcaacagtgaaccgggtccgcttcgtcggaactcatggccaattcgaaaatg

SEQ ID NO: 34100 - DNA, 3003 bp, Unknown
  misc_feature (1)..( 3003): 2750-1469P.txt file - cDNA_ID_3074501; gDNA_ID_1620740; Annot_ID_166394
aaacgtcgaccaaagtagatttaatatttggacacctgaacatactaaccgatttaagccatcttatttatcatgcatatcaaattatgtcttaaccagaatcaactttaagacattgatgtctccattatttgcaaattcattacaagttgttttcttttcttgcatgtttgtgtcttcacttccatatatttattcctaaaaactaaagtttttttgctaagaattcctaaactaaagttgcttactctgaagttccaaataaataaataaaactctgaagttctaatgaattttgttgccatatatgcggtaaattcttgtgattcattttttctcatatgatctatattttttttttgggggcaaaattaatctgtatatattgtttacataacctcactaatcaaagcttatttgtttacatggtcaaaatatgaataaattttaaaactttgactagacaaccaatattaaaattgagcatcttttattttataagttctttttttttttgtgcaaaatttttataagttctttatacgaataaatcaaagaaaactacatatagtaaaagtacgaccaactcaaataattgtaggatgtgtgataaagtacatatagcgtatctagtttcttttttgaagtacagagtataatctattaaccaaacatttttaaagtaatatatagctatgttcaaaagaacgaaataatccgtagaccgtgattgtgccgagattagtgggagacattcggacgaagttggctttatactattacaaaatcattatttacgctactaaatgcaagtaatcaacatcaagtgtatatttatttcgtccttatacacccaattgcttgtttaaatattaataatcattttgactttggaatgataattataaagttctgattatgatgttttaacaattcagaaactaaataatcatacaaaatctgttatcatgtaaaggttattagagagaagcggtcgctactcgatattggaagagcagtacttacgcatgacacaaaaatgtcaaatatttatttaattcatatccatattttaattacggatttacataaaactgagagagtttttaggaaatcttccagatttagttgacaaaatttccaaaattagctagcgatcaagagaatcatccgcttcctttgggaaacacacaaatacgaatatctctcttaatccgattttctcttctcatttgtgtgattttggaacaataacaatatgttcaacaaaaaccaaggatccaacggtggttcatcttccaatgtcggcatcggagctgattcaccttaccttcaaaaggcacgttcaggcaaaacagagatcagagaactcgaagcagttttcaagaaattcgacgtgaacggagatggtaagatctcgtcaaaggaacttggtgcaataatgacgagtctaggtcatgaggtaccagaagaagaactagagaaagcgatcactgagatagatcgtaaaggagatggttacataaactttgaagagtttgtggagctgaacacgaaaggtatggatcaaaatgatgttttggagaatctgaaagatgcgttttcggtttacgatatcgatgggaatggttcgatatcggctgaggagttgcatgaggttttgaggagtcttggtgatgaatgttcgatcgcggagtgtaggaagatgattggtggtgttgataaagatggtgatggtacgattgattttgaagagtttaagattatgatgactatgggatctagacgtgataatgtcatgggaggtggtccgaggtagagtttctttcgtggacactgctgaaactgaattctccgtttcttcttctttttcgtgttcttccttttcgtcgtcattgtttattattccaccattgtttcaatcttttttttttttgttgttgtctttgttctttgggatttgtaattcccttcaagataacgtgattttaaaattttaatttatctctcttttttttgtattcagttctgctttgggacttgattaatttgaatgcatatacagtgaaaattatgtgaataaataataaccacaaatctcatttcttactctacattataagctaatttctttgacatatgtctattgcatttgtttcgaatgctagtttttgggtttgtttttacacctaaaaattatccctttattattaaaagggaagtacaaattgaaattttgtctaatttggcctcaattttgattttaattttggattttgttctttgctattccaaatcattaagggtaatttggtcttaacaatcttctaaattttatatgattcgattcaatttaaaccgttcaataaaattaatttccttcaatctaaaccgctcaacaaaaataaggaatttatgtcgtttttgaaatcaaaatatgatcacatttcatccctaaaaacactattcaatctcaaaatcaataatcaataatattcaaatcatatattacgattcttcactaatcattagaaatttatatttataagtttagggtaccaaatttattcaaatatttagtataagaaccaaatatgttgataatcgaacatcaaaatgtaacatctgttcatctttgtctttaagtttttacaaatgctttgaatggttccaaatttgcaatgaacaaaacgatttttatttaccgtttatgaattttggttcgcaacaaactaacataaaaagatgaactcatttgtaaaatttttggtgtatgcatattaaaaaaaaatgatttaacataactaaattttgtaaatttttaatacaaacgcaaacgttatttttttcaaaagcccatttacgacgaaaaactaactaacaagcccattagttttagtattccttttaacaatggacccaggcgccgaataaaaactaaacccggtccggatcttaatcctctagcaacagtgaaccgggtccgcttcgtcggaactcatg

SEQ ID NO: 34101 - DNA, 3003 bp, Unknown; identical to SEQ ID NO: 20458
  misc_feature (1)..( 3003): 2750-1469P.txt file - cDNA_ID_3074511; gDNA_ID_1620740; Annot_ID_166420

SEQ ID NO: 34102 - DNA, 3000 bp, Unknown; identical to SEQ ID NO: 20460
  misc_feature (1)..( 3000): 2750-1469P.txt file - cDNA_ID_3074516; gDNA_ID_1620740; Annot_ID_166414

SEQ ID NO: 34103 - DNA, 3000 bp, Unknown
  misc_feature (1)..( 3000): 2750-1469P.txt file - cDNA_ID_3074521; gDNA_ID_1620740; Annot_ID_166401
tggtgccgctgatggagaacttgtctacttctaagagagtctttgatctacaagatttgctcctgcgttttacctttgataacatatgtatatcggcctttggtgtttacccaggatcgttagagacaggtttaccggagattcctttcgctaaggcttttgaggacgccacggagtatacacttgcaaggtttctgatacctccttttgtgtggaagccaatgaggtttctagggattgggtatgaaagaaagctgaataatgcagttagaatagttcacgcgtttgcgaataagacagtgagagagaggaggaacaagatgaggaaactcgggaacttgaacgattacgctgatctcttgtcacgccttatgcagagagagtacgagaaagaagaagataccactagaggaaactacttttctgacaagtacttcagagagttctgcacaagtttcataatcgcgggtcgagacactacatcagtggccctcgtgtggttcttctggctagttcagaaacatcctgaagtcgagaagagaatcctaagagaaatcagagagattaaaaggaaacttacaacacaagaaactgaagatcagtttgaggctgaagatttcagggaaatggtgtatctgcaagctgctttaacagagtcactgaggctatacccttccgtgccaatggagatgaaacaagctttagaagacgatgtgttacccgatgggacaagggtgaagaaaggcgctaggattcactactcagtctactctatggggagaatagaatcaatttggggaaaagactgggaagagttcaaaccagagagatggatcaaagaaggaagaattgtgagcgaagatcagttcaagtatgtagtgttcaacggaggtccaaggctgtgtgttgggaagaagtttgcgtatacacaaatgaaaatggtggctgcagcgatcttgatgaggtattcagtaaaagtcgtccaaggacaagagattgttcccaaactcaccaccacattgtacatgaagaacggtatgaatgttatgctccagcctcgtgactggtaaggtagttcggtttaaaaacaatatagtactaataaataattgatgttgaacgatattctaatcgttttagtatctaaatttgtttgtggaatatggttaactaaaaagactattttaactaattcggtttggattttatgtgcaccaaccctagtttacttcaagcaatggacatatgagagtcacgaattgtatgtacatgaaatgtctatttaaaaagctctaaatcttataataatgaaagctgatcacatgaacatgatactgccctccactttcttccacaatcgtcatggccctttcgataatgggtgcaaaagaagtcggccctgtgacagaagtaaccaaagatcaggtaacagaacaaacaaacacagacacagcagaaaaagaaaacagagattcttaatctcaacctacaagacgcagctgaggaacaatctctctgtaccgtgaaacgacatcttcaaacccacttaatctcaatcaaacagagattgtttacagaatatatcatccgggtaaaaactgaagggattctgatcatgtgttgtagctgcaagaatcaaacatacaaacccataaaaacaattaaatgaaacatttctcttaacacaagaaagactaacaagtctatgttctgcagtcattaccatctccaaatccataacatggaatcaaattatcttcatcgaaagcatataaagtctttccaatgacagatatcgcttgctggtacgggtttggacttgttccaatgtaatgcaagctttgcctgttgaatgatctcgctcctaaattcaaaaccaaacccaccaaaacattactttaaaaaccttccaacttcaaacacaattgcttaacatacataaataaaacttctaaaacttttgatttaattgccacagttgccacagttgggcctaacaaataaaacgggcttaacttttgccacagttgggcctaacaaataaacagttagcctaccaaagcccaaatattttaattgaaataaattaattaagagagacatagtaaactaacccgacgagattgctttcttctgtcttcttcgccgtagaatttgaagttcctccgtcgtagaagatcgtctcttgtttcacctactccgatatagcccctctctgaattctccatcctccgagcagagaaggctgttggtagaaagttatattctcaaattttctaattttgcctcctccttggcgaagcaattgcgtcaattccttgcacgccactattacgactacgaaaatctagatcggagagaagactaaattatcttcactgatcgcacggtgagatggctaacggagccgatgaggatgctgtcctcagcgatgtcgagtccgatgaaccagcgcctgttgttttaaaggattcgccgcgggaagaagcatcggatgagaggataacggagctaatagcggagcttgatcgagagaagaaagctcgagaagcggctgagagttcgaaatcggagcttcaggtttcgttcaatcggttaaaagctcttgctgtagaggcaatcaagaagcgcgacgagtctaagcgagaacgtgatgaagcattgaaggagaaggagaatctaacaaatgagcttgagaatgttaataaaggtaaggatgagatgtcgaagaaacttgatgaggctttgagatctagagatggtttaaaagcagagattgagaattcctcgcatatgttggtttctgggattgagaagatatctggtaaagttagcagctttaagaatttttcaaatggtggtcttcccaagtctcagaaatatacaggtttgacttctgtagcttatggagttattaagcgtactaatgaaatcgtggaagagcttgttaggcagattgatacgactgcaaagtcgaggaatgaagctagggagcagatg

SEQ ID NO: 34104 - DNA, 3003 bp, Unknown; identical to SEQ ID NO: 20468
  misc_feature (1)..( 3003): 2750-1469P.txt file - cDNA_ID_3074532; gDNA_ID_1620765; Annot_ID_50108

SEQ ID NO: 34105 - DNA, 3003 bp, Unknown; identical to SEQ ID NO: 20468
  misc_feature (1)..( 3003): 2750-1469P.txt file - cDNA_ID_3074532; gDNA_ID_1620765; Annot_ID_167328

SEQ ID NO: 34106 - DNA, 3003 bp, Unknown; identical to SEQ ID NO: 20468
  misc_feature (1)..( 3003): 2750-1469P.txt file - cDNA_ID_3074532; gDNA_ID_1620741; Annot_ID_166435

SEQ ID NO: 34107 - DNA, 3000 bp, Unknown
  misc_feature (1)..( 3000): 2750-1469P.txt file - cDNA_ID_3074539; gDNA_ID_1620741; Annot_ID_49609
gaaattatctacaattttcacaccagagttcctaatgctaaagacggtcgagattcaactgatattgaaatatatggaatgcaaggaattccaccccatgtcttgactgctcattatggagaagaaggtatgcatttgagatagtgagagtactgtttagattatgagcaattgatttagagaagtaaggcgataaatttgtatgtctcttcatcaagtgttgtagatctattgcatctagtggtcatgaattcgttttgattttgcatgcggctttttgccttatcaaagttattatatattattgttatgtttgcttgtttcatatggtaccttttgaactgaagtcatgttttctgcagaggatgagcctccagccaaagttgcaaaagttgagattccttctgcccctcttggtggtgtagttcctagaccatatggaatggtatatccgcctcaacaagtacctggtgctgtacctgcacgaccaatgtatgtactaattatactatactctctctatggccgttacttgttgaattcttagatgttgtctctgtttttaaaaatccgatccatgctaaatgatggggaactttttttcttttagttctcttgatgcaaaaggttcttggtttctttagtttgtctctgtcctagaacttttctacttttgttcttctataagaccactataacacccgtagtaaacattttttgaaatagatcgttatctaagatattgttgcacttaaccaactatgacccataaggttcttagtttccctagcttgttctcgtgatttttcaggatagaactttgtcctagaaccattcttttgctcctcttcaagaccacaataacacctgtagtaaacagttttttgaaatagttcatgatcttagatattgtaatatgtatggctattgaccatgataaaatatttcgtgttagcaggtattatccgggtcctcctatgcgtcatcctgctcctgtatggcaaatgccacctcctcgtccgcaacaatggtatcctcaaaatccagctctttctgtacctccagctgcccatttagggtatcgaccacaaccactttttcctgttcaaaatatggggatgactccaactccaacctcagctcctgccatacaaccatcaccagtcactggagtaactcctcctggaattcctacatcatcacctgcaatgccagttcctcaacctctgttccctgttgtgaataacagcattccttctcaagctccaccattttctgctcctctgcctgttggtggggctcagcaaccatctcatgcagatgctttaggatcagcagatgcttatccgcctaacaattctattccaggttcaatcccaagttcgtagaatcattgacttacatttggtttagctgttttgtatcaaattgtaatatctttttcatgttttgttgccgtaggtgggactaatgctcattcttatgcctctggcccaaacactagcggtccttcaattggtccacctcctgtaattgcaaacaaagctcctagcaatcagcctaatgaggtctatcttgtatgggatgatgaagcgatgtctatggttagtttattcctaatttcttatgcatcatgttggaatggttacaattggaaaagtttcgagtaatgaaccatttggttttccaatctgacgcaatgtgtctgtatctgcaggaggaaagaagaatgtccttaccaaaatacaaagtgcacgatgaaaccagccaggtaagttctgatttaccctttttaaagttaagaagagtttgcttttgcaagtctaacccattcggtaggctttatttatacatttctgttccagatcctattgtttctgtgctaagaggtaccaccgtattattcagtttataatttcttcccttagaatatgataagaaggacttaggcaagaaacttgagcattttgaatcaatgttcgaaaggtatcatttgtagcttgcaatagtaggtagtgagaaacatagcgtttgtatctgtttgtttttcattatatttcctgtctattgtattgtattaaaaatgtggtgattggttccacaagatcatactctacaggtttggtttcaaacccaggtcagctctttttatattcttaactctgcaaagtttggtacctttgcacaatctcactgccttggggaaccaaaacaatacgcacttaactctttcaaaataaagcatccaacttcttaactcaacaccaagtttgtttcttttggtttgcagatgaactcgataaatgcagcgatagacagacgaatctcagagagtaggcttgctgggcggatggcgttttagaatttggcaccaaaccaaaccagcgtcaaagaaaaggcgatatggatgaaggctttgttacaacaacaagtcttcactcacttttgttcagatactgaatttatgatctgattttaagttattaactttccatctgttgtattctttagccaggtgagttagtttaccattacattgtttagggatctcagagatgttttttctcagaagtttagtcctttttttttttggtcgttggagacttggaggaagaactttgtctccttttcttctgaattgatcaaagtattatattatacagattcacccaaaatgtttgcaccatgttgttcaatattttgccaaaacaaaattgactaatattccttccattaactgtatattcaaactccaattgatacgattagtatgaatttttgttgtattgctactttgctagtagtaattatatcgaatacaaagttagggactacgttggatttgtcaaaaagtgaggggcctatctgtaatattgagttactttgtcaccacttccccaaaacatcaaaacctctaaaaccctcggaagcctcttctgttacatttcgttcaaatctgtacttctccgagatcgctacttcgccattgttacaaaaatg

SEQ ID NO: 34108 - DNA, 3000 bp, Unknown; identical to SEQ ID NO: 20466
  misc_feature (1)..( 3000): 2750-1469P.txt file - cDNA_ID_3074539; gDNA_ID_1620741; Annot_ID_166455

SEQ ID NO: 34109 - DNA, 3000 bp, Unknown; identical to SEQ ID NO: 20465
  misc_feature (1)..( 3000): 2750-1469P.txt file - cDNA_ID_3074564; gDNA_ID_1620741; Annot_ID_166463

SEQ ID NO: 34110 - DNA, 3003 bp, Unknown; identical to SEQ ID NO: 20467
  misc_feature (1)..( 3003): 2750-1469P.txt file - cDNA_ID_3074602; gDNA_ID_1620741; Annot_ID_166439

SEQ ID NO: 34111 - DNA, 3003 bp, Unknown
  misc_feature (1)..( 3003): 2750-1469P.txt file - cDNA_ID_3074638; gDNA_ID_1620742; Annot_ID_166506
aaatctccaagaactttcattacgtgactgccgagagctcaagcgtcttccccctcttccatgtaaactggagcagctaaacctagcaaactgtttctcattggagagtgtatccgacctttcagagttaacgatcttgacggatctcaatctcacaaactgtgcgaaagtggttgatattccaggcctagagcacttgacggctctgaaaagattatacatgaccggatgtaactccaactactcccttgcagtaaagaaaagactttccaaggtgattccaaaaactccacagaatctcatcatggcctatttaaaaaactttcttacaccacttttgatttgttactgcaggcttctttgaagatgatgcggaatctgagcttgcctggaaacagggtcccggactggttctcgcaaggccctgtcacattctcagctcaaccgaacagagagctcagaggtgtaatcattgctgttgttgtggctcttaatgatgaaaccgaagatgacgactatcagctgcctgatgtgatggaggttcaagcccaaattcataaacttgatcatcacaaatgcaccaacacattgcatctctccggagtgcctagaacaaataacgatcagcttcacatctgccgatactcagcttttcacccactggttacgatgttgaaagacgggtacaccatacaggtgatcaaacgaaacccaccaatcaaacaaggcgttgagctaaagatgcatggcattcatctcgtttacgagggggatgatgatttggaaggcagagaaaatactttacccgagactcaacaaaccgtttctcagaaacttgccaattttttcagctctttcgaagaagaagaaggtgaaaccatctcagaaagtgaatctacagttatatgatctgctagtgcagataggttaagaaactgctcacaaataatcttaatcgatacaaaatgtttgttgctcatatacgatttggtgttttggcttttgtgtttttctttgttccttgtctctttagtctttaccttttgataatacaaacaatataaataaataaaaccaaaaagaagaggaaactcttgtttccaatgatctcgggcattctttaataacaatccaacagaactgtgaaggaatcttcttctgtgttttttgttttgacggcttccatctttaagaaagtcaatggatagaaaagaataaaatagaacatgttgcttgtgtgtcctatagcactaacgaaaaagaacactgcatctgcgtatcctttttgtctttcaaaaccttaattagcagtgtgtgccgttctgatttaagatagatatggaactgcctgacgttccggtgtggagaagagtcatgtccgttgtttgggattatataaaactgtttgcgtgtgatgtaacactaaagcctaaagactctaaactataataactatataacttctttactgattgtcgtgaaagagtttctgcattctttgaggcgttgactttcaatattgatatcgaagaagaaagatcggagataatgatgaagaccggtgctgttgtttccaatccacgttcgagggtcaagtgggacgcattcctgagtttccaaagagacacgagccacaatttcacggatcgtctctatgaagcgcttgtcaaggaagagctccgggtttggaacgatgatttggaacgtgtggatcatgatcatgatcatgagctacgtccaagtctcgtggaggctatagaggactcggtggcttttgtcgtcgtcttatcccctaactacgctaactctcacctgcgcctcgaagaattagctaagctctgcgatctaaaatgtttgatggtaccgatcttttataaggttgaaccacgggaagttaaggaacagaacggtcctttcgaaaaggattttgaagagcattccaaaagatttggcgaggagaagatacaacgatggaagggagctatgactacggtcggaaatatctccggattcatttgcgggtatgtatgacttcaatttctcatctctagttttgtttccgcatttctaatctcttttatacaagtaagtttggtagagatactttgacatatgctacatcatcatctaaaacttctaagcatcatctttatgtttcttgaaatcatctctcccattcaccatttaatttactacgaattttcgaaaattttggaattggaaaagactctggttctcttattgtctttcaactactaaagccaagtttttgttcagagatcaaaactatatgagtaactataggacataggcaaaatattcattagaatttctttgatctgttatttgctttgattcgattagaaaatttcggatagatgtgactacacgaagcaaatcaaaatactaaaaatcaatatcggttaaactgtagtgctctgcaatacgtatatagaaatagacaataattacagatataagtattcatatatatatatatatatatatgtatataagttttgtgtatatttattcatcaaattagttatttaaatattaaattttaaacaaatcaagaaaagtatatttgaatataatgttgttattattggtttaaaatttgtttttaacataatttatttttataattaattaaaaacttttaagaagtaactcggatacaccaaaaatctaggatatcattttgtgccaaggtactactaattaatctaagcttagagtaaaaaagatgagtcaagtaatttaacactgcgtgtcgttctgattgactacagaaagaactgtgtgtcgtttcagaaataagggaaaaagagagtcaaatgcgaagttttttttttcttttttaacaaaaccacaaagtgttgaccttttcccacaaaaatcgaaaagcttggtcgtcatcgttgtaatgtcccagattctggaatccgagaatcgaaaagcgtcatgaagtgaggtttgcaggagatccaattggagatg

SEQ ID NO: 34112 - DNA, 3003 bp, Unknown
  misc_feature (1)..( 3003): 2750-1469P.txt file - cDNA_ID_3074642; gDNA_ID_1620742; Annot_ID_166505
tgatacgtttttgagtcactatgtagcttaattacgatcttgtgggtagtttctgctctgtttctggagtattattcttaaagtttccatctttgtaatttcatatcagtgaatattgttgatcatgttctgtggttgatgaaggttcttagttatgggaggaagaggaaagtgattctagaagcaccactctacgataaagattgtgttttgggcagcattttagctgctcatttcctttcttcatctgatccttctagagctaattcctatgttgaagctgcggcatctaatctcgtcagtttattatatccactgtctttgtatttcagattctactttggttttgaggaaacttcctgagtttagtttgttggcttcaggaacaatctacaccttatgagaaagcggtttacgaggctgttacttacctaatctctgaggatagggatgacgacttggcttttgaaatgcacaccaaggttggttatcactttcattgttagtttatctgaaatgttattctagaatctagttttatatttttgtatctggcacccaaaaaatggttatggttcagaatgtaaagttctgtgcctttttgagtcacttgtttttgaattttaattgtggtttgcagctacttaaaagattcccaaaggacttggcttctttgaaaagagcgcagcttttaagtttctacatgggtcaacctgatcccttcttgggtcttgttcagcaggtacttaagttcttattgatagtgatggtcactgaatgattcacctgtctaagactataaaagttgcttaatattgtaggttctacctgcgaatcaagaagaaagttatattcatggtttacttgcgttcccattgttagaacttggtcgaatggaagaagctgcggcagcttccagaaaaggctatgagataaacaaagaagacgcttgggcacatcactgtgtgagttacataacattgagcatttgcatcctctattctcagtttccatgtaataattatcactcagtagtttttactaatgatgttttctatctatcttacttatttgttgcagttgtgtcatgttcttcaacatgaatgtcggtttaaagaagcagtggagttcatggaagcactcgcaggaacttggccctcttgctcatccttcatgtaaagcattccctcttacctgaaggctctcacagattatcaagttcttctcttattgttaacaatccctgatatattatttttttaacatgtccataattttcaggtatacacacaattggtggcatgttgctctctgttacttagaaggagggtccccaatgagtaaagtagaggagatttatgatcatcacatctggaaagaattggagaaagacgatgctgttcctcctgaagtaatcctctttttgattaacaaatttatgcttttgcgtcatctattcaatattcaactgtctgcaactctttaggtttatctcaatgcattgggcttgttgatacgtttagatgtaagagatgctcttgatggttttgaagaccgtctcaaaaaccttgcagttcgtttaactaatcaggtaagccatacactagttttatatcatcccaaaacggttgcagttatacgagttatcttgttgaataagtttttatttttcggccacttgctttaacatttcaggcaaactggtatttggagtggcaccttgatatattgatagtttgggcactagcaaaggttggagagacttcaagagctcatgaattacttgagggccttaagttccggttagtgtgactttcttttattctgcagtttctaaatgataccgaatttgtcatgaacttgtgttgttcttgcagattatcaaagaagaacaagaagaagcaacaagtgatgcagaaagggattcaggtttgtttattccccctccctctttgatcgtctttctttatcattgtaactagtactcaatatcagtcttgttttcatataagcttggggaagctgtgtatgaatacgcaaggggtaactacgaaaaggctctagaactactgggttcagagttcaacgccattggttacaaggtaaaccgttcttcagcgacttgctcaaaatactctgaatcaaacacatttctggtggatcttttaaactgttttatggttaataatagatcgttggggcatcagacgaacaaatagatgttttcaacgaaatgtggtgccagctgctgctaaagacaggccaatcctccacgggtaaggcttgttgtagagtcttactaatttggatactcgtcttgcttagtatgatgataaacaatcgtggttctgatgtatgcagccaaagaagtaatcagagagaggattaaggccagagatggtattcctttcatgtggcgtttgctggtatacattcaaaagcagaacatcactttgttttagtgtactatatgtgtttttgctatgagaaaatgatgtcgttgtggttgcaggagaaaagttactccatggaaggcaatgcagaggctgagagtagtgcacgagagagagctaagaaacttgaatcttgttatttctaactttgcttcaaaaatccaataatgacatgtgtgtatacatgtttttaaataagtatagaataaaatattttgctactcgtgtcctacttttttgtttaccaaaaggtaaatgaataagggggtgtattgaaagtggaagtttaagagatttgtgtagaatttataaatcctatgttattcaaacatgaattttaaaaagtttcatgaaattcagtgttattgaactaatgatttaaaaatccaccttaaaatccactgttattaaaaacaatttgtggatttgaattttaatgattttggaggatttgagaggatttctttagttaaaaatacagaaatccaaattccatggctaccgccagtggtgtaacaaactgtggaatgctgtcagatttgcgatgatg

SEQ ID NO: 34113 - DNA, 3003 bp, Unknown
  misc_feature (1)..( 3003): 2750-1469P.txt file - cDNA_ID_3074646; gDNA_ID_1620742; Annot_ID_166504
acactcaacgcagaagtctctagattagtcatctcaagggttttgttttatgtttatgaaacagtgttttgcggcggtggatgcggtggtcggagcaaaagacgacgaagggaaaatggcggcggtgggaaagctgatggagtgtttggcgatacttgaagaaacgtttcagaagagcagcaaaggattagggttctttggaggagagaccatcggctaccttgacattgcttgttcggctcttttaggtccgatctctgtgatcgaggcgttttccggcgtcaagtttctccggcaagagacaacacctgggttgatcaaatgggccgagaggtttagggcccatgaagctgttaagccctacatgccaaccgtcgaagaggtcgttgcattcgcaaagcaaaagttcaatgttcagtgatgcgttttttgcttttaaaagcaaaagcaatgttgttgaatacgaataaaatgatgtttgttgtctttgagaaactttaaatttgtctgtgttttgtgccaaaacttctgattaattggtttttggtctttgtgcgttactattatcaattttattcttattatttgccatagcttatgattaaattgatcatagaagaaacatagaggctttaggttcttgtgctgaaccaagtttggcgtattcagtattttacattcttgtataaaattgaatgcatatgtcataattctggtaatacttgttaaattttgttgttcctgattaacattaccatacctattttgcaatgttttcatgacaaatattgccatactaaaattgctggaggaaacctcacctttcaatcgatttgactaaagtattgattgtaccaaactattcatgcctcaccttaaatttggaaacttaattgtgaaacatgtcaaatatggaatatatattgaataagattacaacaactcagtaaaacaacaaggtccttaatttgaaacagttaagcagccatgaaattatcgcaaatagctctgatttgcatagttatagcttccctcttcgctatgcatgagtgtacgtacagagcttttctaatatagtatacacacacgtatatgtcaaatgtctttttttaatcatcaaagttttgtgtgtctcaaatcaactttgtaggtgagagattggaggctacagaggaagagaaatcgagcaagatctatgtcccaccatgttacgaaaccatttgctcgttctcacttaaaaaggattgttggtgctgcttcgaacctttagttcacaaaaatctttgttggggagtacatgattttccgaacgccaaagagctttgcttcaacgaatattcaaagaagatttaaatcctttttattagagaataataatgtattctctgtttcgtgtagaaagttttttttcctcttgagtgcacaacaagttatgtgtttgaatctgcaaaaatttactggtcacatgttcatgctcttatcaacgagaaacacgacgtctaattccacttgcctccctcattcactctcttctatataaacaaattccactttcttccctctcactcactctgtcatctataaacaaattccacttccctccctctcactcactcactctgttataaatgaaacctaaaaaaaaacttgagagatcagatcaacaaaaccaagagaaaacatggctcagaacgatacagtgaagctgataggttgttcggatgaccctttttccattaggccacgagtggctctacacttgaaatctatcaagtacgagtacttagaagaacctgatgatgatcttggggaaaagagccaactccttctcaaatctaaccctatccacaagaaaacccctgtcctcattcatggtgaccttgcaatctgtgagtccctcaacatcgttcaatacctcgacgaggcttggccttctgatccatccatccttccttctaatgcctatgatcgtgcgtctgctcggttctgggctcagtacatcgacgacaaggtaaaacagtttagagactcacttctacatgctctgttttgcttcttgtcaaagtttgatactttagtctctgttattaataaatctgtttagattagtcaaatcaagagttatgtgtctgaaacagtgcttcgaggcggcgaatgcgctgaccggagcaaacaacgacgaagagagaatagcggcgacgggaaagctgacggagtgtttggcgatactagaagagacgtttcagaagagcagcaaagggttagggtttttcggaggagaaaccatcggctaccttgacattgcatgtgcggctcttttgggtccgatctctgtgatcgagatgttttccgccgacaagtttgtccgggaagagacaacacctgggttgatccaatgggccgtgaggtttagggcccatgaagctgttaggccttacatgccaaccgtcgaagaggtcactgaattagtaaagcaaaggattgaggagggttttaagcgaaacttcaaaagcaatgtttcgacttcggaatatgaatagttgatgtttgaatattttaatgctttctgtattactattttgtgccaaaacatatgcacttggatttttctttcttctatttgatatctttgtgtttttattgattttgaagcctcatttctcttagttttctttatttcacattcatgttttagcatatagtttcatattattatttggttaattgtttatatatactgaaaaaaataaaataatcttaattggtttatccaaaaggcgagaaaagccaaaaagggacacgtcatactactcactcgtaacaagacacgagttttttttaataacaaaatgaattgagtgattgatgacgacgacaagcaaaatgcaaaatcgctgtctccttcatgcttcgatcaatcaaaccatcatcaaacccataagaaagagaccaacagtgttcctgtaggaagcggcaaacttgcagctctgttctcttgaaatg

SEQ ID NO: 34114 - DNA, 3003 bp, Unknown; identical to SEQ ID NO: 20471
  misc_feature (1)..( 3003): 2750-1469P.txt file - cDNA_ID_3074650; gDNA_ID_1620742; Annot_ID_166501

SEQ ID NO: 34115 - DNA, 3000 bp, Unknown
  misc_feature (1)..( 3000): 2750-1469P.txt file - cDNA_ID_3074662; gDNA_ID_1620742; Annot_ID_166498
gactcattactagagggatcaaaagacacttatcagttatcacgcacacaggactgtaatcacatccataaaaccttatactataaccggataccggtttaaacaaagaaccaacattgaaccacaacctaagacattttctatcaaagtcttcacatcacgttctttacgcgcgtgaggtaaaatgttcaacaagttacgtaggtggaggagaaccttcgtaatactttttcattagtcttttcttcatttgattttgcgaaatttctaaataattgcgagctgcataatccctccgactattaacttacaaagtacccttttagccaggctttttctgtcttatttttttgtcattaaactatataaccaaacacaaacatcatctttctccttcatttcacaaacttaaaattctctgtttttgtttcttcttctttcaaaatctcaagcaaaagaaaaaatggagctattcacaaaaggtaacaacgttaagttacgtagccacctagataagtttttagtcgccgacgatgaccaagaaaccatccgtcaaagccgtaaaggagatgcacggcgtgccgtttggacggtggagcccgtcgtcgataaacctaatctgataaggttaaagagcagccacggcacgtacttaacggcgagcaacaaaccgttattgttaggtatgaccggtgagaaagtgactcaaacggcgtcgtttaacaagctgatggattggcaaacgcagtgggaaccggagcgagatgggtttcaggtgaagctaaaatcttggtgcggtaagtggatgagggctaacggtggaacgccgccgtggagaaactctgttactcacgatgagcctcatacgtcaaagacaaagaactggttgatttgggatgttataactattgatggttctgatcttgaaaacatgtctgatggtgatgaaagctctgtttcttctccggtcgggtctgaattcggatcagaacccgggtcacctgtttctgccaggtctacgaagagtagtattagccggtttgcttctcttggtttatctacgtctccgagatggtcctcaaaaccggtaagtttgactaagtcttttattcagtgtgcattgattagtttttcttaatttctgtgtttaaattaaggctaatatagaaatttattattgtgagttgaacttagacaattctgtatataagaaattagttggcatgcatgaacatatggaaaaaaagatgaggattacccgtattagtatctacaatttaaagaaaattacatgatctgtatcatttcttttctccactaacatagataatgctccacaagcacacacatcgttttaccaacctaataccaccaaaatgtataggattttttaattgtatagttttgattagtttatctattataatagactatagttgaaaatatgacacttaacaatccaacttaagtttacttcaatgattgaaggatagttttgaaatgcttgtagtagaacctctaaaatgtaactaagtgactgtatatttcttacaaaagctatacctaaggatgattaaagaagaaaaatacgattattattccttaacaataaaaacttgtacctaatggcttaagataaacaaatctagtgccagttaacataagacaagtgtaacaaaaagtaaggtaaaaaagttggtagttatgatttagtgatggagcatatggtccagggatgcaattaggagagtcccacactcatgaatttcctctcttggtctttcttgcgggcaagggtttatagatttattttctaaatattcgcttaaatcctatcttttcgatccattcttttatggcatagggacactattatttttggggaaaagggcatatacttttatctttttaattatttatttatatttttcaatattttccatttaatattgatttgcttataccacataattgcttataatctaactgaaaatcacatattattcatcaagaattacgtccattagttccgattttgatcttatcatagaactaaatacgtactgaaaaattaaaagataatggaaaaagtatagagtaacaatgtaaaatgatactttattgggaaatttggttacctatctctatcgtaatttattctcttcatatagattattatatacatagcaaataaaagtttaccaaatgtatgtaccataccttttattattatttcaaatgaatcttcaatagtcaacattgactcctagtattatgtttaaatcttctatgaattgaagaatctgaaataaacatcatgaatgattggaagatatgtaagagaaaattgttccaactgataaaagttttcacaaagtcattgtagtaattaatagatatatagaaaaataaaacacaatttaaggccaatttttttcatcttctcctataagatttaacaccaaattttttaaagaaaaattcaaagcattgatttttttatatataatcaaatacaaactttagttacaatctaaatcctgctttgtttcttgaaaatctgtttaaattaacaatagttggtgtcttggaatcctcgtaattaactttaatctcaagatttacaaacattacaaagtaacaaaatccaaaacacgtgaaacaacaacgcgttacaagctctaacaaatactaataaggaaagaaatccaaatcataaatttctgctgacgtggatattagatacgcgctctaatccagctagcaacgacttttccagatttcttaccttacctagtccgcgtaaccgtaaaaaactaaaaaacccaatttagaccagtccagtgtcagatccaccacacatataaaataaccatatctctcacttcttcttcttcttcttcttatcactattcgctcatttccccttctctgttgttacagaagtcgacggcgagtagcttcaaccaaaaagaaacaccagtatctgtctcagcaatg

SEQ ID NO: 34116 - DNA, 3000 bp, Unknown; identical to SEQ ID NO: 16982
  misc_feature (1)..( 3000): 2750-1469P.txt file - cDNA_ID_3074665; gDNA_ID_1620742; Annot_ID_166497

SEQ ID NO: 34117 - DNA, 3000 bp, Unknown; identical to SEQ ID NO: 20473
  misc_feature (1)..( 3000): 2750-1469P.txt file - cDNA_ID_3074671; gDNA_ID_1620742; Annot_ID_166494

SEQ ID NO: 34118 - DNA, 3003 bp, Unknown; identical to SEQ ID NO: 20474
  misc_feature (1)..( 3003): 2750-1469P.txt file - cDNA_ID_3074679; gDNA_ID_1620742; Annot_ID_166491

SEQ ID NO: 34119 - DNA, 3003 bp, Unknown; identical to SEQ ID NO: 20476
  misc_feature (1)..( 3003): 2750-1469P.txt file - cDNA_ID_3074683; gDNA_ID_1620742; Annot_ID_166489

SEQ ID NO: 34120 - DNA, 3003 bp, Unknown
  misc_feature (1)..( 3003): 2750-1469P.txt file - cDNA_ID_3074727; gDNA_ID_1620766; Annot_ID_167351
tgttattccatgactttgatagaacaagatgttatcaaaaacatatatttgttccggctgtgtttaaatatatttcaaagtatagggtgatcattgaaaacttgaacattctgtacatcacatacaattaaaaaggttcgaatagagccagaatatgtgtactgtgatatctagttaatcttaatgattataaacctttgaaaaatattttcttttttcttttgtcaacagctttaaaactttggaaaatcttactaactaaataaatatgaaaggaccacgtaacttagaacatctaactttttcttcttttaaaagacatagaagattagctaatttaatatcggaataattatgtttttcatatttagtattaaaataatacttttaattagtttgttaattttcttaattttatttatttaaacatataagtaaatctaaaagaagtcatcgaagaaaattataagtaaaattattttttaatttaataataaaatatttgttatgatcccgacaactgcctagtagttttgtgaggacataaaggagaacagtgtggacaggaaatgaaaaagaaaaaaaaaaagaaatatagaagttgaaaattgtacgtgatcttgaaaatatctcttacgacgcaacttatgacttatgattccatattcttaagattattttaactagttagaagcatgaaacatgtgtagttgtgtacatcaatatgcaaacagctatctcatacgttttttcttttggttacagatagccgtaaaaaagaaatatatatccatcaagttggtaaaaattggtgagttttctaattcttgattcgatcgtaatttgtgagttttctaattcgtgattcgatagtaatttgctttaaacaaaaactacggattggttgaaacaaaatcactccattttaactagtatttagtctgttgccgagagactttatgatttcgtaggctttgaactaaaagaagcagagagtcataagatgaatttgttggaggtaagtcctcggtcataaaccaagcacaagagggaacaaaatcaatattcaagttcttaatgaaattagggttaaagcttacaaaatcttagaattgtatatgtatttgttgtttaagacaggtttcattttttgttattaatatgcataattactagaaccaaaactctttttaatccagagaaaagcaaatgttcttgcaaactttctcgtaaaactgcttttcagtcttatgactcctattgatgctaccattgtttaagcttttggtcttttaaataaatacggttggtcaatctatatatttatcaaccatcgaagggtctacaaatcaacaagtcatctctgtaaatggattggctaaacctttgactactttgcaatttgcattcgattatatggttagatattccatgttatgaaactttaatttacattggtcaaataattatttgattttgggccttataattgttgcagtggtccttaatactattcatttactataattaagactagcaactgactttattttaattctgattttgttaccaagttaagcacaccatctccaaagttccaaaaaggtaaggaatttattattaagaaactaatataagcatttgattgatgcttcatgcgatcgtattctaatcatgattctaaattgtaattgattttattattgtacataattagatacgatataataattaatgtgtaaactcacttatgttaattttgaaaaattatggagtgtgtgtgttatatgtgtctataaaatttgttttcgtgttattttagggtatttcttttaaattattgaccaaaatcacttggctttgtctcaattgtgatcatgtatattagatgtgcaaaataacccttacttaaataattaactctatctctcgtggtctcatctaaatgaaccgcaaggatgctcgccgcgacatcaagtttatatcacttttcgtggagaacagctacgccacaacttcgttagccatctcgtggaagcccttaggcgaaatgcgatcaatgtgtttatagacaatgatcaagagcttagaggtgaagatatcagcattcttttgaagaggatcgagtattcttgaatctccattgttgtgttctcgagcaggtacacagaatcgaggtggtgcttgagagaggctgtgaagatcaaagactgatgtaattttaccttacttgcctttcttgcctgttggcacaatccattagtcaagtttgatagtgaaagcaatgccaatgatcatcgtcatgttacttaagtcatctcgtatcgttcgattcaaattagttgtcgtttaagtttttgaagcatatactaaaaaaacatttaagttttcagttgtcaattaataataataaaaaaaaaaggaaaatgatgatgggtgagttttataatagttacggtgaacttggtcacattggataatttgtcattgttcttgggcggaccaataaaagcctctcttttgaatcccccacacagatctatcgcctcttcttccctcgtgtctgccagaatttttgtttcccgttgataaaggttaaacctttcttcttcttcttcttgtttcgatttcaagttcttctctttcgtgacctacggtgccgtttcatattccctaatttgattgaaaagggttgcgcaagggctttgaagtgaaacacttttgattcttgttgttgcttcaagttttcatttttatcaattgggttttggagaaaacactatgagctgtgattgaattgtctagctcgaagaatcttgattttgtttacacagagaattggtttcttctttcttgatgatagtacaattggattctgaatgttgtgtagagtttttggaattgctcattggtgtatgcttttgttatgcagggtttatctttggtggatgattagtgaaactttttaaggagataatagttcacatgttttagttaaaaatg

SEQ ID NO: 34121 - DNA, 3000 bp, Unknown
  misc_feature (1)..( 3000): 2750-1469P.txt file - cDNA_ID_3074727; gDNA_ID_1620743; Annot_ID_166549
tattccatgactttgatagaacaagatgttatcaaaaacatatatttgttccggctgtgtttaaatatatttcaaagtatagggtgatcattgaaaacttgaacattctgtacatcacatacaattaaaaaggttcgaatagagccagaatatgtgtactgtgatatctagttaatcttaatgattataaacctttgaaaaatattttcttttttcttttgtcaacagctttaaaactttggaaaatcttactaactaaataaatatgaaaggaccacgtaacttagaacatctaactttttcttcttttaaaagacatagaagattagctaatttaatatcggaataattatgtttttcatatttagtattaaaataatacttttaattagtttgttaattttcttaattttatttatttaaacatataagtaaatctaaaagaagtcatcgaagaaaattataagtaaaattattttttaatttaataataaaatatttgttatgatcccgacaactgcctagtagttttgtgaggacataaaggagaacagtgtggacaggaaatgaaaaagaaaaaaaaaaagaaatatagaagttgaaaattgtacgtgatcttgaaaatatctcttacgacgcaacttatgacttatgattccatattcttaagattattttaactagttagaagcatgaaacatgtgtagttgtgtacatcaatatgcaaacagctatctcatacgttttttcttttggttacagatagccgtaaaaaagaaatatatatccatcaagttggtaaaaattggtgagttttctaattcttgattcgatcgtaatttgtgagttttctaattcgtgattcgatagtaatttgctttaaacaaaaactacggattggttgaaacaaaatcactccattttaactagtatttagtctgttgccgagagactttatgatttcgtaggctttgaactaaaagaagcagagagtcataagatgaatttgttggaggtaagtcctcggtcataaaccaagcacaagagggaacaaaatcaatattcaagttcttaatgaaattagggttaaagcttacaaaatcttagaattgtatatgtatttgttgtttaagacaggtttcattttttgttattaatatgcataattactagaaccaaaactctttttaatccagagaaaagcaaatgttcttgcaaactttctcgtaaaactgcttttcagtcttatgactcctattgatgctaccattgtttaagcttttggtcttttaaataaatacggttggtcaatctatatatttatcaaccatcgaagggtctacaaatcaacaagtcatctctgtaaatggattggctaaacctttgactactttgcaatttgcattcgattatatggttagatattccatgttatgaaactttaatttacattggtcaaataattatttgattttgggccttataattgttgcagtggtccttaatactattcatttactataattaagactagcaactgactttattttaattctgattttgttaccaagttaagcacaccatctccaaagttccaaaaaggtaaggaatttattattaagaaactaatataagcatttgattgatgcttcatgcgatcgtattctaatcatgattctaaattgtaattgattttattattgtacataattagatacgatataataattaatgtgtaaactcacttatgttaattttgaaaaattatggagtgtgtgtgttatatgtgtctataaaatttgttttcgtgttattttagggtatttcttttaaattattgaccaaaatcacttggctttgtctcaattgtgatcatgtatattagatgtgcaaaataacccttacttaaataattaactctatctctcgtggtctcatctaaatgaaccgcaaggatgctcgccgcgacatcaagtttatatcacttttcgtggagaacagctacgccacaacttcgttagccatctcgtggaagcccttaggcgaaatgcgatcaatgtgtttatagacaatgatcaagagcttagaggtgaagatatcagcattcttttgaagaggatcgagtattcttgaatctccattgttgtgttctcgagcaggtacacagaatcgaggtggtgcttgagagaggctgtgaagatcaaagactgatgtaattttaccttacttgcctttcttgcctgttggcacaatccattagtcaagtttgatagtgaaagcaatgccaatgatcatcgtcatgttacttaagtcatctcgtatcgttcgattcaaattagttgtcgtttaagtttttgaagcatatactaaaaaaacatttaagttttcagttgtcaattaataataataaaaaaaaaaggaaaatgatgatgggtgagttttataatagttacggtgaacttggtcacattggataatttgtcattgttcttgggcggaccaataaaagcctctcttttgaatcccccacacagatctatcgcctcttcttccctcgtgtctgccagaatttttgtttcccgttgataaaggttaaacctttcttcttcttcttcttgtttcgatttcaagttcttctctttcgtgacctacggtgccgtttcatattccctaatttgattgaaaagggttgcgcaagggctttgaagtgaaacacttttgattcttgttgttgcttcaagttttcatttttatcaattgggttttggagaaaacactatgagctgtgattgaattgtctagctcgaagaatcttgattttgtttacacagagaattggtttcttctttcttgatgatagtacaattggattctgaatgttgtgtagagtttttggaattgctcattggtgtatgcttttgttatgcagggtttatctttggtggatgattagtgaaactttttaaggagataatagttcacatgttttagttaaaaatg

SEQ ID NO: 34122 - DNA, 3003 bp, Unknown
  misc_feature (1)..( 3003): 2750-1469P.txt file - cDNA_ID_3074754; gDNA_ID_1620743; Annot_ID_166534
gttggggctagttgcgcgttcacatggtcaaatttcttctgatggtaatgatactaactaaatctcagatcccttttttgtctcctagttgtggcttttgttctcgtcgtgcatgtgttgatgttatctgttaatattagtgtaacatagtagggacatgtaacatgttgtatttcgatccgatgttcactctgagccatttagcagtaaaacttgtaccttttctaatggaaaaattcttgtctttcttatcctttgcagttgaaaacatttactacaaggtaggtctgcctcatcttttgtatttgttcatatactacaagctacgaattcattttatctgatcaagtttcattttcacctgaaaaaggttccttttgaagaggttcctgaccttgtagctagtcggagagtattattacagaaagggtttgcctttgtagctggtactcaggtaagtaatgctttctatttcaatttgaaacaaaacttctcttatgtagatagtagtgtctctttcgtttaactcatatttccttatgtctttgagcagttggtttcccttgttgtcacacaatttcgatctcatctatcaaaggccctcattctaacaaacaggttattctggtttatatgaatatttaaaagttcttctcatatatgtcacaccttagtaacaagattttctttttgtttgcagaaagtggacaactaccattcgagaacgagaaaaagacagactaactccagtaagcacggacctgaaatcaatcaactgcttaatttcatgtcccatgtttccttaacttatcattgctctcattcagatcgtagaagcgttatctacaagctacttgggtcctgattattctcaagtgaggattgtcctttgaaacttgtttatacatttatagaattggaatcattgaagttgttaatatgtctctacagtcaaatgagtacgctgacatatcacttaaggatattgatcaagtttccaagagttccttccccctttgtatgaggcatctatttgaaaaagtaagctgcttcatggattgcaaatcttctattcttcattaattacataaactgctcctatgcaattgtaacatgtgaacgtttcacatagcttcgagaagatcaccatctaaaacatggaggaagaatgcaactgggtctctttttgaaggtttctccttaaacactactcccttgttaagttttgttgcatttgaatgcgacgtgatgcagatagattcacatctagatttgaggctagaagtaataacatttctattggtcaaacatcatagtaaataagccaccagttctttttcatgtttttctccaatttgtacctctttgaagttgtattgccatgtagggtgtgggtctgaagttggatgacgccttagcgttttggagagaagaatttacaaaaaaggtaatttgattcgctaaagtttctcgttctcctcaccctttttccatgtttttgtgtgtgctagcaaatttgaataactaagtaagtaatactgagctattagatgcatatttctctttccgtttttatcctcaggttggctctgagagatttgataaagagtatgcgtatgccattcgccataactatgggaaggaaggcaagagaacagtaagtacctaactgtcctttctaggccatttttttccagagttctcatctcttatttatgtcattgaaagtggcaatgatcagcttctgataccaaattcacattgcaatttcaggattataccccttatgcttgttcaaagatcatcacatctgctcctggtgctggggatcatcacggctgcccttatcgacatttcaggtcagttttctcagcaaaaatatgttctctttccctgaaagaaaagggtaaccgttatatattattattcaaatagtatctcttatccatcaccaacatctcatatcaacacaaccagcggctgaaaataatggagtttttgtatatattttgattagtgaacataagaagatcatctttatagagacagaaactccttccttggaattatatatataattatgtgtgcaaaagcgaatccgagcgcattgtagcttgcttcatttgctcagcagaagttgttgcctttggcctttgtctagctataaagagaaacaataattacatatgtgtagatgtgtgaatgattaggtgaatcccaaagtaatgtttctgatacattctgctgctttgatgacagtgaggataacctgaaagcagcacttagtagaatgggattgagttctcgtggtatggaagacgtaatggataaagtgcggaacagacattatcaggtgattaatcttaactaagacctcaaatctttttggcgattgtagcaataactaacatgctcttcttcatatgcatttatatggtaaagctcgcatgcaccttaacctttgaagctgtttatggtacatcatgtgatactggtatcaaccatcccaaccaatactttgaagaaagtcagaagattctgaaatccaagactccagctgctccggtttaatctccttatggtttcaatgtaatccgtgacataatattaaaaatttaaatctttaagttgatgccaaacctgtttgatgatagtaccatgtttttaaaagccaagcatacctatatcaagaaaaaaaaacattacgcatatgttaggcatatgcttccttttgttccaatattgtcatgttgtgcgagtttaaatcatgaacatgtttctttaactattcaaagaaatcaatgaaactgaagtgaatctcttactcacactatgactgacacatctatcctcgtgactttttaataaaatattcaactgtatgatataagatttgaccacaagccattgttattgtagttattatggttgttgttgctactactatcttagatgtacatttttgaagtggacaatgtgagtgaaggtgaatatgaagagatg

SEQ ID NO: 34123 - DNA, 3003 bp, Unknown; identical to SEQ ID NO: 20480
  misc_feature (1)..( 3003): 2750-1469P.txt file - cDNA_ID_3074762; gDNA_ID_1620743; Annot_ID_166532

SEQ ID NO: 34124 - DNA, 3000 bp, Unknown
  misc_feature (1)..( 3000): 2750-1469P.txt file - cDNA_ID_3074766; gDNA_ID_1620743; Annot_ID_166531
tttatgatatctgaattaaccagtgccctagagttcacaataatgtatatgttcgctctacgggacagtcaaacacaaaaaaaagcagcacaaacctgagaaccaggctttggagtgttgcacttcctcatgttacatacagttctgaatgagaagtttacattaccacaattcggacatgtccaatcattatcgcgagttgaatctgtaaaagaacacaacagaatatatcaagttgactatcactataaaataaaggccagctttacagctgacatgttctagaatgggaaaaggcctaactcttctagcacatacctctcttttgtgatttttcatctgggtaaaaccttggtcttggcatctgcaaagaagcgcgcatatattgtgaaaagatttcagctcatgttacaaatccaaggacttataagatcttgcatgtgatcaaaaccaagcatcttactgttttacataccatggcagcggcagaaccaggacccattgccataccaaggccatacctgtctattggtggaggcattccatacataccacctgacaaaagaagaaacccaacaatgcaccagccaaattagatacaggtacaatgatggtaaatggaagacttgacacctattgggaaatagccagacaccaaaaactgattaaaaatacataccacttcccatcatagatccgccatggtatggtggtggtccagacatatgtaatggtctgtaatgagctccggcaggcattcggctattatagttaaaatggtaaggcgaacccccagaaaatgggacgtcataaggaggcatagacgatccattaaagagaggagatccatatggtgacccgcccatatatactggagggggacccccagatcctaagtatgccccgggtgatgagaaaccttgttgatgttgcataggtttgggagcagacttctgttacagacgtgcaacaaataggtcatcaaaaactaagtagataattgtttaaactgaatacccactggtaatcttcgtattgctgctcttgttggaagataacaaacaaatgggttctagatttgaaagaatctcttctatttccttaaacaaaatctaagtacaaaagccaatagactggacaaagcactaaggctaatcttccacttcattccttattttcataacaaacacctgaaaatcctaatcaaaactactcaccatcctaagtctctatacatgtttgcctcaaagagctctatctactaaacccgccaagaagtcaatgactgttttgcacacaaaactgtttcaaagcagaaagacatatattcgatattgcaacacaaaataacttactccattatgatctgcaggtctaggctgagtgcaattacgcatattgcaagttgtcctgaatgaaaagttgacattgccacaacttgggcagatccaatcatcttctctacgcccccctatccacgaccaaaagaataaaccaaacaactattcatattggtagtctaaaatcaaaaaccctttataaacatatacgctgaaagaaactgactatagactcaatataaccgaaataacacaacattgccaatgttacacaggataaaattttccactactaaaagcatgcaagacattggaaacaatgtacacacagaaacactatcttcgggtatatatggattcaaaggtaagaaatgtcataccgtcagttctagcacgcttggctgctgatgaatttctgttgtctacctaaaaatccagaggaaatataagtcaagaactacactaatcaaaaccagatcaaacgatacgaggaaggatctacaaaactgattaagaaattgaatgattcgatactgttctagtaattgtaaccatagaatcaatcacaaagcaaagctccggtgacgattcagtgtcagatctgcgatattcactataagacgggaacaaggaatatagtgggcagtgttgttacctgtgacatagctgtggaatagtctgattagtagcgagataaccggagaaggaggcggtgcggtggctagacgtcactcggcgatttcacctgtgccctaggatttagttcgacggtaggagaaataggaggtgaaattagctcaagatgtttttatattttaacgagaaaaataaaaatgaaaatatactaatttactctcatatgaaaaaaaaaaaaaaaaaactttaaaccaagaagatttattggtttttaaagagctaaaaaaaaaactctttaatgtttttgacccaaaaataaatggactttaattttattcaatcttgaacttccaaaactctattaaaaatttaaaattgtgttgattgttttgtgattttttaaaaaaaaaataatcatctaacctacatcaaatgaatatattattttggtcagctatatgtaatcatgtctagagttaaaatcaaattcaagattgaaagttccaatcacagacaatatagaaaaacagcagacaaaaattttaaagagattttccagaactttgaataaatttgattcttaagagtttgtatatttttataaaaagtcaaataatatttcttgtcttctgcctatttttcgtaatacaaaattttttatattttgttgtctatattgtagatttgtaggatggaaatcggataacatatagaaattatacatcttataaacacattagttaataaatagtatacatcatgaggtatgtttttgcttttaaagaaagcctccttatactttcattgtggcaaatgtgatttgtgtaatactgtttgtcatatatgataatctcttttgtacttgctgttaattaaacttttttgctttatatataggtgcgaatatgataataagagtaaactcaccttgtaataccattagttgattaccataaagtaatatgaatacagttcgtcaatcagcaaggctaaggtaattcgatctctattcaagcatgggatg

SEQ ID NO: 34125 - DNA, 3000 bp, Unknown; identical to SEQ ID NO: 4902
  misc_feature (1)..( 3000): 2750-1469P.txt file - cDNA_ID_3074810; gDNA_ID_1620744; Annot_ID_166577

SEQ ID NO: 34126 - DNA, 3000 bp, Unknown
  misc_feature (1)..( 3000): 2750-1469P.txt file - cDNA_ID_3074838; gDNA_ID_1620745; Annot_ID_166636
atcaggtatgcagaggggaaagtagagtttaagggagatcctgcttatgtaagagctgcgtgtgaggctagtttaatgcgagtagatgttgcctgcattgatctctattatcagcatcgaattgatactcgtgtccctatcgaaatcactgtaagcactcttcttgtcaatcttccttcatggttttgcaactttcaaatgaaatggaagttatatagttcctctcacttctcagtgagcttcacacatgtggctagagacatgttgggactaatatagagtcgaagagtttagctttcagaactatgttttctgcttgggtcactctttctgaaattactagcttattcatgaagaaccattgtctggtgaaatgatcttatcatctcccttagaatttttcgtttgaatagactcctttaggtttgactctgagctcacacttcatgacctatattgaaagccagcaactttagctgaacttgacaatctcttttgtctgtcaatttcaaagattggagagctgaagaagctagttgaagaaggtaaaataaagtatatcggtttgtctgaagcttcagcttcaactatcagaagagcacatgctgttcacccgataaccgctctgcaaatagaatggtccttatggtcgagagacgtggaagaagatataattccaacctgcaggtaaccagatttcatttcatcctcattcttgatgcactatctattaaatatgtaacatcttctctctctttcttcagggaacttgggattggaattgttgcttacagtcctctgggacgaggtttctttgcttcaggacccaagcttgttgagaacctagacaataatgacgtcagaaaggcaagtacacaggctttatatgacttgtttgattgatgaactgttggtaatcaactcactgtttatctgttcaattctgtttcttatcgcagactctaccaagattccaacaggaaaacttagaccacaacaagattctctttgagaaggtttctgcaatgtctgagaagaaaggatgcactcctgcacaactagcccttgcatgggttcatcaccagggagatgatgtttgccccatcccaggaaccactaagattgaaaacctcaaccagaacattggagctttatcagtgaaacttactcccgaagagatgtctgagctcgaatcccttgcacaaccaggttttgtgaaaggagaaagatccattagcatcctgaccacgttcaaaaactctgagactccaccattgtcttcttggaaagccgcttaaaatcgtctgagtttctctgattgttgtggggttcatgtcatttaagtggtctaagttatgtcagctagatcaaggtaataaaagtgctgtgtcttcgagagtggattatggtaggttcattcccagggaaagccaaaactatcaagggttgatgcctttaagagtaaataatgtatagagttccccaagtgagaacttcaatttacatttcatacattttgaccaaactctataaagaaagttatgtttagactttttttttgctaaaaatgttaattttcattatatgaataagaggcttttacaaaaacgaaaggcctatacaagagtagccgaggcaaaaaataaaacaaggctacaatagagatttagggaagatataaggttagcgaatccaaagcaccatgaggttgcgccatctctttctgtggtaacgagaggagatgatgttacgaatctcgcggtcgacaatcttgaagatgataataggagcgatcctaagattgttatggaggacattgttgcgctgacgccaaatgttgtagatgatagcatgggctgagacttttctgaggagggaaggcgccgaagaagaggaagaacgcatccaagagaggagctctgcccaagagcaaaacagcctctgacgcggacataagcgagaaaacgctaatctccaaacttgagccgcaaattcacaggaaaaaaggagatggtctctggattcagtctcaatagtgcataagcaacaatcgaaagactggatatggccccaagaggctagcctttgacgagttgggagtctatccaactgactaatccacatgttgaaggcatgcttaggaacagcacccttgaaccaaacagcctttgcccagtccaattccggtgctcttggtctaatagcatcccaagtccttgccgaagagaaaccttgacaaacaacaccaccaacaacccaatcaaaggagtcttcaattgtagcaggagagggggtcgtgatggtagagatgtggtcatggatggcttgagctggagcagaccgagaaagggggagcttccagccattaaccccaagagcctcaaccaccctagcgttaagagggatgcgaagtgatctggagccataatcacccataacctttatcagcgggccaagggaagtccaactgtcatgccagaagtgagctatgcggccattacccaagttgcatttaacaaattgctccgccaaaggtctaaggaacaagagcatacgccaagaccaaggatctgatggggaaggagccacatcccaaaaagacctgcttctaagatgtttagactactgatacaaacttaaataacccaactctatatcgtcaaaaaagactatctatatcgtcacccaactctatgaaggatatgtgcgactaattgtatcggttccttctctttcgttcttgaattttttttttttggaggtttatagtttctcacaagtgagacatgttatttattattattttattttttcccccgaccaaatcacaagtgagacatgtaccaaccagacaaaagcgaccacacggctttttcttcatcatcacattcacaccatcaccaccaacaacaacaactccactaaaaaattcatagctctacaagagtcacctcatagagaagtgaagagacagagatagttgtgacagagagattcatg

SEQ ID NO: 34127 - DNA, 3000 bp, Unknown; identical to SEQ ID NO: 4925
  misc_feature (1)..( 3000): 2750-1469P.txt file - cDNA_ID_3074850; gDNA_ID_1620745; Annot_ID_49700

SEQ ID NO: 34128 - DNA, 3000 bp, Unknown; identical to SEQ ID NO: 4915
  misc_feature (1)..( 3000): 2750-1469P.txt file - cDNA_ID_3074850; gDNA_ID_1620745; Annot_ID_166628

SEQ ID NO: 34129 - DNA, 3000 bp, Unknown; identical to SEQ ID NO: 4916
  misc_feature (1)..( 3000): 2750-1469P.txt file - cDNA_ID_3074861; gDNA_ID_1620745; Annot_ID_166624

SEQ ID NO: 34130 - DNA, 3000 bp, Unknown
  misc_feature (1)..( 3000): 2750-1469P.txt file - cDNA_ID_3074865; gDNA_ID_1620745; Annot_ID_166623
gatcgctgtgagcctgtgataatgatttcttttaggtttgtaggatctgaaggaagctacggtttatttttttttatgggcaatctctaacaggtacaaatcttctcttagcttctctcttacaagatctttaggttatgtcttgttctttggagttgctatctttcttccatgttccagaggtttgccttattttatcacttttgacataataatttattttgcctgttttttgttacttggtttaatattcagatgaatctttgaccatgatctctaaatttggttcctaggcaagatcaaagaaagttcatcacataggagttgatcatgaaccatagtttcctcaaagatctcaactttgtctctagttggattgtaatctgtattgcttaggacagttaaatcttattacatcttggctcgtcatgtcaaaagctgaagatatttgagctttcatatcttacaactaattagtttcgtatgtctacaggtttcttactgtaatttttctgtttcagttctttacgggtatatatatacacataaaacggttaagctctagagaagatgttgggaggcaacaatgataaccctgtgccgcaggttctaatgaacgacagccagtttcggtatcaatcaaacacatcgttgaatcagcttcacttgcttgggacgagtaagtttctgaattttgttattcatttggtttgaatgttgttagaactttatagagctaaaagcttgttcctttgtatgtggttgcagtgagagctggttgtactattgatcctgtaaactactttgctaatgataaccttgctcctatgatgcggcttaatagcacacgcggaagggaaactgaaaacaacaatattatgcagagacagcagaagctgcagatctctttgaattataactacaacaacaataatactgttgttcaagatgaagtcccaaagcagaacttagtgtcaactggtctgagactatcttatgatgatgatgagcgcaactcttctgtaacttcagcaaatggaagcataacaactccagtctatcagtcactcggtgacaatatcagattggacctcaatagacagaacgacgagcttgatcagtttatcaaattccgggtattaattttatctacaaagcgtatgtttttgcttacatatcccatgtcgttgaaattgttctctcttggaacaggcagatcaaatggcgaaaggtgtgagagatattaaacagagacatgtcacgtcctttgtcacggccttagagaaggatgtgagtaagaagcttcaagagaaagaccatgagattgaaagcatgaacaagaagaaccgggaactcgtggataagataaaacaagtggcagtggaagctcagaactggcattacaaagcaaaatacaatgaatctgtggttaatgccttaaaggtaaatttgcaacaagtgatgtcacatggaaacgacaacaatgcagtaggaggaggagttgctgatcatcatcaaatgaaagaagggtttggggatagtgagattgatgacgaagcagcttcttacaattacttgaacatcccggggatgccaagtactgggatgagatgtaagttgtgtaacgtaaagaatgtttcggtcttgctcgtgccatgtaggcacttgagtttgtgtaaagattgtgatgtgtttactggtgtttgtcctgtttgccagtctttgaaaacttctagcgttcaggtcttcttcttctgagttgtcttcatactcttgaaaagtaaatggtggatgaacatatttgtatgtgatggtggtgatgaatgaaaacttggtcgagtctttctttgcttttgccattaaacctatatagcatgattctgctatttcgtagttattaagcagccgttctttgaacacgagataataattgagttccgtgtcgtgtgcgatatgtcaagctgtggattacattgttagaagaaattattaaacttgttttggctgatttttttcttcttaatatttttgctgcaaaacttgtttcccaagtaaggttatttatgtactaaaacaatatttttttaatgtaaaggattttgatcaatatttccgttagaaaaatactaataaagttgatattaatatacatcatattacgtttgcaaaaataaaaaagacgcagttaatttccccatctgaatattaatttttggcattaatattaatttggtttaattataaattatgtcaacattgtttaatttgtaaatcatgcaaatctagtttacttgtagtagtttgtaccaaccaaaccctcaaaggctcgaaagtaatgggccttaaaggcccacctttctacttgtatttaaaattggtcaaagacacgtgaacctcacgtgattttatcttccaacgagggagcttctgttatccacttcatcattcacgtctcttccgcaaaacccaacattcaaattcttgtctgaataacgaaatcccaacatttgcattgcatagattccttcacaaatcctctgattctgattctggtcactcaattttgcctgtttattggcataattcgggcacttttctctcagtttttgtataaggttcaatgagtttgttctgtacttctgtgtgcgttatcttctccaaattaagattccagattcgtgggttcatgaaaatctcgttgtagacgagccaagttgaaatatttttcctcaagtgaattttgttatgatcacgtcgtggttttgatctgactccacttccgtcgctaactctcttcgaaagattcgtgttaaaaaaggtaaagttccaaacttcatactttttttacttcatcttactcattttccattgtctctgattcatgccagaacaaagattttagttatagggttccagaatctcggactttaactcggaagtagtgttcttcctctgttaactgaaattctttcttttgttttatgcagaaacctgaaaatg

SEQ ID NO: 34131 - DNA, 3000 bp, Unknown
  misc_feature (1)..( 3000): 2750-1469P.txt file - cDNA_ID_3074909; gDNA_ID_1620746; Annot_ID_166683
atttacattaccaaataataatttatgagatataagattgttatttctatattgcgtgtatgatttctaacaaattcgtaaaagaacctgtaatcaaaaaaacagtcgaatgttttataaaataaaatgctatgtttttattttaagcaatcctaatattttaatatgtaaaaatgaactatatattgcattcatatggttaaaaatgataaatatatatatatatatatatatgtatatatatatatatataatgtagaaaaacaagagcatacccattagatgtatcaaacgtgagtcctacggtatattttgcttcctcgagagccaattgaaacctccggatctcggcagctggacgtgtcttgtcgtcttttacgcagagttccgatggcttgacatcgcaaaatatagggatgactcttttcttgttcttcacgagcaatgcgagttcatggagacagaagtaagagtcacagtaacgaggagagaaaaccgcaataccaaccccgcatgctttgattgccatgtcgatctcgacaaaaagcctgtctccaggctttaaactcttactatccaagaaagcagtcaaacgttgtctagtgaaacaatcatatagtaggcctgaaatagtcttcttggtatcgatcccacgatgattgatgaaaatatcacatgggtttgggtaaggtagggttggatttgcaatgtatcttgttgtgtatgcgatttttgagcaaggtgttaacaaacgttgcatcgaagagttttgaatagacgaggaagaaatgaaatgattgaattaagcgaaagagtgatttagagatgaagactggttttgatatatttttgataattgcttttagtattgtggaagaagaaatgattttagattagtaagaaatagatatgtgtctctatatttataagtgatcgttttacgcttatagttagctatggtttgtgtctttgtgaataaggtccgagaactccatgtcggatcttggatattttgccactttgtttttgtaaatattcataaaaattgtgattcttctcgcgctaatactcaaggaagaattcaaacttctttttctaacatttggacttcaagaaaatactagtgtctatttgaaaatacttcaagaaacgagtgaatttattcttatctttgacttgcaagcatttttgtcttttctcgtgtggtttgaagaaaagattaaaaaaaaaccttcaaagacgtacatatacttttgaatcaaaaaatatttgttagttatatttgcgtcaaaaagtattcgctacttttcctttgttcttttttatactaaaccccgttgaaagaagtaagtaaaagtgtaaacatctttgaaacggtcaccatctcaaaaagtaacatagtaaaagcaaagagaaatgaccaactgtatctagaataaagatattaaatcaaaatacaaattcatcaataaaattaaatttcatattaactcagatattaaatttaaatagacacaccaatttcttaggaagatatatgttttgatgttttcagtttagtcaacagcttatatataaataaaacggtttaaaaaaagttataaaaaggtggtacaacgtaacataactaaccagtccgctttgatatgttttgatgtttatatttatttaatctttaatggccatttgtattatatcgtagtttttactctcgttaattttataagtgaaatactaaactattttgttcgtacagaaaaaaaagagacgaaatatatatagaattaatgttcgagatgtcggggctgggctgggctgggagtggacagtaatctgaaccacaaccgtgtgtaatactaatatatgagtctcctcgaatcctctcatggaacagttggaagaagaagaatttggagagtttgctaacatagtgtcaaaaagaattgtcacaactcacaagaatgaagagggggaagaagaagaaatttctcaaaaatttagccattagaggcctaaaatcctagcctagtccatatctcagaagcaaatcctcaattctatcacccaaactcttaaagttaggcttcaaaggaatttagatgaaaggatcatgggccttaccttttgagtcttagcatcgcatgcatgcctatggccgggcctactactataggatgaggtccactagattcaatctatatcaaggtgagccagtctttttataccacgtcctagtgatgtccaccgaaatgtaacaaaacatcctagcagaccccatgacctcatatctcctgactcctgataaagtcacctcaccatatctcttgaacaatgtccttcgacgacgaagaatcttcgtacacctcgtgtagttccatgcaacgagtcgatcgattcctaaaaacatcatcagtaatttgaaactcttgattattgataatattactaacttggaaaattatgctagtacccaaagtttatacatgtatatatatatatatatatatatatataactactacagtcgactatttggattttctttgtattaattatcttcatagtttactagagttcaattgcgaacgaaaaacacattttggtaacacgataattttttaaaatatatttatagagaattcccacatttctagtttttataaaatcttacacaaaaaccaaaatgaggtatgtgcgtgatgtgtagcataagaaaggcatgacataaggcagttcgaaaaaaccctgccttttctccaaaatttaatgcccattggccgctaattttgggccctacgattagccacgtgtaatttcctcgtcgagggacccagttcggtactcatatgctcacacaaacctaacacctatttcttctcgcatcttatatgaaacacattcactctccaaaataatctatacttttcctacatattctcttgacgatcatgagactgatttcgtgaaaatatcgtcattatatcaaattagaagttgatg

SEQ ID NO: 34132 - DNA, 3000 bp, Unknown
  misc_feature (1)..( 3000): 2750-1469P.txt file - cDNA_ID_3074915; gDNA_ID_1620746; Annot_ID_166677
cgactgagactcacttactccactctcaacatcatttacagcttcttctttattaggaaagaactcaaacgcgaaattctgaacagaattgggggtatggtctgacaaggatgtaccacttgtattgtagcaatcttgtgcagaagagacatagttatccgcactgtcactgagggaattggaattattaaaaaaaacagacatggcagacgaattatgattggctcccaaccccactccgtatccagtcacgttgtcaaaatatggagtcaacatagctgcaatttgatgtaacaaaaaatgaggaatatggaaattagcaacagatagattagtgtcaaacttttaaaaaaaaaaataacctgacatttagtagataaggtgcatacatttggaatcgattatcttatcatcctgcttggaaacagtgtcaacgtcacaattcacaggattgaaggccatcatattgccatcaggatcagagaaactagacgatatactacaactagtcatctcagattgagatactccacatgtttccacaggctgctcaccctgacttaacgaaaaccaatctttaagacttgcagagcaagtatgagcaggtgaaggactcagcccggcttccattttcacatgttcatcaaatgaacctggcacaacaaaaaaaatccaagcgatgttaatacgatgtacctcaaacagctcaataaatactaaatgactatgtaacaaggcaccctttccaacaactactaaccatttagcaactgtgaatccttgagctcgtcagcagatgaaccaactggtgataagttttcttggctaccctaaaagtagtcactctcaatgttagtttcttctctatcgaaaaaaatagtcaattagagattagtgtagctacagaattgtgaaatcacacatacataaactttataacaaaatacaaatccaaacatctttgtagcagcattcaaataatgcaatgaaattcagctaaatcaaaacgatgaaattgaagttagagaagcgtgtaatcaaaattctcaagctaccacaaaagccgagaaaactacctcagcagaatcaggcttctcatctagaatccgataaagcgtttcgatgtcaatagtctcgtcatcatcttcaaactcaaaaccaccatcacaatcatcaaccggaaattcacctcccagaccaaacattgaaccttcctcacccatcaaaaatcacaaaaaaaaaaaaaaaaaactaacccgagaaagaacgagaagaggaacaaaccctaaatcagaaaacccaaaagtcacggaatttcagctcccgggaaacccaaatcgaaattcagaagtagacgcgtagatccagagattgtagaattttcaggtacgacgaagaagaaggcttgagaattgggttttgaaggaattttcgaggaaaggtagagagcagttgggatagagaaaataaaaatcgcgactttttgtagcgacggtggcttctttttattgccttgttctctcttttggctttctccgaattggaaaaagtaaacaccacaaggctatgggacttccggctttaaataaggaacggtcgaacatttgtttttctttttctttcatttttttccattttttcattatttaataatgcatgattatatataattatattttatgcgccgtcatctttattgttaaagcaaaatcacaatttaaacaaaaggaaacaactttaattagtagtaggaaactgaagtgtttaagtaatggagatttttttgaagtgtttgctaatcataatttattgtaaaaattatttttaattgtgtgaaaattagattttctacactaacaaaaaaatttcatatgttaaagaaaacaaatatgaaactaaatcacaaagatcaattggaattagacatgtggatcgactcattagaaaaataatcatctcaatcaataagaagagataaaacatatatttgactaaatgatcttaccaatcttgtggtcataaaattctacaaagcactatattgctaatttctacaaagcacatttgtaatcttctgaatcatttgttagccctaaaagaagactagtattatacgagatcaccatttttatgattgatcaaatatcttgtagagcgcaaaactttgtaggtagtttgatgagaaagagcttgcttattatgtgatcaacaattccgttcttgccatgtctcaaagtagttgcttgccatattaattgatatgaagagcctttgattttgcagagataggaattgccaaaagaaaccatatgaggattgactcgagaagttttagtgtaacttcttcactaagtccttccaaaccagttgggaaaaataatattaaagaataagtggtccattgattcttagtcggtcaactagctagaagacctcaaattctgcaatcgatcctttgtcttattgtggttccacacaaacaaccatgtgcaaagaacaaaacatgttttgggactttagtttgaagatgcaattaaacatattgttagattgttgaccaagaaaaaacatattgttgagattgaaagatatattttgcatcggactgcaaaatgtttatgtcacatatttgttacctaatagttgattttaatagagtataatagagtatcagttattggttttaaattgtgtatcaaattccaaataatatagagatttttaacatcagtcttatttaattatgattttaaccaagtgtcgttagctcaattggtaaagaccttatgcaaagcttagaggtcgccggttcgagtgacgcttgggacgaaactaatattttatgctgtggtttcaggcctgggggattacggactttgacccacaacctccaagatttaaaaaaaaaaataaaaaaaaattatgattttaaatcgaaattttgttcttcaaaggtaaaatagtttaaaaatctttgggtattaaaatcatttggaaatg

SEQ ID NO: 34133 - DNA, 3000 bp, Unknown; identical to SEQ ID NO: 4938
  misc_feature (1)..( 3000): 2750-1469P.txt file - cDNA_ID_3074922; gDNA_ID_1620746; Annot_ID_166672

SEQ ID NO: 34134 - DNA, 3000 bp, Unknown; identical to SEQ ID NO: 4937
  misc_feature (1)..( 3000): 2750-1469P.txt file - cDNA_ID_3074926; gDNA_ID_1620746; Annot_ID_166670

SEQ ID NO: 34135 - DNA, 3000 bp, Unknown
  misc_feature (1)..( 3000): 2750-1469P.txt file - cDNA_ID_3074930; gDNA_ID_1620746; Annot_ID_166667
ctatgatgacgagtctacagccattcaagcacttcaattcaaaactaacataaagacttctgagctgctaggatatgaaaagggtaagaagttttcacttgcagacaagggaaagaaaattattgggtttcatggatatgctgagaagaacctcatttctcttggagcatatttcacaacagtttctgttactaaatcggtatgtcacggtagtaagataatcgagtcttgggatgatggtgtttttgacggcataagaaaggtgtatgttagttattctatcaatcatgtagcgtgtatcacgtttgagtacatcagtaatcactcagttgtgaagcgtcagcacgggaataacacatcattagtagaagaggtcagattccttgatagcttatacttgttgattatatacttcttgttcttgacttgtatctaaaataagaagtttaatacagtttgagttaaactatcccaatgaatttatcacatctgtggatggtactttcaaaaactctggcatgaggaaagtgatgtgcgttacgtctttggttttcaaaacatcaaaagggagaatttctccgacatatggaagcgtgactgggactaaatttgtgttggagaccaaagattgtgctctagctgggttccatggatggacttttcttggttttcttactgctattggtgcatatttttctctgctgccttgtcctcctaatgcggagaaactagaagcacgaggttatgatcgaggagctttttgggatgatggtgtttacgatggtgttagaaagatatatgtaggacaatgtgaaaatggtatcgcattcctcaagttcgtttacgacaaggacactcggatggttattggagacgatcatggaaacaaaacaccacttgaagtcaaagaggtaattctaattatcaaacttgttcttacatttatctttgggaacatattagcttaatatttttgttgatctggcacagttggaccttgagtatcctggtgaatatgtcacagcggtggagggctgttacaataaaggaattgagggtgacgtggaatctataaccatgcttaagtttaagactaacaaacgaacatctatatcctttggattcgaatctagttcaagctttctactcgagaaagaaggcttcaaaatcgttgggttccatggaaaagcaagtaacatgattcatcagcttggggttcatgtcattcccatcacccactgatcatcttaatactatatccttaatctctcatgtaataagaatcatcctagtttttattttgttttttctctttttatatcaacaacatgcaaacgtaatttgctgcaagtccttgttaaacatcacataaaaattattttttaaaaataactactcaattataaaaaacatttgtctaaataaattgatagcattaaacattaatttcctgaattgtctaacatccaataaaagcagtatttttcaatccaataacaagccaagctggtttactccggtttaacgtttagcatctttgagagctaacaaactttaaacaaatctgaaaaacaaaagccaatacgaatctagttagtgccaataagtcatgttctagttgaacaacccaagaagtagaaaactttttggagctttggatttggagttgcttcaagagcaaaccagacacacttatatgttctgtttcttattgaaagttgttgtaaactaaaataattaaggaaacgcaaaacatggtaatcaaaaatacattttttattttcttataaacaaatacaccacacattactaaacttattttttaaaaaatcattcctccaattctcgtatttggtcgcagaatccaacttaataaacaattaaattaattattactattatatttaggaagagaaagacagagatagattcagcagatgacacgaatcactccaccatagcttcttctctcttttttgttttcttctgattccgcgtagaacatttgttgttgggtttggtttcgattgattcttgaaattggttttggtaaaaaatctcacctttaaagtgtaaacactttactttctctcaaaagtaccacttaccatctgggttttgcttcattaaccattacagtgactctgcaatctttcaagttttcagatatcttctctttaaggtttgtgtctgtttttttatcttttcttcttactcagtttcttttatgttgtctatgctttaattaaagattacctcttagaaatttatcgcaccgccattaatttttcattgtaatttgttgaacagttcgtgaccagatttcttcctaaatataagctttaaatgactaatttttgttgttgttaattaatgtcttaaccaaagcaactttttttctttttaatttcatatcattagtatttagagtttatttactttccctagatctggagaaagataacaaaactccaagaaaattttaatgaattgtttctattcgtttatttatacgaatccttagccgtttcgctttcaacagtggcccagattgtgttcgtctgtgtctgtgagagtgagtaaaactctgtaagaagccatctttgtgtgtctctttaagctttttatcttcttataatctcattgttccagaaaagatatctcatctttgtagaacagatttattagaatacatgctaaaaaagtttcgatttttatttggtatgtggagcctctgatttttgtgttcttttgtagatttttcgaaaagatacattcttgcatgtgcgtagatcagccttgtatagaactgagattttggtgaagctttgttgaattggtttctttgttctttctgttcttgtgaagggaacaacacaaagacggtggctttggtgagtttttcagatagtggaaattttgaaatgtctttgtgtttgtatgggaattgatgaatattgctttgtgtgtggttttttgtagctcggtaaatagattatg

SEQ ID NO: 34136 - DNA, 3000 bp, Unknown; identical to SEQ ID NO: 4934
  misc_feature (1)..( 3000): 2750-1469P.txt file - cDNA_ID_3074934; gDNA_ID_1620746; Annot_ID_166666

SEQ ID NO: 34137 - DNA, 3003 bp, Unknown
  misc_feature (1)..( 3003): 2750-1469P.txt file - cDNA_ID_3074947; gDNA_ID_1620748; Annot_ID_49751
tgatagaaaagtttggtctcgttcaatatgtaagtcaagtgattcggctcttcttgcaacctaattattgcatgtttttgagtttttgtgataattgtgtcagatgatcctcaaaaccttttgtgccttcttgacatttttgttggagcttcttggtgtctatggtgatggtgaattcaaatggtattacgggtatgtgaattaactattatatcatagtatttgttatttcatcagatggaaagacaggtgatgagtctttgattctgtagatatccatacatagtggtggtgctaaacttcagccaaatgtgggctctgttttgcttggttcagttctataatgtcactcatgaacggcttaaagaaataaaaccgttggctaagttcattagctttaaggctatcgtgtttgcgacttggtggcaaggcttcggtatcgcgttgctttgttattacggtatacttccaaaagaaggtcgattccaaaacgggctgcaagatttcctcatttgcattgaggtaacttaaaagctctttcccaagtgccactcgaactagcgatctctattctatatgagctctttccaaacataattatgtttctaaggattctactacttcttggggtgtacactggcagatggcgattgcagcggtggctcatctctttgtttttccagctgaaccttaccactacattccggtatcagagtgcggtaaaatcacagccgaaacgagcaagacggaagtgaaactagaagaaggtggtcttgttgagaccacggagactcaggttgaagcatctggcacaagcattaaggagagtgtacaggacatagtgattgacggtggccaacatgtcgtgaaagatgtagttcttacaataaaccaagcaataggaccggtagagaagggtgtaacgaagatccaggatacgattcatcaaaaacttttggattcggacggtaaagaagaaacagaagtgaccgaagaagtgaccgttgagacttcggtgcccccaaaagagtgatcgttgaaatttgccctttgttgtgtagttttgtttcacagttttcttttaacgatttgtatcttttataaaagatagtatattagtacttgcactgatttttatttatttttacaactctcatacttatcttatattgagaagtagaacaactactctttgacttctacaataaatctatcttccgtaagcctgaaaatcttcaataaatctatcttccttaatatgcataattcacagatcaatttcgaatttggtaatacaatttcactggacttctagaaaatagaagagcttcaaagtgagaatcatatgcaaatgagctaaatatggtatacgacttcgacttattcctgcaaccgcgggagaagtcacatgcaattgccatgctataagtctcttaccaaaaacgacatttcttattaatgttatcacatgcttggactgtgataaggtctcaattattatgtttccttgttcactctccatgatattattagtcctaaatggttttctatttttatcatatagcactaatattattttgaccaatagataaatgatcatgatgtatatataatttttatatatgaccgacgcaataatttggttcgtattgctaacgttatcgtgtcacctaaaattaaatcgacataattattaatgttgttagaataattaagtttataaatatacattaagcagatgtaatggtccgttagatttggaaacacttgaacatgtcgtttgtgctttgttgaaagtatccatacgatcaaagatccataaacgatcgaacggttgatcttgatgttaaaaaaaaaaagaaaacgatcgaacggttaagaataattgccatcacattggaaactctcgacgttgatcatgaccctccgaattaaacggccttgataatggagaacgtgagaaacgtccgttcgagaacaagacaaaacaaacaagaaacgaaagcacatgtgacatgacatgattcatgaacatgattatttgattagtcagctttctttgccaaatctgaattcgacgttttacttacagacttctcttgtccaagttcctcattcgtgctccaaagttacttcatcaaattcgtatactactctctgttttttaatgctctttgctccaacatacggactcttttaggtatggttttgattttgggttctttatttattttcttcgacaaaaagatattaaactctgcggacattaatctcaactcgtcgaacattttactagattatataatggcgggagaggtccaagatccgtttaacctaagccttttggtaatttttgcaactttattgtttatttcatttccagatgatatacgttcaattcaattattattaattatgaattgaacatatataatctagggcacccagaatacttctatagtagcttgatatacacgaaacttatttccagtttatatatgcatagacgtttttcagcaagaagagtgttcctcatctttttctaaatgatttcacaatcttaaacatcttgaaagaaaaaaattcacttttgattcgttcggagctttctttattcagattagctaggagcggctgataagcctaacggttctaaaactattttgcaaaaacagtttattcgagtttaaaaaggaatcattttatttgtatgtgtgtgtagatcttttagtaactctgttttatgaaaaacagagaatgttttctattccaatagtatgatttccttttcaagtttttttatacaaacgaaaacattgtgtttgaaacaatgatatttattttgaatgggctctgcaggagaattctatacactcgggatcagtatcatttggaagattcgagaaggaatctttatcatgggagaggagatcatccttctctcgcaatatatatcttgaagaggcagagagattctctaaaccaggctctgttactcagatg

SEQ ID NO: 34138 - DNA, 3003 bp, Unknown; identical to SEQ ID NO: 34137
  misc_feature (1)..( 3003): 2750-1469P.txt file - cDNA_ID_3074947; gDNA_ID_1620748; Annot_ID_166725

SEQ ID NO: 34139 - DNA, 3000 bp, Unknown; identical to SEQ ID NO: 4955
  misc_feature (1)..( 3000): 2750-1469P.txt file - cDNA_ID_3074958; gDNA_ID_1620748; Annot_ID_166707

SEQ ID NO: 34140 - DNA, 3003 bp, Unknown; identical to SEQ ID NO: 20518
  misc_feature (1)..( 3003): 2750-1469P.txt file - cDNA_ID_3074971; gDNA_ID_1620749; Annot_ID_166765

SEQ ID NO: 34141 - DNA, 3003 bp, Unknown; identical to SEQ ID NO: 20519
  misc_feature (1)..( 3003): 2750-1469P.txt file - cDNA_ID_3074979; gDNA_ID_1620749; Annot_ID_166757

SEQ ID NO: 34142 - DNA, 3003 bp, Unknown; identical to SEQ ID NO: 20520
  misc_feature (1)..( 3003): 2750-1469P.txt file - cDNA_ID_3074983; gDNA_ID_1620749; Annot_ID_166755

SEQ ID NO: 34143 - DNA, 3003 bp, Unknown; identical to SEQ ID NO: 20521
  misc_feature (1)..( 3003): 2750-1469P.txt file - cDNA_ID_3074994; gDNA_ID_1620749; Annot_ID_166747

SEQ ID NO: 34144 - DNA, 3000 bp, Unknown; identical to SEQ ID NO: 17448
  misc_feature (1)..( 3000): 2750-1469P.txt file - cDNA_ID_3075018; gDNA_ID_1620749; Annot_ID_166737

SEQ ID NO: 34145 - DNA, 3000 bp, Unknown; identical to SEQ ID NO: 17448
  misc_feature (1)..( 3000): 2750-1469P.txt file - cDNA_ID_3075018; gDNA_ID_2926287; Annot_ID_205467

SEQ ID NO: 34146 - DNA, 3000 bp, Unknown; identical to SEQ ID NO: 31872
  misc_feature (1)..( 3000): 2750-1469P.txt file - cDNA_ID_3075050; gDNA_ID_1620751; Annot_ID_166808

SEQ ID NO: 34147 - DNA, 3003 bp, Unknown; identical to SEQ ID NO: 20527
  misc_feature (1)..( 3003): 2750-1469P.txt file - cDNA_ID_3075055; gDNA_ID_1620751; Annot_ID_166800

SEQ ID NO: 34148 - DNA, 3000 bp, Unknown; identical to SEQ ID NO: 4981
  misc_feature (1)..( 3000): 2750-1469P.txt file - cDNA_ID_3075060; gDNA_ID_1620751; Annot_ID_166798

SEQ ID NO: 34149 - DNA, 3000 bp, Unknown; identical to SEQ ID NO: 4979
  misc_feature (1)..( 3000): 2750-1469P.txt file - cDNA_ID_3075064; gDNA_ID_1620751; Annot_ID_166794

SEQ ID NO: 34150 - DNA, 3003 bp, Unknown; identical to SEQ ID NO: 20538
  misc_feature (1)..( 3003): 2750-1469P.txt file - cDNA_ID_3075064; gDNA_ID_2926183; Annot_ID_200438

SEQ ID NO: 34151 - DNA, 3000 bp, Unknown; identical to SEQ ID NO: 4988
  misc_feature (1)..( 3000): 2750-1469P.txt file - cDNA_ID_3075067; gDNA_ID_1620751; Annot_ID_166791

SEQ ID NO: 34152 - DNA, 3000 bp, Unknown; identical to SEQ ID NO: 5002
  misc_feature (1)..( 3000): 2750-1469P.txt file - cDNA_ID_3075104; gDNA_ID_1620753; Annot_ID_166837

SEQ ID NO: 34153 - DNA, 3003 bp, Unknown
  misc_feature (1)..( 3003): 2750-1469P.txt file - cDNA_ID_3075108; gDNA_ID_1620753; Annot_ID_166833
gagtactcttatatgtcgtcgtacgtactatagaaactgattgaaaatgatatcgaggaaacataatttgtcgatcggtgttggaaccttccatgcatgactccaattagagttctggaacttttggtttctcattagtcatgactctgattggacaagttctagtttttaacgactcatgactcttcacatgctccgaaagttcatcaaaacatttatcaaagttttacatgtttttgtgaacaataattatcttataaaaacatcaaaacatttatcaaagttctataagataattattgttcacaaaaacatgtaaaacatcatatcattttgtgggtttatattcaggtttaaagagtgtatatactatatatatatatatatatatatgtcataaaaactatgaaaaaagatccggcgacaaagacgaggaacgcttgtctttaggaaaataacaaaagtgatttgttttgatgatatattttcgtaaattcaaaacagaaagaatacgttatgtaagggagctaaatgagctcttaagatgcttaagaaaatggaattgtgatcgattgcgtacaaaacgtaaattcctatctaccatttctagtggtcggtttagccatagaatggccaatgtgattaagacaattgttgaaaactggtcacatgtatgttacaatttccggtactatgttcaaacagagaaaccagaatggattggttacctacgtatacatacttttaattttaaaagtttagagagcgttagatctaaacagttaatataacttaaacgtaatttggaatgtaacatcaggagtcacaaatgaaatgagtaaatagatagtataattaaataagaagcaagatttatttagtagacttaatagccagatcgattacaataggacataataactcataaatccatataggaatgaagaggtaaacattattaacctcctaaatatcctaaagcagtagccatagcaatggcagcctgagccatcattgaaaaacatgatacgatcaccaagaaacatccccatttcaacattttcacgatatttataaactcagcttaaatatgaaattattacaaaatatctttctggtttttaggtggggctgaaatgcttctagcatgatagatcaatttatagttgaaccatgcataaatgattaaatgatactatcagactcttcaaaattctttctcttctcgtaagttggaaattaataaaggacagtcaaagataaagaataaatgatttggaaattggaacattttgtcatgaaagtgcgtcgaaccaatttaggcttaagctcaaattgtatatgagcttattatagaggcccattcattttgtcaaaaagaaatttttttaaatatattttttacttcctcctctgcaaacatgtaaacgtgggacgagtagtcttacttgccgtgtaaacttaaatattggccatgtttggtccgtatcaatacaagaagtcaagaagaagacgtgttaagaaagaaattgaggaaacaaagcggtcgatgtggaaccttccgtgactccaattagggttctgaaacttttggtctctcatgcatgactccagttatcattagttcaataccaattctagttcttgacgactcaagtcaagatcattcagacggccttttaaaatctctttaacgttcgagacaaagataaaatccttttattttttcatagagaaaattgtaaaagaggataacaaaatagagagaatttgcttttaggaatttccgattgaatatgtagttggtaaagcctagttttatataattatatgtggacggaaaaagattcattatctcgcttatataaaaacataccaattaattatagtctatagtcacaattcatcatatattctagactttaaaagttgattttagaatttctgagaatcgagaggcaacaaaaaaagtctacaaatttgactaagaagaagcaggcacatccgccttgacgaagaaaacggtttggttgggaatgatggagttgaccggtagacaagtttcgtcgaagaaaacaaaaaaaaatagaaacacaaaatcgggtttaattttgcaatttcgcttcagtagaagacttgttgaattcaataacaatttagtttcgttcgacgagtgtaataacgcgttgagcattaataactatcgaggggccattaagcattaaattaccatttaattacgaattttaggggttgtttccttcatcgtagcttatcaaattacacacactcatacgttcacaccttcccatttttccaagaaaaaacttggttcatatttcttctaattcatacgttttgtgatagtattttcaacttttgttttaaagtttttcaacatgtattaccaattcaatttggtaatccaccatcatatatttatatattgctcgaaagatccggtagcagttgagtctgtctgacaaattaaaacactattcacgatttttttctacagttttactttaatcttaaaaaccaatattattacaaataaccaagtcaaagataaggtcaaccccaccagacaaaacttagttcacggcacaacaagactaagcactgaagtctttgagaggaagattttgaaaatctcgtgcaaagactaaaacatccttctttactatatatatctttcgctccactacgaaggttattttcgtaattcgacacaattccttacagagaataagcgaacagatcaacaactactctgctcttacaggcgacgacgtcaacaacaacccaaaataccaaaaaccctcaaaagtctcaaacaaaactcaaaacccaacaattaaagaaacaacatttcaatatacagatttacttccttttacagattttcctaaaaaaccgaaattgaaacaaacaaaaccaaaagacgttaccttttttccattgattcctcaattctctaaacaaatgagttaatcttccatg

SEQ ID NO: 34154 - DNA, 3003 bp, Unknown
  misc_feature (1)..( 3003): 2750-1469P.txt file - cDNA_ID_3075116; gDNA_ID_1620753; Annot_ID_166831
caacatcccgcatcgactaaaatatttagacaataattcataaataagatcaatattaataaaataaatggtttttttgcaggacgggttttgcgggacgggtttggcaggacgttacttaataacagttgtaaactataaaataaaaatattttatagatagatacaatttacaaatttttatatatactaactttaaaaaatcatttgtctccgcggtgtaccgcgggttaaaatctagtaccacttaatttcatacttaattttcaatgtgatatattgttatccttaatacataccaacatgtcgtcttccctctcatttcctctcctcaattttgtttatatagatgcgtaatctaaaatagtgtcgaagtgaactttaattattaagatctcttcattcatttgcctttttcttctcatgtttttgctttttatagatgaacaagcccttgcaacccaagcagaacaccgcaaactcaatgagtcacttacttacatatactttcgttattttatttatgttattgttttgttgattttcatggtttaatacatcatgtcatatgtatattatgctggtgttgtagaagagacgataaccatgagaaggaacttggaaggcataggcgaaaaagctcccaaattggggttattccgagcacttcacgtcatgccgagacaaaaacctctaaatagcaacgagaaagagtgtccttttatagaaagactaagtcttgtcagtgccggtccggtaaaatgtggggctaaaaattcaaaactgctaaattttgtttttgttgctaactatagggcatccataatttttatttcttaaattttcttaattttgggggtactgtttgctaattttggaatatttttgctaatttcatgattttttttgttaattatgggacttaataataatttaaaaaaacatagaaaacgtaaaaatttgagacccaatataaatgtttcaacattatgcgtaaaaggacaggccttcctaaaattagaacattttatatgatatcctcttaagtcttaagtactatcgaagccggagatttctaagttttacttttactaattaagctattgacacttgataaatgccatatttttgcattccctaaaacctcaaaactctctaaacacgtttttgtggacatattaaaatagtgtattttgtagtctcttccaggtttcttccttcttgtcaacgtcgcacaagtccgtttacggatatgggtgaataattgaatattatccatgtttccttattagcagtcgctattgtgggtttctttttggtagtctaatttattatttacttctttaaaatggggaaacagatacaaagttgcattacatatataacgcaatacaattagatcccatttgaccgagtaaacgctaagatccacacaaactcaatcgtcaactcctctctcttctctattctatatagttgcgtgaaatgtaatgaaagtgatcatcattcacttctaagatggcggtatctatagtttcttccatcattttctttcttctgtttatcatactttcacaatatgtagatggaaacggttttgctgcccaaatggaacatcgcaaactcggtgagtcttctacctgtataaatatatatatatatatatatatataaatagattacttttgagtcatgtagtcatgtactgttatattttattagttagctagttcaatatagcttatagacaaattgtttttgaaggtactaagcctaattaaaggcttgacgcgctatatgttatgtgtaacgtgcaggtggaccgaaaaaaacaatgaccatgaggagaaacttggaagaaaatgggcgccaaggctccaaaattgcaactcctgggagcacgtcacggcacagtggacaaaaaaacattgaaaaagagccgtcaaaaacaatttatggtcatcaattacgtcctgatcaaatcaaaaggggaagcccttgcaaaatctacacccgatgtaaacattcatcctcacttccacaacctcctccgcttccaagctcttctatagacacacaaggacttggtcactgatcgcactgtagcttcaaatgccaattctggatcgataaaacggtgtatattttctagtcttcttttctcgatacgactatttgtatattgatacatggaggtttatataactttggcgtgacatatgttgcctttggaatgtttaactatatattcttaagacaaagagaagctcgatgcatctgtttggctaaagctataatgaatctattccacgtacaaaaaacaacgaatgaatccctttcgaggggtttgaggaagacagatgataaacagtgttaagtccccacgtggctgagtaaactaaaacattgacatgcttgagcatgaagccaaaaatattgggatttcctatgtaatatcgcacgttcatatggttcactccttttgatagatggctgtgcgttcaggtcttggtcttttgtctctctcttacaattattaacgtatcttatcatttttgaacgtctgactattcttttcacattgtttcttcgtgtcactttcttaaaccttgtagaaatccctctccttaaagactgatcctttactgaaataaaaagaaacaccactatagtaattgtgatttttttttttttttttttgtacaatagttctcaagtcaagtgtcaattcctttattttgttatttaaaaataaaactattccgtggaaaaaaggattggacatgtaaatatggaatgaaatccacttgatcatacggatacatggtgtgcggagaccataactcaaaaccccacaacaaactaagtcctcatctcgaccaccttctctattctatataaatgcgtaaacgtgagtcggattcagacacatcacacatacaaagtaaattaggtcaattttgtgataagtgatcattaagtaacagagtgattattaagatg

SEQ ID NO: 34155 - DNA, 3003 bp, Unknown
  misc_feature (1)..( 3003): 2750-1469P.txt file - cDNA_ID_3075123; gDNA_ID_1620753; Annot_ID_166829
ttgtgccgtcggacttccacgtagcttttgctactaaagagagtcttgaagcggtcgttcatcgtcggaagagtagctacgcacttgtacttctgacctctgcgattgctctcgtcgatgatcttccatacacgaatcttgtgatcttgatgagcacttattagcttgtcgccaagaatcaccaacgatttaacccctccgtttccgttggcaactacgttacggtcatcgccggtggaatattccggtgagaacggaggttcacgaggccatacacgtatctcactgttggaagagccagtgtagagtaatttatctgagacagcgagagaagatacgtacgaggatttatctttgagcgtggctaagcaatggtgatcgacgctggagctctgatgctgaaaagacagcgaaggaaccaatggaagacttggctgagacaaaagcgatgatgacgttgaggattctgattggtgatgcgtcgatttcgtttcacattctgatcttgtttcattgcaaggcagaggacaagaacacggaagcaaacccattgttcttgaccaagctagagagagttttatgttttgtttgttttgttgttgtcgggaataatcgtggatatgctttgctttataagatgagttttcgtatcccgaggtagggaagatctggggagtttaatggagaattatatagaaaggtaaaagataattaaaagaaaattaaagtttagggtagtgtagggtgggggaactgattgacccatgtgtcgttactgtgatagtgtgatgatgtgtttgtaattaattaacatatctttgtgttcctaacttacctttttgtaattattatatttcccttataatcagttttggcttattataaagttatgtgtgttttgagttgagagatcaaacccgatgcttccaaagttatgttaaattccctttaccagggtcaaattgtaatcattatttctagttataatggtccccatcaatagtgatttccatttaaaattgttattgaatttgagtttaaataaaataatttgaactttactcctaaaaagttagtttgaactttatactttgaactcataaatttcatctcaaaattaattagtaacaaaaaaaaaagtatactattatgttcaaaaagagaaactatgcatgaatgaagaaccaatctaggaaaaataatccaaaccgtgtcttaataatctgtaaattaatgaactaatccaatcatctacactaaatacaaaaataatccaaatataatccaaaaataatactgaagtagattagtcaaaaccgatctagaaccgtcgcttctaccaggagcaccagaatcgccagtgtctcgttgttgagtggacggtggtggagatctagaaccattgaagttaggattcgcaccgtacaaatattggactccttccacgtcatcggtcgttaaatcaactttacgcctacccgtcctgatggttggatacatgatcgaaccttctaccgaggaatggcctaaccctagaagatgtccaatctcgtgaacagccaccgattctagatcaacagcctcagacacggagataaaaccgtcgcctccttcgccggagacgatccagttctcttctccgtctagatggaagtgtcccgtcgggggcgagaacgcatgtgctagcgttctcattgggccgtcgaacggttctccgtctccgtgctctccggagtagaatccgatgctgatgtcagaggtcgagaacctctccacgcgtgtgaacgttagtggagtcacctcctcccaacgagtgaaagcgcgtgagaacacgctcttgacctcttcggtcaacgcgtttcgcgggtcgaaagcgtaggttagatcacgacgatttctcggccaccgtggctctccggggaagaaagagtagtgtttaacggcgtggaagcgttgtccccgcccggcgaaggaaacctcgaaggttttcctaccgctatgcatagttgaggtgccgttgactacgtcggggttgccgcaacgtgggatcacaacgtgtttgagagtgagctcgtcgagtactccggtgacgtttagctggaagtttctctggtacatttcgacggcgttcttgagaatatcgtcgaagtcgtcagtgaagtttccggagagattagtttcggtgatgtagccaaaatgttgaaaatattgtttgagcatatagagaccatcgtacttcttgccggcgtgacatccagtgaaattcaagaatgagttccaggggttcccggtggcgtttcggagaagctgcggcggaatggctgaggagtttgtatagaaaccagcggagactggagaaggagcgaagaacaacaagaaaaccatgaaaacacaaatcctcaccatccaaaagagaaatattaaaaagattaagtgaagaggtattattgagatttacaagagaattagagagatgacatagataaaactaaacaagtttgacgttggagaaagcagaggtcatttctgcgttgcgtttggagaattttctatgttgaaaatgctgcattattcaaaggaaacttcctccgtcctcgtttcaaagggtctcacgaagaaaaagactaatgaagcttctgccaatagatagtgtcgttttatggataattaaagttgattggtggcttggtgcaatagattaggcccgatttagtcttggatgactagaaattgtgattgaccggtggtaaaggaccggttaaatgcaaagttggaaaaagaaccatgcaacaaaaatggttgaaggcggcagaatcaactaaattggttgaaagtgtttttgttttttttgggtcgttgaatgtttgaattggtcttttttctttttgtgataatttttccggaggttgttgttattggttgaaaaaatcaacgtaaaatctccaccttacacgagtaacgccatgacttgtttgttaggctatctaattttttcctgtaatg

SEQ ID NO: 34156 - DNA, 3000 bp, Unknown; identical to SEQ ID NO: 5005
  misc_feature (1)..( 3000): 2750-1469P.txt file - cDNA_ID_3075149; gDNA_ID_1620753; Annot_ID_166857

SEQ ID NO: 34157 - DNA, 3000 bp, Unknown
  misc_feature (1)..( 3000): 2750-1469P.txt file - cDNA_ID_3075165; gDNA_ID_1620754; Annot_ID_166907
cacctcaacttctccttctgtaaaggcagcacagagttggttagttttctgtattattttgatccgacattgtcaaatgcagagaaaagaggagactaggttgtctaaccgggaagacggacagccaagtttgcctgctcatccgcatcagcatttaaattctacaaagaaaaatgccaataatggcagaaacttgcattagtatctttctcacaactcacaagcatgagacgagaaatatgtgatatcattcatttacacagagagagacacacatagacatacccttagtacatgactgatctcaaaagagacacatttgttgcaaagtagttttgcttccttgtggagctttgcgagtacctcatggtttaccttccattgacctttaatctgttgtttctcagaaagtgttgagaaagtgagaagataaaagcgtatatgattcattaaacttacctagttgcacaaaaatatataacgttttaattgacgaacctgcatacagaccagcttggagtcacctttcactttaatattcttgtaacctttctcaatagcatacttcaatcctaggattaacgcatggtattctgctgcattgtttgtggcaattcccaaaccttgacgcactctacaaatctatgttgaaaattgatacttagatacatcactgcattctttaattagtaacagtgattcaaaaggatacataccaagctcccgtcctcagttttcagtaccgctgctgcgccggagagaccgggatttccctttgatgcaccgtcaaactcgataaagcaagtttcctaacacatgaggagataagagaaacagaccaacttgagcacaaaattttgcatccagtccattgaaacatgagtaacggtatatacaaacataatcacaactcacgtctgatatataagcagatggctccacctttgaaagcttttccaaaggatcataagatatagaagctgaaggaagttgatcctgcgaaaaatgaatacttaagcaacgagcttaatcgctttgtctcataatcattaaaattcagctaagcaactcaataagattccaaagaaacttgttcttatagcttacttttttgtcatcttttgacttcgtctctgaggtagtctcatcttcagatactttgactgtacaaggagctggctcctagtgaagaaatttaaagagagatagttactatttcagtttaaaatcccacatcacaaatcatggcagatgcagatattctccaagaatgcatcataggagagaagagaaatacagtgaaggccattttatgatcttacctggaaaagacatggtgtaagagcaccaaacatatcatctttcaaatctgaagctcttaaactatatagtggtttcttcaacccaacagaagagagatattcctcagtgtctttaggcaaagagtatcccttataaacactaaccggaagatcaaacacctacaccattattaagaaagctcttatattcccatcataaagagagtatctattatacacaacagactcttaaggccaaaacataattaccgaagatccaacttgagcctgacaatcactcaaatccttataaattccaataacatcacccttccgaacaacgaaaaaggcgtccttttctttatccacagccgaaacaacggttgatgataacatctttgatttaacagcctttgatcttgaggaataagaatgaacactacagattccaaacacactactcacagctacaggctttaaacatgattttgaaggcatatagaagaaacattcattccacggaatagaactgacatagcttgatctcttaagcagtcccaaggcaatgtatgaacgcgcatgagacagacagttcattacaatgtaagtcaccacacactgagatttatcacacaaaaaaaaacacacgcacaactttagataagcttcagagattcaagaacaaatgtcaaattacaaacatgaaatcaaagttgaaaagtttaacactttcgcagaattcgtaatctgggtatctatgattgaagcggataaagtgaaatttctcgacggcgaaacaaaacagaaaatgaaaaccagaggactgatgaaaatgagtaaaaaactgattagtagagtcaaattaaaatcttacgaagcacagagacgtgaatctctcgattaatttgtgagaacttgccggtgaagaaggaagacgaacccactcggtgggtttaagctgggttttggtctcaatcctcaaaagttagggtcaatgggagttttgaagtactatcaatttctaatttaggtttaagtattttgtaatgttatctatgttcagacaaggtttcgtggtgtagttggttatcacgtcagtctaacacactgaaggtctccggttcgaacccgggcgaagccatatctttcgttttttatcttatattttttataataatcaaaatgggcttttaatggacctaaaatattgacccaataaaaatgcaaatgcatgagacacgtacgtttttagtatctaaaatccatggtcattgttgttatcattgtcgacgttgacaaaaaccagtacaattgcaaaattcatcacgtgataattacggatgaaaaatatagtgagaggagttaacaaaacttttttgttcttttttgacaatgatttgaaaaatgaaaacactttttttttgggttctttttctcttttgtgtggttggtttaaagttgtgatatactgctcgtgagtcatcagcatcttctccaaacaatcagcaacgtacactacactattaacgacaagtcgagaaccaaccaaactaaagaaaaccaacaaaaggtctcaactaaaaaaaaacaaaaaacaaaataaatcaatgtgctagcttaaagatgcaaatgcaccattcaatcagagtctctcttgaagttagtcactgatgagcttaaactagacaaaaagaaaatg

SEQ ID NO: 34158 - DNA, 3003 bp, Unknown
  misc_feature (1)..( 3003): 2750-1469P.txt file - cDNA_ID_3075177; gDNA_ID_1620754; Annot_ID_166902
cctagtatatgaatatatgcaaaatggaaacctgcaagatcatttgaatggtaagtcaacaaaataagagcccaatccactaaaaccaattggcgactaaaccgcgtctttatcacaggaatcaaagaagcaaaaataagctggccaataaggctcagaattgcactaggagcagcaaaaggactcgcgtatctccattcaagttcttctgttgggattccaattgttcacagagacttcaaatccaccaacgttctactagactccaattataatgcaaaggttcttatacagttaatagaaatggagggtttatgcagcactaataccaagcatagactaaaactaagatgtgagtgtaatccttgcagatatccgactttggactagcaaagttgatgccagaaggaaaggatacttgtgtcacagcaagagttctaggaacattcggctatttcgacccagaatatacatcggtaaagattcttacttatatttcacacatgattctcttccgatagggtaaactagacactacttaagaaaaattaaaacttgctagtaatgacataaaatagcctggaaaaggaactttaatcacactcacatatcagagccaataggcaacggaggacaatttttagcataatttttgttcccttcttctgtggcagacaggtaaacttactctacaaagcgacatttatgcatttggggttgtgctgctagaactacttactggacgcagagcagttgacttaactcagggcccaaatgaacagaacctggtgctacaggtaaaatggaccttttaggttctatgattcacaaacacaaaaagttcaaagatcaggaaacttaacataggaataaactgatcaattatctctacgtttcaggttaggaatatactgaatgatagaaagaaattgcgtaaggttatagatgtcgagctgcctcggaattcatacagcatggaagctataaccatgtttgctgatctagcatcacggtgcatccgtatagagagtaaagagcgaccttcagtgatggattgtgttaaggaactgcaactaattatctacacaaactcgaagggtggtttgggtgggacgattcctacattcagaaggctctagacactgaattcttcgaaacaagtaaaatggattactgtcatttttcctaaaatgagaggtcactgataaaaaaacacttgataaatataaacaaacaatactaattatgaattaccggataatttcaattcaacttccagctaggaaactttgatcaagcgatattatttggatatatatactataatttcactaagaaaatcaagcactagatgtatccgtatagtatgttgtatttgctgctatgaatgttttgctttaagagaaatgagtacataaattcaggggtgtagtcttgttttttctttccttctttcgcctaatgcctaaagaattaaccacatgtctatgaacaagaaatacaatcgctgccaatacaggaagcagataacaaagataagagtgtgtgtggagtacctctactaagatcatataaacaataggtcgaagcaaacgggattatcaacccgacccttggtcatgtcacatttagctcctacataataaagccaatcacaatgtttgttataaattcagaaaaggttgagaagaagactaaaagctaattggtacactgatggaaaaactgtacccatgtttacacatttgcagaggaggtcagctcattatcagaccccaccatttctactataggattggtgcatagtggaagaagtttcttccgcatcaaatgcttacgccgctgtaacatcagaaggaccaaaactgtatctgtcttaacaacctcgtatcctgccttcttgtacatattgaaaggagcctcatcaaccatcctacaatgcaagtatacatcttttgatggactaatctgagatatcagttcctcactcgccttcaacaaatgccacccaattcctctccttctaagatcctctttgacagtcatgttacagatataaggtgattccttaggaggagttggagaaggaggagaagcattagcgcctcgtttctccaaacaaacctcaacagttccagccatcacagcctcctcctctccatcatcactaaactcatcaacttttttcctaaagaaaccaactaaagtaactgcgtgtggcaacacttctcttctctcaatcaaatactgcttaatcaaaaaccgtaacacagactgataaccagaaggtaataacatcgattcaccaaatgactcagccaatagatgcaccgttgaatccatctcttcatgtctcataactcgaacccacatcgatccagattcaagctcttgaaaatacgcaaatccttcaagagttttaagcttctctaactcatcgttactcaaaaacctcccggtacgaaacgattcctctagaaacgcgtaattcccggtcgatttagagttttcttctccagtttctgtagctgtcgaaactgaagaaggagggaaagcgaatctgagattggagcggtgagatttacacgagtagagtaatggatatctatgtgaagaagacgagaagccaaacttcgttgattgggttggtttgagagaatcaacagagaaagctagtgagatgcttaaagccgccattgacacacacacacacgattttctccgatttgattgtggttcagtgttcgctaatctgtttataacgaaataaaatggataaagtaacagtcatacactaatctttaaaacgccgcgttttgaactaatcatgaagctcagtagttattgggcccttatggcccatatactgatataaaaatgaggaaactgttataagccagtagctatttgggcttaaggcccatattgcgatatatatagttttaatttttccgaagttcggcgatttcagaagacggaggaggagcgaggacggccgccatg

SEQ ID NO: 34159 - DNA, 3000 bp, Unknown
  misc_feature (1)..( 3000): 2750-1469P.txt file - cDNA_ID_3075181; gDNA_ID_1620754; Annot_ID_166898
tcaactttgctagtccaaagtcggatatctgcaaggattacactcacatcttagttttagtctatgcttggtattagtgctgcataaaccctccatttctattaactgtataagaacctttgcattataattggagtctagtagaacgttggtggatttgaagtctctgtgaacaattggaatcccaacagaagaacttgaatggagatacgcgagtccttttgctgctcctagtgcaattctgagccttattggccagcttatttttgcttctttgattcctgtgataaagacgcggtttagtcgccaattggttttagtggattgggctcttattttgttgacttaccattcaaatgatcttgcaggtttccattttgcatatattcatatactaggaaccggtgtttcccatctgcacaatagccgatcaaagagaccagatttgggtggtcgagtctgctcaagatatccacctccacacgaaattctctttctccgtcagcctttttaaacgtaggtaaatccatcttcttgattgcaacaaccttcaaataacaagggattaagatatgtatcctactctaatagctcctcttcgatagaaaagtttttgtaacattacaaagcctgtaaatcacataaatgaagctatatagttcctacctctcctgtttttaaagtgccttggtaaactcggccaaagcctcctttaccgaggagattctcatcactgaaagaacttgtggcctcctccatctccttgagggtataaactgatgacccgaatcttcgcttccttggctgagaagcctgatcttcgatttgccagcattctgctgttctgtagacccctgagaagaaggttagtttcaaacagatggtgattcagttttacctaaaccctttatattcagtagtagtaatgtcgaaaaacaaaaacagtaacatacttttatgccatctggcgaagatgatggagaaaaggaacgtacatggatccgtatcatatgatttgcttctccttctcttgttccaagccgaaacaagtggaaaatgcatagctttagtttggatttggttttttcttatcctttgtagaccattacaaagccgatagaagaagcttctggtctcgtccttaagacagaagggtatgtgtctttctagtcgtgaagatgttctttgtagttagttgcttccaaagaaacagaagattgttgtggttgaagatgataaatatagagtgcaataaagttaattgattttgagggttaggtttctgaaatactcaacagcagtatttcaactaccgaaagttcaagagagagagaaagagacggtagagctgaagaatacgtagattacatgtacgtgaagcaaaagaaattgagagccatcttgagaaagtaaagacttgatgtttccttaacttttctaagctcaaattctcggtttggttctcttgtctgaatctatctccttctaaccagtttgtgtacgtacgtatctctgtcgatcaaatagagatgggaagctgctttcagagtgtttccttacccttttcgtctcaacttttttctctagacttctatattactatttactaatgttgttttcatagttcgttgagagagagattataaaagttaaactttataagtggagaaaacctataattttcttaaagcaatcttagttttttttaataagattgacaaatcctaggatactgtaactttaacgtatccaattgtatattaaggatttgggttcggatgaacttttgcttcgaatagaaatgatgactcattcttagaacatttttattttacgattgaagagtggttgtcgttttatatcaatggaaaccaacatgctgttttctcgcacaatggtgaaatcaaagtacctaacgatgaagaaattgttttggctttattgcattgcacctaaccatgccagtgccaccaagaagattattgtagaaaataaagaggaaacattcagctctttatgattagaaagttttattcttatgaaatgcaatttgcaattattaagttgttatgtttgactaattgtgtgacgtgaacgtttactgatttatttttgatcaatgataatacattatttataaccatttaaatctcatcatgtttcacatattggcccacagttattatgagaggtcgtaaatgagaaccaattatgtaaaatatgctacttcacttacttggttcttcagatcgattgtgtgacattaccattgttcaacaaagaaccaagtaagtgatctgaaaaaatggtaatctcacaaaatcgatctgaagaaatacgaacaagggattagtttatctctaggccataaacactctctatgataaatagtttttcaaataaatcaaacaattgaaactttgatctaaaaaccttgaaagaagagaaaccaattaatcaagtgttaaaaagggtagatataatcatgaaaagttgaaataattttgtttcctaaaaatttaaatccataataagaaaaatatatatgtagatgagtgtagccataaaaataacgtgtatgaatatatgaaaaatatctagattttttttttttttttttttggccgatagactctcaatactatatgtttttcaacatttatcaccgacaattttgttttaaagcagtacaaaaccagttttaatttctttgtactgaatgttataccatgcatcgatttattgattcatccacctctttgagtgggtgagatagcaatgaagaatggcaaatgtataagctttaggttaattttaaaaaggacccataggatgaaaaattagttggatgagttgctccacatagttaatgcaatttatcatatcactaaaggctttaaaacctctctatatatagacacgttcattgacaagttatacaaacaaatcattcaaagacatacaaaataattgagttttttttttaattagaaacaaatg

SEQ ID NO: 34160 - DNA, 3000 bp, Unknown
  misc_feature (1)..( 3000): 2750-1469P.txt file - cDNA_ID_3075185; gDNA_ID_1620754; Annot_ID_166890
tcgaaggggtgatgagtgatgacaggctttttcactatttttttttaccgattccaaattccaatgtttacaatctcgaaactttttaaaaacattagttgacattaccatgtgattaatcgttacctccaaattcaaaagtaaaatccgtttacaatattttttctttctgttgcttcagtaaaagtcctcaagtcccctagatattgaaaatctactgacacaaaaaaatagtaagactgctacttgtgtactatttaacttcactttaagttgagtgattcttttcaggaactaatgccaacgaacgatgaacgattattgtggattgttcccgtttttcgttgttatttaacgaccttgagacctaccactggataattaaatgtagtattattactccttttagataactacaataaattaagaaagacaaaacatattcggaaaaacttaattctatatttttcgaaattgctaggcaccagatccctgaatcaagcatagggctccacaccatttttttttttaatatcatttttcaatagatttttcaaaaaaatttaaaaaatgttggtgacctaattagagactgaccctgcttaataactcaataattaaaattttctaatgtaatgacaatatagctctctctggtcgttccaaaatctgtttagcaatcatttcagattccaaaatactcgctacattttttttttactacaaagtcagagattagaatttacatttctttttgagggtttatgattaagaattagagagtgttgtcaagttaaatggtgtctctgttcttcttcttcttcatcaaaaaaaaaaaatgtctgagaggaggattcattattcccagctcaaaaacgacaacttgaatcaaatctcgccttcttctgctccttctccaatcaccctgaatcatcaattaaccgactcttcttcttcttcttcctccggtggtaataatcgaataagccccatcattctcttcatcatcgttctcttatccgtaatcttcttcatctgtagcattctacatttgttggtcagatattacttaaagaagaaaagatcaaacctttcgtcatcaccaaacgaatctaatcaaaacccagaattttccgactccgatacttaccaaagacagcttcaacagctctttcatctccatgattcaggtctagatcaagctttaatcgatgctcttcctgtgtttctttacaaagagatcaaaggtacgaaagagccttttgattgtgcagtgtgtctctgtgaattctcggaagatgataagcttagattgcttccgaattgtagtcacgcttttcacatagattgtatcgatacttggcttctctcgaattcgacttgtccactttgtagaggaacccttttctctttaggtcatcaatttgaataccctgatttcaatttcgggtttttcgccggagatgatggaggaggaggagttagggtttctccggttcagaaaccagctgagaatgagattgggaagagagtgttttcagtgaggcttggtaagtttaggagcagtaatattgtcaacaatggtgaagtagtagtaggaggaggaggagagacaagtagtagtagtcttgataatagaagatgtttctcaatggggtcttatcagtacatagtggctgaatcagatctggttgttgctttgtgtcctaataatgaaggattgaagaataataaggatgttgaagggaagaagattaatatgagaagtaaaggtgagagcttttctgtgtcaaagatttggcaatggtctaataagagatcaaagtttcctaataatcatccatcagagactaatcttgtggttggtggttcttcttcttcttcttcttatgtttgttctggatctgatgggttatcattgaatggaaggagatttcagggtccatgagattttaagggtatagatcagagggtagctttagttctgccattgatttaattgaattattgattttgtgtgttttggtgaattcattttgcttaacacgatatgaccactgtagtgttgttttgtgtcctctgtagctgaatctctctgtttgtttaagggaataagcttttgttctttgatgatgttatagtggtacactcttatatgtgatgtttctagttctaaatcgaactttgttcataaatcagtcacaaattctgagaaagttagaattcttaaaacattttgagacaaaagaagattatgtatttgtgggacaaatattttaaaaatgaaggttgtaaaaagagaagtcaaatatattattttctttggtggggtttttaaacttttaaagagtatccaaaaatgggatggaatcattattggtaggggaaaataatgatgacccataatttgtattattctcccaaaagagcattcgagtgagttaggtgaggagaactctcacgatgatctccaaagtcgccttctaaataataacgtcacgatgatctctcaagtcacaagttgtcttcaaaatcatatccaaccaaatcaaatgaacattcactatttggtaaaaaaagcatctacaacacatgtttgaatgtctttatgtcgctactaagcagtttctatcagaaatttatatttggcttcaaataagggaggtgttggttgatcaagcaatactagtaacaccaaaatcttgagaaaattaatctgagtttgttagtttgaagtagatgagattctgagttggaacctcaatattgcactattttcttagagacaatgtgtgaggcaatcttatgaaagaaattatctatgtattaaataatttcattcattatgtatgggttcttaaattctaatcataaaattgaaaaagcccaactgaagcccataaatgaatacatcgaatcccacaaaatattaattcacttcaatataacgtaatcgccataacaaaaaaacacaaagtattcaccgacgagaagaatatg

SEQ ID NO: 34161 - DNA, 3000 bp, Unknown
  misc_feature (1)..( 3000): 2750-1469P.txt file - cDNA_ID_3075189; gDNA_ID_1620754; Annot_ID_166885
ttagtatacctgttgtggcttgtactggtcaccaaattgataatgcaggtagataatgccaaaagaaaacaaagaacagaagaattagataatgccaaaaaataagaataaaatgcaaaattttgtgtcaaatgcttaagatctgcttgccacccaatcgaaatagaagcacatatgatggattactctctgaaatttaatccattaattttgatgtgtttttggaaatcattaggaaggctagttctattgaattttatttgttgtgatgaaatttagaagacgaaaagataatctggaaaagaaagagaggcgaggaggtcaaacgcttcagaaacctaacttttttttccgtttacttacaccgattggatccttaaaatattaagctgatgtgacaatctgaggataaagtttgagaaggtaatgtgacaatctgaagttaaagtttgagaagctcatgtagatggtctgagagtcctcaattagcatcttttattagtaagagattctttatttccaattttccaataatttgaaacaaatcttttgtctcttcgttttttaatattacactttggggtaggaccgtaagagaattgttttcgtatgttgtggaagactcaacgcgataaacttcaattttcatcattgcatatttattttggtactatgtaaatttcatcttatttttgtcaattttattcaaccttatacgatatatatgattttagtgtgacatattacgtttgaagttgtgtagactactatttaaaatttaaatatcattaataagatatagtcaaaattattaagtgtatagcaaaatgaaaattgtaagattaaaatttgattaaacaaatttactaatttaaatatttataaaatagggattatcatttactatttagaattcaaatactatcggtaaagatttataattgttttttaaacttgcctatctaggcgggcctaacctagtacatatatatacttgtactttgatttttttttccggttgaaaagctactaatttttacaatttgttaggagatctcagatattaacagatatacttgaaagaaaattaagatttgtataatattttcttattgttaaataggtgtactttttaatattatatatataaagaatttgctaattaagtcataaaaagaaaaagaaaaaaaaacgtatttttcattcatgaatgaatgtattgactttgtttcataaatcagaaatcagatttgggttaagaaggctcaactgaagcccataaattaatccatgggatggaagtttacgacggtttctcctattcaagtgctacgagaaagacatgtggcatatttctttgtgataggtgtcatctctcaatttaaatatactattattttatttcattagttttaacaatgtatcttattttttttccaaaactatcttacaaagacaattttcctactaatttttgtcaacatttaaaataaaaatttaaaatttaaactttacacttaaatacaaaagattctaatagtgggtacaaaagaaacaaatatagcttattaaaattggtcatttttttattaaaagataacatttttaatatttatttactcataaaatatttgtatatatattattaaattagttataatcttatataataaagaatggtttctcctattcaaaagctactgaagctgacatgtagcatctctccttgtgatatgtgtcatctctcaacttaaatacactactccctctatttcacattatttgtagtttaaggggttttcacacaaattaagaaaacacaaattttttatttaatatctcttttttataaaaacattattaactacaactaaatcaaccaataaaaaatatatgatgtaaaatataattggtataaaactaaatgttgcatagaaaaatgaaactaacacttattaaaaaaaaaatcttaagactacaaatatatagaaaagaaggagtattattttgtttcattagttttaattatatgtatcattattttttctaaaactatcataaaaagacaattttcctatttatttttatgatcatttgatataaaaattaaaaattttaactttacacttaaatacaaaagattctaatagtgggtacaaaagaaacaaatatagtttattaaaattgggtcttttttgttaaaatataacatttttaatatttatttactcacaaactatttttatatattattaaattagttataatcttatataataaagaaaggtttctcctattcaagagctaccaaagctgacatgtagcatctttctttgtgacatgtatcatctctcaacttagatacactatctcctctgcttcacattatttatagtttaagggtttttcacacaaattaagaaaacacaaaatttttatttaataaatcttttttttttaaaacatcattaactacaactaaatcaaccaataagaaatatatgatgtaaaatataattggtttaaaactaataaatacatttaattcttgcatagaaaaatgaaactaacacttattttaaaaagaaaacaaaaatcttaaaactacaaatatatagaaacagaggaagtgttattttgtttcattagttttaattatgtatatatcattatttttctaaaactatcttaaaaagacaattttcctactaatttttatgaacattggatataaaaattaaaaatttaaactttacacttaaatacaaaagattctaattgtgggtacaaaagaaacaaatatagcttattaaaattgagtcttgctttttattaaaatataactttttaaatgtttattttactcataaaatatttttatatattattaaattagttataaacccacacacttcctagtttatatatatttatcacttggaatggatcccaaagaaaaacacaaagcagcatcaccgccaccaagacgagaagaatatg

SEQ ID NO: 34162 - DNA, 3003 bp, Unknown
  misc_feature (1)..( 3003): 2750-1469P.txt file - cDNA_ID_3075193; gDNA_ID_1620754; Annot_ID_166880
ttctaatgtaggagaagaaggtcagaacttgttcccccaatttggttaggagaagcttccatgtcatgatgaacgagaggtggttcacttcttcctgtctataacgatttggtttaagagatttgatatgttgattatacactagtatgtaatatgaggatagattaaaaaaaacttacatgacggatgacgtaagggcgaacagcaaatccaatggctaccccgagaatgcaggaaaggacaatccctattgaccaaagagagtatgtccccaaatctgaaacagtgaaagaagaatcgttgaagtttccaaaggcatggttagtcaaatccacaaaagattacttatagaaaagacatactagaatgagagttttcgaggcaatcctcctccttaagatttatctggcgaatcatttcatttccatgatcagaaacaagcaaacaacatctttgaggaacaaaagttatctcgaaatcgctagagaaagtagcattctgtgcaggtccatctctgtgtccaaatgcctttgagatccctccagcaatggtggttacagaacctacaaagtccagtaaataaaacatgcataatcaaaataaactaagtggctctttcaacaaactaagattagacaacaacaacaactagcatttatacaaaaggaatacaagaaatggattaaacaaacacctgaagagctgatcttccgtatagctttattactcttatcagcaacataaacattccctttagcatccacagcaaaaccacggggtttgctgaaccggctgttaccagctttaccatctacatgacccgaactcccatccccagcaaaccggtttatcacactatctgcacaaccacacacacatactcaaagtgagctcaaacttcaattgaaagaaagataaacaaaattttcacttatagtaaagtttagaacttttatttgcaggttgatcgtttcacacacatacacacacatattagtattgtggtccaatttgagattacggagaaagaaaaaatgaaggtcaagacttgcaatcaaaatcaacaagctctaaacatttacttatgcatccatgaatttacaactcatatacaaacacaattataatgatccgattaatagatgagacaaaagagtggttttgtgggtgtttaccaacggacaaaggaaaggaagtagtgtaaaatgtactgccggaagaatcaaggacgatcagattagaagatcctggtaaagcatgaatcgtgtatggattcagaccagacttatggccatcgaccaccgttgtgacttcgtacccttcttctaaaactatcttaccactcactgtaacaaaatcatgaggaaaattaaaaattcgaattttgggttgggaaattcaactgaattaacagatttttgaaaatatacccagattgaaaacgacgaacaagaagagagacacggacgaaaatccccaagccatgtcaaaatcgagaggagaaagcgactgttctgtgtaacttgtgttgtgttacttatttttgctgcttagcatctttaaaggttttaaaaagatactagggcctgagcgatactatgatgtgttcaagtgtaggggagaatttgtgtaacaaccaatgaaagagcgcgtatcatcgaccctctcaaatttgactaataaaaacggcccaagtagggcccatttatgtgtttaactataaagaaacggcccagtctatgtttttgttttgagaggattgctggtcgaaacgttaccgtttaggtggaaatggaagtcatgtttatacaacgcatttaatttggcaattatggtttacgaagactgagaagaaaaaaacgagcatcgtccatcgagatccaaatcctcagtttcattttcatctctctctctcgtattgatcagctactcgaaactccggtaacggattttcacaatcccggcggcgaaactcttcttcccggctaagttttcattttcttcagattcctcgtaaagttgccggtggaccaaggtccaactcttgaacaccccaaatcatgaatcccttttcttctggtactcgtttaaggtaaattgattctcttctttcctttttatcgtttctgtttcaggtttcttagtcgttgatcagcttacaaatgaaatttgaatataacatgatgtaattgagctcgttttcatttgaggattgaattttgttgattggcctgtttcgaagatgaatttggtattggtgtttctgattccatttagaattttgattttagtctaagaacatgatcacactaaggatttttggtaatccttttgcttaatttaattgaatattggattggtcatgttgctgttggggtttaatagtggaatcagatcggattattgtatatggttctgaagttatagtggacatatgagtatgattcagggacatgatccgtgccataagagcatgcaaaacagctgcggaggagcgagctgttgtaagaaaggagtgtgccgatattcgagcattgattaatgaagatgacccgcatgatcggcaccggaaccttgcgaaactcatgtttatacacatgctgggttatcccacacactttgggcagatggagtgcttgaagctaattgcatctcctggatttccagagaagaggattggatatctagggctaatgttgcttcttgatgagagacaagaagtgttgatgcttgtcacaaattcgttaaaacagtatccttactaatttctagtattaaatcttgataccttggcctttgaatggattcttcttctatgttaaaaaatactagagaacacttgatttttgattgcattgctgttatgggaattaaggagaaaaatatttaaatagatttgttcctgtttaaccttaagtcacgtgcagagatcttaatcactcgaaccagtatgttgtaggacttgctctctgtgctttagggaatatttgttcagcagaaatg

SEQ ID NO: 34163 - DNA, 3003 bp, Unknown
  misc_feature (1)..( 3003): 2750-1469P.txt file - cDNA_ID_3075201; gDNA_ID_1620754; Annot_ID_166876
atgagcaagtttcagttgcttaatggcccatatgagttggttttggttttcaacttttgcatcagtacttgtatcttcttaaattttcaaaatatagtaggctgattaaatctaagtttggagttggcaagtgtaacaattgttagttttacatataccttaccaatttacacatgattgggcacctaattcatgtgaacaagtctctaaacgattgcacacacacaaaaaaaaaagagtctcattgtttaaaattgcgtcgacgtaaatagaaaaggtttcatcatcccaccaaaaacaaaaagacacttatccattggggaaaacattctgaaccaagataagtcatgctgggtcccacttacatcgactcctctaagactgtgtctttgacacgtgtttagttatgattcgtttatttgcagccactgtgtagaccccacttacctccttttacaaaatcgacattcaatttacacgtgtcgctattccctggcttgtcccttaagctggacatgggaggaataagatactctttaatttttggatggctatggctaaatagatggctcagaagaaataagatggccataacttcattcgttatccaaagctaacattaattggttagtatcaaaatttctaaaattgtgaaatatttatagaatattagtatttaaaattatatctaattgtataaaaattttggggagtgattattagtgtcatgttacttattgtaactatcgttgtgcatatcaataaaaatatacggatttcaattttaaacctcacatttacagatatttagttagatatttaaaagggatatctgcaaaatggacaatatagatattcgattttttttatcgtagttaacaaatgcatgatatcatgtatcatatttacacatactattcttttttttttaagtctagtaaaacggataacgggttgaagaaggataaaaacatttgtatccagccaagccctaaattggtattgtcaagtggaagagcaagaaaagtaaagaagaagaaagtgtcaatctgattcggatccaattacccaatcctcgttggcttcctaaacaacgtgaaaacaaaacacggcttatatatgtcaacgttatttacattgacacttggaaccattaacaccaaatggggataatatcgtaaaataacacatggttagtactttagtgacaatcctaatgctgctttgtcccttggggggtttgagaggccaccctgacctacgtggtgcccttttaatatcaatacattcccgataatgtgtgcttacatgttttaattatcttagtttagtcatataataatgacttcgcttttaactatattatatttactatatgtaatatgtacatgcatgttgcattcccaatgatgtttgttccatttttatgtctttatctaagacttttagtaagacaagataactctaatgatctttcttttttgttaaagtaagaatatatatcgattcaattcatcttatcaatatggatatagtcttagatcgtgtgtagaagttttgttttttgaccaatacattaaattgttttagtctttttttttttttttttgccaacggattatgataattatttcttaaaacgttacctgcactttgtagagatgtgactagtcggtattttttttgttaacatgaaacgacttgtcgtcaacattagatttttgtatacatggacaccgccactttgatataaatttctcatgtcttaccaaatcatagattcaatatagctacttaaactatacattgaaatatttttaaaatacataaaaacaaaaactggaaccgtaaacaaaattgatgggatgtttttttatttgtttcacgggaaaagtttgtagaatttaagcatgctacatgcaatgttaaaaactgttgtatattgtaatttatttacaccattaacattttatattgtgtaaacttaatgatttggcaccagagttgagtttttcttagagtcatgtttacggaaaatctgattcattttggataaactcgtaaacgatagctcattataaaactaaccaaactatcattttattaaagtaataaaaaagttgaccagtaccaatatacgacctatacagagtaggtttgatgagatctcataatctcttaaattaaatacaaatttagcattacctttagattggattaaggattaaaattatttcatttgtttcagccgaaaaaagaaaatggtccaccacattatctagtcatcatctgatctactaccaaaccctacaataagaagataataagaggattgagggtaataatgtcatttacatacacctttatattattttattgccaaaattagaaaaatagatcgtaagaaaacgtgtatatgtgcatttggtattatgttattcggtttttatatttttcttgtctctcattaaattttcttctctatccaaactctgtatagcctgtccccaaagagtctcgagtccttatcgtgaacttttttgttcattcatctgttccacgaagaaaacaatttagatttctccgttgaagtttttcgccggcgatttagtgattctcggagaagaaggtgagtagcaatagtgtgatttttttcttttgggtttttgtggaaaagttttttattttcgtttcgttttgaactgtttcattcatgggtacagattgaatttgtgtgaaaacgtgttcttgagctgtttgttttcgggatctatatgtggcaagaatctcaattttgtgtttgatttggtctcgttgttttctgaatcatcttttggtgtggcattgtttgttttggtgatatagactcttgttgtaagatcattgtttcatcagttttaatgaaatgggtttgttttattttcaggtattttgacgcttgtaagtgtttagacgcgtgttggatttgtaaaaatccattctttggcttgattcttctctatg

SEQ ID NO: 34164 - DNA, 1177 bp, Unknown; identical to SEQ ID NO: 5026
  misc_feature (1)..( 1177): 2750-1469P.txt file - cDNA_ID_3075224; gDNA_ID_1620755; Annot_ID_166945

SEQ ID NO: 34165 - DNA, 3000 bp, Unknown; identical to SEQ ID NO: 5022
  misc_feature (1)..( 3000): 2750-1469P.txt file - cDNA_ID_3075236; gDNA_ID_1620755; Annot_ID_166939

SEQ ID NO: 34166 - DNA, 3000 bp, Unknown; identical to SEQ ID NO: 20558
  misc_feature (1)..( 3000): 2750-1469P.txt file - cDNA_ID_3075244; gDNA_ID_1620755; Annot_ID_166936

SEQ ID NO: 34167 - DNA, 3000 bp, Unknown
  misc_feature (1)..( 3000): 2750-1469P.txt file - cDNA_ID_3075269; gDNA_ID_1620755; Annot_ID_166923
tttgataacatgcatgtcgccccatcaaacacactccaataatgtcgcaacatctctctcctcctccttgccgcatgctgtgaataattcaccaaatcaatattgatttgtgccaaagaaggagagtatacatcaaagaaagagcgtcaagtaggagaaagagttgcttctttatcttctactgcagaatacaacgccattatagagctcaaagaactaaagaataaattcaagaagaaaagactatgttttcctctgcaactgatccctcaaaaataaagagagtgagcgtgactagcaagcgaaaagatctagaattcaagagaggcaaaggagaacgtatcttgttccttaactcggtttattgaatctctatgtgtagcatctttctggtttcttgtactcgatattgaaacccttaataagatactttgtgagctggtcagtaagctcaccaagacgtaccttagccattttggctttgggaacttgtaaatcttgtgtcgtctcttttctttttctttttctcatctcttcattctatttacttattcggcaaacaaacacaaacaaaataagagttaacatgtgagaagatggactaaaggagggaaaaccgacaaacataattcacaacgctactttgtattcggctcatagaaaccttttattgataatgattgaaaattctatatcaaaaaaattataggattgaaaatgatactaacaaatttgcacgtagtgattcatgcttaatgttatattaagagtttatgttttctcctattttcgttgtacataaaatgcattcaacatttaaatctaaagagtggaaaaagaacgtcaacaaaacgaatacaaaatgaaataaaaatatataatagacggaagatgtttaagctctaatggaggtgacttcaacttatagtcttatataaccaataacacctccttaaatataacaaaattatgtccaaaataaaaaataacattaaagttatttataaagaatttatcaaaaatcaaataacatctttaccaaaaaaaacactatatatgtaatgtgtcttttttttcttctttgaatttgttaccattgggtgtgtttgctttgttcgggtatgaggtctatgtagtgtatgtagaacttcaatatctttgtgtgtttataatgcttagttagggtgtgaggtttaccaaaccaagttctatacttgctacattgattccacaccctaactaagcataataaacacacaaaaataaattcaatgacactatgactacgagtaacaaacaaaattctcctcttgctacatcaaatcacaccctaactagcataataaatacacaatgataaattcaatgactgagtgaagtacaaaccaactcaagaaaacacagggaaaaaattgcttttctttgtaattacagaaatgagcgtatcaaaaacttgcagctttaagatagttgatttgatgaatacagttttggaaaaatgagaatgttttcccaaatgcaaaacagagcaaactaaccaatcaatgtaaactaagcaaactaattaattttaagcagagtttctgaccctgcacaaatctgcacagcggaaaatgggctgtgagatataaggattgacaagacgtacccatcggtgcaattgtcacttgcctgttatttgcatttttctgttcttcgctcccatccctaacaggacttctctgtctccttccaccaggacttctgcttctcctcttactcctccgtcctctcttgcggcgaggactattgctcccgtatcttctgctcctgctacggctctccccatcatcatgaccatacttctactgcggttatgcctttcatgagagcgatcttcgtgactataatgcctgtaagggctcctatacttccgcaatggctatgcctgtttttgtatcttccatataactgcctcctcaatccactgtcaagagagtcaggtggttttagtacaacataggaaatctatatgaaccacacatgacaaaagaagaaacatgtgacatgctaatgctttttactgttgaattttgggatgatttatgtacgaagctacttgtcaacagtacgaggaagatacttgcaaacaagtagcttcgtacataaatcattcccaaaattcaatctcctgaggaagaaaaagttacaaacctcgaaatctttttgcatacatcaacaccaggagtgataatatcgggacgttgattgatgattttgctgcagatcatgtacaaagaaaggctttatttacttgaacgattatgcaatgaatgttttgaaggatgttctgttgtcctctgttttttttagttgtcgatgttctcttttcatcagattaattaggaatcgtttttatcacaactaagaaatgtaattttcttaagttaaaatttttttttagggtccttctctcgtgattgtactgggtccagaaattgtttgagccggccctgctgatacgtattcgaaaggagaagcgttgggctgatacttggtttggtgtagagacgagagcatcgatctccgttacgacaaacgccgattttgaagtagaaaggacaattcacgcgatctttctccgttccgtatattgacgctaagtgctcgaccatcttccgattgctttttgaagaacacgaaactcttttcttcttcttggactagggtaggtctctctctgatacttgctatgcctatggatgtttcaagagatttaagtttatttacctttttaccccttctgttttaactattttcaatccaaccacaaacttatgttaaatttggccaaaatgcgattgggctgaagcccataatctatataagtgaagaagacgagcgctgcaagaacggttcgacacaacagtgtcagtgctagtgaacagtcaggttatagggtttcgttgctttggtcgtccttaactttaggctttgatagtttggttgtgaagttcaatg

SEQ ID NO: 34168 - DNA, 3000 bp, Unknown
  misc_feature (1)..( 3000): 2750-1469P.txt file - cDNA_ID_3075278; gDNA_ID_1620755; Annot_ID_166920
tatacaatccttttcatttaaatatatataccattaatacaattatcactttttcttataatgtaactaaaataatttttatttatttattttccatctaactataaatattacatcaatttcaagttagagtaattatgtttatatttatctaatatatattataatataaatacaaattaatttatccaagtttcagtttgttttatataatttagaaatcaataatttttcaaatatagaagaaactaacatagcaaattaaataattgaaatttccaaatatttatttagggtaaatatatttaatatttgtgtatatttggttgttgattttatttagttttgttatttttaataaattgcagatatttaattaattgtatattattatgttttgtgtagatatatatatactatgtctgtaagatattaaaatgttaatgcagctcaatggttgaatatcctctattagtccagaatgtcagcatttcgattcacttgaaatggaatcgaaatgctgttttctttctcattttctaattttcaaaacgacgtcgttttgatataagagagattctaacggaaagttaactccgtgattgtttggttgacggaaacttaatgacatgccctaaatggtcaagtcaacaatttttgattattttatcaaaagtcaaactaaactttaggatttaattgtcttcttgaaacttcatacttttttcgtcccaaatttgaaagttcgcgatttttttgacatttttcccatttttttatacttaatttttttttatttgttgatttatatcttctacttgtaggtgacattgaagaaaactttaatgatggaattgaaggtactacatcgatagcaagtacctctggagtatgagaagatgttgtttagattttttttcaactacttttgtatttcagttttaaattgattttcagatttttgattactttttaagtttctcttgtttactttgaaatacaaattattattattttgcagtaaaacgaaatttacatgatatatttacataccagcttactttataagcaaaatatagatacaacatacatataatagtatattagcagttaaacataaacactaagaaaatgacataaaccaagttgggtacccacgggtagtctcggaataatcggttttttttggcttttacccactaaatcaaaaacccatctgggttttctaaagttgagtttttggtgaacgagtttattttgggttcaggtcgggctgggcttttttacccaccacatcatctctatacatgtgcaagaacattagaggcagaggatataatgttcttagtatctctagtccaagacttggatcgtatatgcttgaggaagacatgaaaacaacgttgggttcgttaatttgttgctactataacaagaaaacagaaaaaaaataagtgaggatcttgacacatttcttgatctacacgtcatatatctgtaacgcccgtgaaccggaaaatcggttaggatttgtttttaaatcatccggtttaattggttgggttaattagaaaccttagagtgtgcctataaaagaaggaaactcgaaattagggctttagttagccacttttcgtttataaaagagaaaaagagagaaaaggagaaggagcagaatcgttagggtttgggagaaatcagtttcgtcatatcaaatcgtggtaaaaggtaacgaaatttggtagagttattctcaagtcctttatcgttattctccagtttacagaattggatttggaataaaattggttgagttattcgcagtttcgtgagacacgttttctcagacgcgaattaggaccagcggagattgaaactgagatcgtggtctagtctgttttccgatcggcacgagattttgtgggcagcttttgacgtctgtagctaggatttcaccggagagattgaatagttaacggttaacttgtattttagggtttcgtctttgagactgcttgtttttggtttttcctgtccagtttgcttcaaggttgcttttggttgtggacttgttgtaggacgtttctggactgtttcagacgcaaggagagtctctcatgtgtttaattgctattagaatcaatttgttaaggtgagtgcgtgaccatgagcttatctgagcgattgagttgtgtgatttgttttgggtgatgatatgtaggtgtggtgaatgtgttttgggtgaattgttcaatgactggtttgtttgtattgtattcgtgattatacccttttatttgcttgtgtgtatagctcgtagatgggaggatcgcctcactaagtatttatgataatacttacgcatctcattgtgttgttgatgcaggtaaagataaagtatgatcgtgaaatcatggcaaggaagagaggatgatctaggaactcgtttgtttaatttttggtgtttttggttattggaacccggttaggattgtcagttattcttggttttgttggtcgaattatttatttattcataaaatagtatttttgacttgcggtttaactattatgttattggttggtttaattagatatttatgggaatatttaattatatatatatattttttttttaaaaaaaaggtcgggttgttacaatttggtatcagagcgatcacggttctgggatgtgtagaataattaattgatgaatttttttcatgatgattgatgtgggatgagctacggtgttagcatagtgaggattgactatggagtgtttagtcaattttgtgttgttggagtcctagcatcatcttctccgagccttaaatgagatttcacggtaagttgtttgtgatatattcgtttgttttagtttcttagccatttgttcttgagtagcgcagatggttataagagctggagttcgtggtcgtggtcgtggtcgtggtcgcgataggggacgagtcctcaagggtaccggcgagagtgatg

SEQ ID NO: 34169 - DNA, 3000 bp, Unknown
  misc_feature (1)..( 3000): 2750-1469P.txt file - cDNA_ID_3075325; gDNA_ID_1620756; Annot_ID_166990
aacatcaacccagcattggtcatggataacttgaagccctccgatattgtcctgaagaagaatggtgataaacgagaaatcggtgtgcttgcttatgcctaaagtaaggtcaggctgagggcaaggtggatagtattggccaaacatgatatgagacttggcacagcccatgtccttgaggtgattagggtttaatcccaaagcctcagatagaagctcaaagagaaattcacctaaagtcattagttgctttgagtactccatcataatctccctgtcacatcaaaatatttgcaagagattagcgtacgtctagctattcacaaggcacatataacaaatctattcaaaataactttggtatttaactttttgatttatttatctttaatttaatatatacattgaaagatctgttaaaatccaatgtgaaataaataaataatttattaaaaaccaatgaaatcattaaaaggttataattactatttagaaatcaataactcatgataaaatcaagtgtagaatccactaacttatgtagttattaattattgactttttatgctttttcaagtttaaattttgtaataaccgagttaaaacacacaagatatccgatctagtagacccgaagcaagtagatgagaaatacgccaattcgtacgtggaaattctttctcataattaaagtaaaagaatataatctctatcatcataaaccaaaaaaaaactaaagagaaatgaatcctagctagctaggtgtttggtatggaaagggaaacgttacccgcaaaccgcgggcaagtcctgtaacttgggaggatcgggggccatgtaacaggcgagcgtatctctccaatttgcagccttattacaagtgtggagatcgatgttgctgtagtaaagcacatctctagtgtgatccctagagtagaaccgtttcttcacttccgggtcctgctcgtgaaacctgcgaatcccttctttcatcctctccatcacctccaccgagatcccatgattcaccacctggaagaatccccatctctccgcagcgtctccaatcttctccaccacgctccgccgcgatatcaaatccatgcttcctcctttcagatccaccgtggggatcgtcagctgctgcgaaggtggtgctgtttgtttcaggcttgttagagtatccggaggtgtatggaacatggctggaatctctttgattcccgaagccacaagccctttcacgccggtttttgtctcgtcgaaagcttttgcttgacttgaacgatcacttgactccatcttgcttcttctttcttttttttgcaatgcacagatttgcataagtgctattattccacatcttaatgcacatcttaatacaattaaataacaaaaggaatcgtgacccatattaagataacaaataaagaaatgaatcgccaaaaacaaggtccattagtttatttcaattcctatattaaaatttggattcttaattggtcgtttgtctttacaagtaagaatagcatccggtttgaacttttgttaattaactacacacttaccatattaaatctcatcgccattgttgctcgcctagctctcgaaacgccactaattagcaaaacaacatttaaagatatctcgtttggaggactttggacaatcgttccgctactgttcattttctctctctttgaagttttttccagtttttacagatctagttttttctgcctctgttcttcatcttaggttatgaatttgcaagacaaagcaggagtaaggcaagctatcttctccggcattggagtggtgtggtttttccggtaagcgtggcagcggtggccctttctcggtggatgagaggcttctcttccgtttcttcctggttatggacgtcggtggagatcggtgaagtctttcttggttcaaccacttggttagacgctgtagctgtggcggaagacgctgtggattggtgggttttcagtgcgtgtttgatggttaacaaactggatctgagatggctgttgcgggttccggttgctgaagggttgtctgagccatcacccttctttagcctccgttttttgtctccatcaatccggattgaaggttgctttgcttttggaaaattttcagatctaaggttttggaggtcagaggcttggaaatgcgtggtcgttttgcgaggttggggactcgaccaaattgggtggcggagtgtcggaaactgggttttttccgttaggtttgttgcaggtccggccagctcattggtaagagatttgcggcaggactcgtatacttcggccaatgatctcgttccggtggttgtgttgcaaagtagtgggccttgtatacgacggtactaatagatctatttgctgcctccgttccactgcccaaatccacctctggttctctttttccggtgaccggatttttcctgttttgtaactgtggacgattgtaattccgggcctaagcccaattgggactggacctttttttttaaaaaaaaaaaaaaaagatatctcgtttgtggagaacgcatgctagcaacttccctatctataaaatcagatttgcaccccacaaactaaaatattatttacgtacttgattaattcctacaatatagtcatttacaaaaataaccctccatttgatatttaagtcaaaatcagtcaacggaacgtggaataaattataactttcgacgctccgatcagattcatcatcatctctctctgtgtcgctccgattttgaatttggaatctcttagttaagttggaagtttgttctttggtcttttcgcctagttgttgttggatctgttttaaattaagccaaaaacctccgattagatcgatctcggaaccgtcgaaatacagttcaccgtatccgttgtttgtttttggtatatgtatgtttgagaagctcttaccatctttgtttacaagtctggttcttggtaaactttagctatg

SEQ ID NO: 34170 - DNA, 3000 bp, Unknown; identical to SEQ ID NO: 20563
  misc_feature (1)..( 3000): 2750-1469P.txt file - cDNA_ID_3075340; gDNA_ID_1620756; Annot_ID_166982

SEQ ID NO: 34171 - DNA, 3000 bp, Unknown
  misc_feature (1)..( 3000): 2750-1469P.txt file - cDNA_ID_3075344; gDNA_ID_1620756; Annot_ID_166975
tccccaaaaaaaaacaaaaatcgatcgtttgttttgttttatgaattaaacacagtaaaattgatgaaagagtagagtaaaattcacgactaatcaatcagtgatctgggtagaagaaagagacgagagaaatagagaaaacaaagaacggttttacgatgagagaaagagaggaaagtgctatcgaatggatctctgactctggatttctatttataaacagttgggctttgcaagtgcccaatgggcttcgacagtttttgaggcggttagtggagactgattctttcatgaaaataaaatacgttgttgttgaactgtctattttcttatttaataataaaatcgtacaaatcgagaatacaaaatacaagcttacaccaagacctacccatatactaagccatggaagtaacaaatggagagtcttgttctctccggcgatgactggaatcaaacgccgacaacgttttgttgttctgaatcttcttcatccttcaaattatcacgaagattgagccttgttctctccggtgatggggttttatgaagatataaacgcaaacaattcttaaaactcaagagtcaaaacaagtttcaagtaaagtcgtaaacttgacacgccttttaacactacccattctttcataaccaatcccaattttgctatgcattagcttcattgctaaatctgcttttcccactttcctcaacgcattgatcatcactgttctgatcctccctggcacttctcttcctctctctgttatcccatcagctaatttacaagcttcttttatccgaccagctttacacaatgtatttatcatatcttcacaagctgcatcaagaatcacacccattggtgctaactcatccagtatcttacaagctctcgccacttttccggacaaacatagcccagtcgacaacgccctgaagcaagctgcggttggtgtaatgcctttatcgatcatcatgtcccaaagctttaacgcctcctcgtttctatgttctttgaacattccggataagagtatcgtgtatgtataaaccgtttgatcacaaccttcttcttcttccattctcttaaacagggctatcgcttcatcgactttccgatgctttgtaaacgcatcgatcagtgcattgtaacagtatgaatcccttgtgcatcctttctcagacatctcttcaaaaagcctctcggcttcatctactctgcccgcttttcctaaaccatcaatgagactagaataaaacattgaattgatagccaatccgtcaaaccggcaagtatggaaatagtccaatgcctcttccactctcccgtttttacacaaaccattaactacgacagaataagttaccacatcgggtttaaacccttcgtctatcattctatgtaaaagccttatcgcgtcttcaacacttccacttttcgcataaccatctatcaaaaccgtgtatatagctacatttggtttagatcctttacgtatcatattctcaaaaacagtatacccttcattcaatttcccttccttacaaagtccaccaatcactaagctaaacgcatgaggcgggacttgaattcccttctcatccatctcttgatacaaagccacacaagaaccaaagtcgctatctgcataacaagcctggatcatagtcatatacgtaatcttatcagcctcatgacctctcgtctccatatctctaagcttctccatagctttctgtgtctgccctgctttacaataacctttgatcattgtgttataagtcacaatgtctggtttgatcctgccactctccataacctcaaaaacacgctctgccgaatcaacgaacatggcgctcactaaaccgttcatcaaaaagttataagtgtacaaagtcggctcaatcccattctctttcattttacgccaaacccacaacaattcctccaccattccaagcttcccaaaactcttaatcagagcattcgccgcagaaacagtcataggaaactcaaatttcttaatctcactgcttacaaacctaattctatccacatcttttgccagagccaatacatcaaccaaggagacataacactcgaggttatgagtatacttcttctgcttacgagaccaacagaagaaactccaagcaatatcaggtttttcgcgaatctcatcggatttcaacacaaacgaaacaaaattgggcgatagtttgataagaaacttacggcagaaaccatctagattcgattccatagaagccgaaccatctaaaaggttgagaatttggcttacccatggcgacggcaggagattacgattcgatttcaccaaatcggagacatcgttaaaaggttctatccattcgggaggaggaagtgagctgctattgaacacccatctaacactcgtccttgagctcgataaaggcgagcactttgaatcatccgacaaaaagtctccatttttgtacaaacagtgagattgtgaagaacaatgcggacgattcagaagcggtacagaaaagggcttccggtaaaatcttcgcatcggtaatttcttcaagcagccgcaccggcagcgacattggtcatatagtactcgaacactaagttttaatttttaaattaacatggagaaatcgtaacgaaatggtcccatggtctagtggtcaggacattggactctgaatccagtaacccgagttcaagtctcggtgggacctttttttttgttggcaatcacgtaaaataattgcgtaattacaacaagttttttttggatcttgtctttatttgttttctctgtacattggtgttacaaaaaattattatgatagctttattagggttttttttttggtcaacgaattacgttattagattaaaaatacaaaaaatatattcaaatgtatttgaaggatttttgttaggagctgtaaagtttttgtctttagcctcctacacacactacacttggaagtcagatg

SEQ ID NO: 34172 - DNA, 3003 bp, Unknown; identical to SEQ ID NO: 20566
  misc_feature (1)..( 3003): 2750-1469P.txt file - cDNA_ID_3075346; gDNA_ID_1620756; Annot_ID_166974

SEQ ID NO: 34173 - DNA, 3003 bp, Unknown; identical to SEQ ID NO: 20568
  misc_feature (1)..( 3003): 2750-1469P.txt file - cDNA_ID_3075350; gDNA_ID_1620756; Annot_ID_166971

SEQ ID NO: 34174 - DNA, 3000 bp, Unknown
  misc_feature (1)..( 3000): 2750-1469P.txt file - cDNA_ID_3075367; gDNA_ID_1620756; Annot_ID_166961
cagtttctgtagccccacatgtttaaagactacaaactcaatattatttcttcttcttttaaaacgagcaaagctaatcattaatacattaactacagactaaacccagaggttacacaccgtacacctaagttaggacaacgcttcaaaacagattttttgttcattttattatgtcatcaaattaggaattatctctttaacaaatgaaatttgagtaataccgacatattattaatctataataattaaagaatattagcttgaaaaacgtctatggttttactaaaaatttagttttcattattctttggcttttttaatatcttgaaacaaaaagataaatattgcatgaccggtggagacagttgaagaaaacccaaccaacccatccaacacttgaataacatattcattttactttggtttatatttcgtgattttgttttcttaattatctctctctctctctccctctccttttctcttccatagttaaattctacagttttaaactctttggagatccaagaaactaaactgatggtgaagttaacgcagagattgggtgggttggtactgcgatttgcggcattttgtgccgcgttaggagcggttatcgcaatgatcaccagccgtgaaagatcttccttctttgtcatctccctagtggctaagtatagcgatttggctgcgtttaagtgagaatttttcttttctttctatttgacgtgttttattagagtatttagagaagtgtatatgtattctaatgatatgttattgcattcgcatgtgtggcaggtactttgtgatcgcaaatgcgattgtgaccgtttatagctttctcgttctgtttcttccaaaggagagtttattatggaagttcgtagttgtgttggacctggtaattaattatattacctctttaattacattcaacttctttctatcttgacagttcaaaaatatatatatatatatatataacaatttagatataaacattccaggaaattacaaaattgatttgaatcatgatacttctaaatttgtctatattttgaatatgtgtttaatcattatgtatttgtaaatgctaaattaatcgtgaagatggtgacaatgctgctgacgtcaagcttatcagcggcagtggcagtggcccaagtgggaaaaagaggaaacgcaaacgcaggatggttgccaatatgcggtcaagttccgagattttgcgatcagataaccggagctctaatcgccggtttagttgcattggttctctacgtattcttgctcatcttctctatccaccatgttgttgatccttttcttcttcgaaaatcatgaatcaaagtaatataaaatttaaggctaaatattcatggaaccacatgtgtttttgtgattttagtgttgttcatttaaaattaagtcacgtgtcataatttcatatggttaatcatatcatcattaattaataaataatactatcttttctatagataagattatatttaaagttatgttactagataagattaaactgacaatatattacatgaaattatgacacgtggatttttattagtgtagtagatagattgatcatataaaattatgtaataatttgtttaataaaataaaaattatgtatttttttttgtttatgtatatatatgagaaatgaacttcaatacattttcaaaaaaaattgtgttgaaatataccttagtcgttttatgaggttttaaccttgagcaactcgtttttccgcatgtgtttttgaacaggttgaatattattaagtgacaaaaatctttttgtgggctccattacttgatgatgattgaccagctcacactacatcacgtgatcaacatctcttactcaattgatactataattcgaatagaaagtaattcagttttttttttccctataaattctaagacatgcatgcttgtactaaaatcatttaaagatttcgtagtatatgcataaaatgatattttaatatatgcatgccatacaacgaaagtgtttagaaattgaatgattgtattacttgtagtttcaaagatccaacaagaatgtgtagatgccctatacaatacataacattaattagaaatggatgatttattagccttcaaaatctaaccgttacttttacattccacactgacacactggtctggttaataatttcaaattgccattcttatttttacggaaactaaacaacaaaacaataaaatgtaatggctgtcaaaaaaaataaaaaaaatgataaaatgtaatgtgtaattgcgattttacgtaaaacgacaaaacaaagcattttaatacacaagcaattgaatatatatattttttcaatttttcttatttatatttttttttctgttttcaagtatttaatttatacttaaattttgttattaaaaaagttatatcatcgttggtcaattggacatgatttgaaagtattttaaaatatgatcaccacacaaaattgaagaataacttgaactttaacataatgtcaatatactttcgatcacgttggaaggatatctacaaaatgaacttgatattttttttgctatgatctatcgttttatcagctatgtttgtgggtttaatttcgatgtggttaacagtgtctagtagtacatatgccatctataactcgaaaaagctacatctaagtggatatgatagcttacaaaatctaaatcgtaaacatgatcgctaacctcacaagtgttgtcgttttccatcgctctgttatagtcataggttgtttttttatttattggtacaaaatagaatgttaatttacttagcccaacaattaaattttctattgatttggtgggccaaccaaatctttttactaagggttagccaatcattcattccaccacgaaacttttcttcttctcaaactagtttttcagaatttctagggtttttgaaattggggaaaaaatg

SEQ ID NO: 34175 - DNA, 3003 bp, Unknown
  misc_feature (1)..( 3003): 2750-1469P.txt file - cDNA_ID_3075380; gDNA_ID_2926144; Annot_ID_197615
ggagcccaaacccacctctttaggtccacgtttttttacataggctctaatatcaattgttggactctccaagcccaaatatttttctctaatatgatattgtccgctttaaaccaagaggccaagcccacacgaatttgtttttgaactcgtaaacataaacatgaaaagaacactattttatatttaaattaatttaataaatgctcttttctataaatggctacacatattttttctcagaaactataaatcagtatttcctcttactgatatgaaatagaatataatttatttcaaaaatatctaaacattacttaatatatacaattatagctagttttctatattattataataatatgaaatataaataaatcaattacaactacaaaagaatttaaacatttctcaatatataataaacaacaattaaaacttattttacaatattattttgaaccattcccgtgtgactgtctctagtatgatatatctaaggttttttaaatcatatgcaacgatttcaattatttttttctaggctatatgtatgacttaatatattcgcttagaacttctcttttggtttttgtcgtcaaccattaaaaacataattttatgaactgaacaaagtgaaccttgaatattttttacggggtttatatgcttaagcttcatattgattatatagcaaacgttgcaaaggctgtttctataaacgaaaccctacatcaagatgatgaagtcatctctataactataccaatgtgtacgacttagagtttcgtttatagaagaagcatgttcatgtatcggatcatacatttcaaaaacacggtttgatacggcaacgacgacgacctttgaggttgatgaagaagaacgtgtcccaatcgattcaggtgactttgagtttgtctcctacatggactgagcttaattttgatagttgcacatattcttcttataagaacgtttatgatgtcctgtaaatccctgtttcatgtgtcttttgtgtttatcaatatgttttgtgtggattagtgactagttctttttcttcacaacgttttatatagtaagagtcatgtttttcacaatatggaagttagagttggagctttatatgtggcaggaacatccagagttctcctatgtgatcttttgtgcttcaccatcacaaagctctaatactaaggtaaacatgttacatatctctgttttgtaatgtttttttactttagaaaatctagctaaagtcaagtgttttgtaatgtttttgacatgttacatatctctgttttgcaatgttcaagtcaagagtttaagtttcagttcaactcttgacaaatgcgacaagatttgacatgatattgttggtgtctcacaggaaaagtcaccaagcagtctgtaacttgaaaaacgaatttaaaatcaagaagcaagactctgagatctatgctgctaaggtaaacatgtcacatatatatgttttgtactgttttagaatttctgttttaagtacttttgacttaaatgttttaagtacttcaagctaatacataacgtttcacaatattccttgaagctaacacttcatagaaacaaggtacaacttcgtcaatcaaccaaacataagttcttctgcctctaaagaccgtgggccggtctgtctaactgttgggctttgcggggcgggttaggactcacttttcaagaccgcggtcgtctgcggtccggttcgtcgcggatcaatggaaaagcgagcatgttgcggtcggtccgttcggtcgcgggcacgcccgtctaccatctctaaagttatgtaaaccaaaattcaattcttttgtttcacaattactactcaaactacatttttcatagtttttttttaataaaactcggtgttattagttatactatttgtaaatatcttgtaatcttaaggttatggaactaataaaacctcatataaattaataatcgataaattaatacccgataaattaatacattttttctgtcctaaattttgtttttggatcaattgataaattaagaaaataccatagtctcatctatattaaattattaatttatggaaattttactgtgtatagttttaggaaaaatataaaaataataacaattttcttaatttcacaaaaaattactaaaattcacgtttagttggaaatttacgaaccgaagtattgggccttaatggtcttgggccaacatcaatctctcgccgtcaaggttacatttatcgccgccgctgagaccgccacctaagggccgtctcctccgcaatctctaaccgaaactctctcatctcctggtaagctcgattttcttatcaattcgatctcatatgatgtcgatctgtttctactgaagctaaatcttgcgaaatcgatctttgttttgttctgagatttagggtttcacgaatttgtattctagggcttttctcgattaatcatttctattgttatttgttcttattggttcttatgcttttgggtacagaaagatatcgactttttgttgactctgtatgcaaatttgtcaaaagacaaaactttgtaacagtttactctctttcgtgcttgtgtttatgtatgaacaatagcttcgctattgggattgttgatttcaccacacttgattaagtatgtacatactattgaaaatgttatagttcgttaaaatgtgcaatcttcgaatttctctagcgtccattgttcatgttggtgtgtttatgttgatatactcacccacacacacatcaatgatatgcattgtacataatgcattttgttgttgtctctttaagattttagctattgaggatcgattaggggaagtagctcttttcctttccttttctggtgaatactaatgatgcaaagcttgaatctaatccctgtattattttgtgctgcagagacagatagctaatttgattgagtttggttacttgcaagtgcaaatatg

SEQ ID NO: 34176 - DNA, 3000 bp, Unknown; identical to SEQ ID NO: 5030
  misc_feature (1)..( 3000): 2750-1469P.txt file - cDNA_ID_3075380; gDNA_ID_1621164; Annot_ID_57174

SEQ ID NO: 34177 - DNA, 3003 bp, Unknown; identical to SEQ ID NO: 34175
  misc_feature (1)..( 3003): 2750-1469P.txt file - cDNA_ID_3075380; gDNA_ID_2926144; Annot_ID_139041

SEQ ID NO: 34178 - DNA, 3000 bp, Unknown; identical to SEQ ID NO: 5030
  misc_feature (1)..( 3000): 2750-1469P.txt file - cDNA_ID_3075380; gDNA_ID_1620757; Annot_ID_49922

SEQ ID NO: 34179 - DNA, 3000 bp, Unknown; identical to SEQ ID NO: 5030
  misc_feature (1)..( 3000): 2750-1469P.txt file - cDNA_ID_3075380; gDNA_ID_1621164; Annot_ID_173784

SEQ ID NO: 34180 - DNA, 3000 bp, Unknown; identical to SEQ ID NO: 5030
  misc_feature (1)..( 3000): 2750-1469P.txt file - cDNA_ID_3075380; gDNA_ID_1620757; Annot_ID_167042

SEQ ID NO: 34181 - DNA, 3003 bp, Unknown
  misc_feature (1)..( 3003): 2750-1469P.txt file - cDNA_ID_3075423; gDNA_ID_1620757; Annot_ID_167016
tgccggcgccgggttttctctcctctccgacaactcgttttcaaacactctctcatctatttctttctttttcatggctttcttctacttttttcgaagttgtacccttatatccaacattatcacgaccgatgcaaatgaaatctttatcaaaactgtctctagatcaattttctttaaaatcttcgcgattctcgtcgttcgtccctctcacaggttctcctcgaagtcaagaccagcacctctatgctcctctttctgggactcagatcccctcaccaagtgttttgcttggttgcgacaggaacggagctctgcgttgacgctggagccgatgaagtacatgacggtagaagaatcatcccaaaacggcaccacaaccacagatccgccgccgcagtcagaaaagaagtcaaaggaagggttaaccctaaccctaattctactatttttcactcgtaatgggcctggcccaagaagtttattttctccatccagcccaccttacaatctatcccagctcagacataaactaaggggcataagcccatctattataaggcacaggtttgttttttctcttcatcgtgctaagtacaattctgaagatctcttacttatttggactcctacctaagaaagtagcgatggatttagattggacttgttattatccttctcgaaacctggtggattgatttgctcgttttgtattcgatgtaagattaatctcgaaacgttttggattgtggttagacatgtttgaattcaagctgaatcatcttgcgtcatttgctttgaggagcaatgcatctcaactctttcaaaccttactaaagaacacgcctccaatctctcaaaccttaccgaagaacaagcctcaacgctctctaactttattgaagaacacgcctaggtactttcaacctcacactttctcaagcctttttgaatcattgatttgtggctgcgatttgattgaacgacaccaatctagtctcccaatgttcctttggttatggccttgtgattatctttggcgatttcgacaaatcttatccggcatttggaatatctttccaccggcagtctcctcgatggagcattctaccaaaagctcatttgcgtcaatcgcgcaagccgtctatcaccaccagttggtcgggattttctcgaagcttgtcttcgaatttgaatctcctatggcatcaaaagatttttcaaacattgcaagcttctccaagttgagcatctttttaaaaacacattgagcctttagctttcttttccatgcattatcttaatttcagtttgtatgaattttcctctttttgaggttttaagtgaatgaaagttcttttgtccaaaaaaaacccgacatattatgtttctttcctataattgtttcaaataaatttaaaatatatattttctaaaggttatgaatcaagataaacacaacaactaatcaatctccacaataactagtatatagtttgacaaaaaaataaataaagataaaagtactttttacggggctttatagatttgggtacatttaagttaaaaaagtcagaataaatcactttttgtttggtttatagagataagcattttctgttagacaaaattaccattttgccctcaatctccttcttctttctttattctttctttattctttctttctttcttcatcgcttatttctcttcttaatatttccagaaaatctcaattttttttttggtttttttttgtttttgatcacaaaaatccaataataatgaaatctataccctaagggatagtaaaaagtgaacccaaacaaaataattaaaccgatttgataagaatataagaacgctaaaacaatttccaaatttgataaaagtttaagattttgagattttggttttgcaattttgttggttcgttgtctaggtttagagatttatttgggttttgtctaatctatttatttttgaaatttatttcaatttaatttgtttgtatgttgttgatgaattttgttggaaatttccggattttcttctatatagaaaattcttcaacatgaattagctagagaatccaaaatcataacaaaaatatcaattttcagttccttaatccaaaacaaaagaactgctattaaaaatcagcttgaattttgatctggttcgggaagggaaagagatagtgatataatttgtaggtggaaaagatttgggggagactaagattaaaacggtaaaacagaaagtagaaaagtacatgaagctgtaaggcacaaaaaaaatgccgatacttacaaagggacaaggttttaagtgtttttctcataattgatcctactttatacaactataaacaaggagaatcacaagtatctttaatttgaaagatgatatatgaaatattttagatctacaactatgtatctatatatttatttagttattgatgttaagaaaatactttatttagttttattttaggtttaaaatttaatattttattggatatcatctaagttacaatttacactttgaatatatcatttaatattaatataatctaatttaataaaattaattaatatatttatctatatatatatattacgcttatatatatatatatttttaataattatatattttatttttaaagcctgcaaataacccgtaaacacacgggtttgaccctcaccaacctcacggtagagcagtcagggtgggattagaaagctttagttctgacaaacctaacaattaccactaaaattggaaaaaatgtcaaaacaaatcacaaattttaaaatttgggacgaaaaaaccatgaagttttgacatgtcatttaaatctcaaagtttaatttgactttacaataaaatggttaagttgtgttgattgagtcattttaggcatgccgtttttttgttatttaaaagataacaaagttaattttctataacatctaacaaaaagtaacgacaatg

SEQ ID NO: 34182 - DNA, 954 bp, Unknown; identical to SEQ ID NO: 5049
  misc_feature (1)..( 954): 2750-1469P.txt file - cDNA_ID_3075447; gDNA_ID_1620758; Annot_ID_167085

SEQ ID NO: 34183 - DNA, 3000 bp, Unknown; identical to SEQ ID NO: 5048
  misc_feature (1)..( 3000): 2750-1469P.txt file - cDNA_ID_3075451; gDNA_ID_1620758; Annot_ID_167083

SEQ ID NO: 34184 - DNA, 3000 bp, Unknown; identical to SEQ ID NO: 5041
  misc_feature (1)..( 3000): 2750-1469P.txt file - cDNA_ID_3075485; gDNA_ID_1620758; Annot_ID_167054

SEQ ID NO: 34185 - DNA, 3000 bp, Unknown; identical to SEQ ID NO: 5042
  misc_feature (1)..( 3000): 2750-1469P.txt file - cDNA_ID_3075497; gDNA_ID_1620758; Annot_ID_167047

SEQ ID NO: 34186 - DNA, 3000 bp, Unknown; identical to SEQ ID NO: 20581
  misc_feature (1)..( 3000): 2750-1469P.txt file - cDNA_ID_3075512; gDNA_ID_1620759; Annot_ID_167120

SEQ ID NO: 34187 - DNA, 3000 bp, Unknown; identical to SEQ ID NO: 5068
  misc_feature (1)..( 3000): 2750-1469P.txt file - cDNA_ID_3075516; gDNA_ID_1620759; Annot_ID_167118

SEQ ID NO: 34188 - DNA, 3003 bp, Unknown
  misc_feature (1)..( 3003): 2750-1469P.txt file - cDNA_ID_3075520; gDNA_ID_1620759; Annot_ID_167115
attttatgcatgaatggatttgtaactagtatcggaaaccatccaaacatgtgatgttgtagactagatcatctataaaattgtatggtctaaactatacaagctatgtaaatggtgtctgtttctaatactatgtaaactagttaacaagatttcgttaaaataaactataataaccaatgaatcaaatcggtaattggaactaattgagtgtccaacgctcacaaagccaacccctaaatctcataaacctacaaaaggacaaaatgtattagaagattgtgaatcgcaattttgacaaaaaaaaaagagtgagaaaagaagaagtatagttatctttctaagtctagttaaatgatctacttgttggaacttcaattctaaaccaatgacttctggtgaagttcattaccaaaatgatcggatcttgaagtcattagattctctgcaatgaacattataaactaatgtaactacatgtaaaaattgaagtcatattacataagaaattgaggtcttagtttgaaagcttataatagcaatgaacaaatataaacatttatttcacattggaaaatgaaatattttcctctatatatattatacacttactacaagtttcactagctttgtgaagaggacattatggtataagtgatgaatagacatgcaaaacaaacatcgggttttggtgaatgtgcccacaaaagatttatgaaacatttgttttttgaatttaatgctaaattatattcaaaataaaaaaaaacgttttttacacaaaactggaaactgattgaaactttttatgaaaaaaaaacttctcttctctaagctctcgatgcaaaccaaactctcatttcatccttatacttcaaaacaccacaaccactcatcgtacttaaacgatttctgacgtttttgtctatcatttttataagtctctccggcagggatgggctcttcccgtgtcttctttggttcctttcattccaaattgagtgtatgaaacattcgtcacatatttttggtccaagatcaaactgttttctcttcggatttttattcaacatttgtcacatatttttggtccaagatcaaacagttttctctaacggaacaagattctacagcttctcagcttccacgtggtcccgatcatggattgccacgtgtacgattccacttggtaaacatgatttttttttggaaagacaagttgtatctgtaagattaaataattcagtacgaaaaggcatcgaatcctcactcacggattgttcacaaatgttgtctccaagtagtgtaaaatatttcgctttttacacattgccaaagatcatctccatccattaacgttacgtttatctccgaatatactttatgaaacagtttgttaattaattaagttctagatatcaggtagaaagagagtttatgacactttctgtcatttttagtcatattttaagggaaggtttttgcagagactagaaaactgcaaatcatatagtgtttctaactttgatatattgaagatttttttttgttgatatattgaaattttgatgtaatattaacatgtcttatttatgtttctttatctcattcggatgtatatattttttatgccacaaggttttctgtgacctaatatcttatatgatcaaatcaatagtttctatatccaaatataacatgatctaatggtacaccaataaaaatgctccaacgatgatcgtgaaaaccaataagaatgtgatctgaatttggtttattattacggtgtaattttgttattttactagccagtgttgtatatggatgaatcaaagtgtaattttttgtgtaactaattattcgtcgatcgcgacaattcccttttaagataggatagtttattgatatataaaataatcctaatactaaaatagaaaaagacggtcagataacaaatattttcgcagtcgcgtctaatggtttttacgaagttgaatacagtgtgatctttggattatttttgaagtcaatcttcatctataatttttttttaaataatattaggataataataggttgaagagaaataattatatccataattttctgtaaataaatacagctttactttatatttattatcatcatcgaaccaatgatatgaagcaattttagtcggtaacttggcgagtcgttaattcagttcgaattataaaaagacttctaaacacgaaccgaacacgatttgatttgttctcaagagaaaatatataaatagatttataactctttacttctcaaaaggctaacttttgaaccaagcaatcacgagaaacctttgaaaatctcttactttggatccgttcccttattcacttggtttcttctttaacttccaaaactcaacttgtaaccaaaactttctggtgcttttctttcttctcgtgtcctttatttccccggaaaatttaagctcctcttcgttagtttccccggaaagtttcatcattgttatacactaggaaaaaagaagaagatgaaacccatttgtttccttctctgtttctgcttccttcctgtgaaagtctcttccttttgacacaagtctcttctgtttcaaattttctctgttggcttatttcttcttttccctgattctgttttgttttccctagaaaattaatgaaacgacggttagattctcgggagatcctatcgaacccatgtttttgaatcagttcatgcacttcctgaaatctattcatactttcagaaggaaaaacctagtttaacatatctttaaccctaatttctctgctttcaaaccctaccttgtgaaccaagcaaaactctcctttgatcaatatgtctggtttatgtttcaatccgtttcgtctacgttggtctctaagatccaaattacctttagagccgtccctcccgaatttaccctgtaacccatcttcctccaaaaccaaccggtatgcagaagcagagacgatg

SEQ ID NO: 34189 - DNA, 3003 bp, Unknown; identical to SEQ ID NO: 20586
  misc_feature (1)..( 3003): 2750-1469P.txt file - cDNA_ID_3075538; gDNA_ID_1620759; Annot_ID_167102

SEQ ID NO: 34190 - DNA, 3000 bp, Unknown; identical to SEQ ID NO: 5083
  misc_feature (1)..( 3000): 2750-1469P.txt file - cDNA_ID_3075548; gDNA_ID_1620761; Annot_ID_167162

SEQ ID NO: 34191 - DNA, 3000 bp, Unknown; identical to SEQ ID NO: 5075
  misc_feature (1)..( 3000): 2750-1469P.txt file - cDNA_ID_3075567; gDNA_ID_1620761; Annot_ID_167136

SEQ ID NO: 34192 - DNA, 3000 bp, Unknown
  misc_feature (1)..( 3000): 2750-1469P.txt file - cDNA_ID_3075573; gDNA_ID_1620762; Annot_ID_167202
caggaagagaaggcgtcattccaaatggaggctttgcagaacctgaggatgatggaggagcaagcagagtacgatatggaagcaatacagagactgaatgatttacttgttgagagagaaaaactaatacaagatttagaagctgagattgaatacttccgggaccagacccctcagaagaagaataagctagatgttgcagaaaaagtgaccgagatggattcccctagtgagggaatgagcaacaagatacagagttgtttagttgggttcgacgaagagagattatacatcaccagttgtctggagaagattgaaaacagagtaaatggcaaggctcatgacgataatctaccagcacaagaatctgtttctgagctacatgagagagtagaaaggctgaagggagacttatacttcctagaacaagttatgaattctcttggccatggaaatgaaggcgtgcaatttgtaaaggaaatagcttctcatttgcaaactctgcggagtctcagcatgaaaagacaagatcagactgagtgttgatgtcctgagtaacaatcttcacaaaggtatgttctttcctcttccctgattgttgtgttgattttgttcttcagataacttcacctgcggaaattatagctctttgtacaaacatcttattattcatatgtcgttctggttttttaatatgttagacacctttgtggagaggatattgtagaggaaactaaaagaagttcaagattcaagaagcttaaagaaactgtatagcatcgtcttcattgccttcccctttcgtatacgataatctcagaattctttacgatttcatttttgggtttggtgttcataatttccttatgggttttcatattctttgtgtttattttgcatttttcttctagttttgagtgaagagtgaatgtaggttttgttctgaagttctcatttgattttttttattaggttggttgatacttttgtttagcatgtcaaaagtcatgcaactttgttaaacttgttgtacatttcttcgttataaactacttatacgtaatgtcctttgttaaactcatatttctttgttggtgttaggacctcgaatttggaaaataacaagaaggttgatacgcataatacaaacttacaaaagacaattaaaagaggaagagaagccaaaacctaatatctaaaatattttcttactgttaaagtagtgatatctaaaaaattaaaaactgtctttggcgaaaaaaaaaagggttcaagaataataacatgtaagaccaccatgcatcattcttatttcttcttttagtttgaacttcaataatccgtcctcctctgtcttaaccaactccttaattaatctgtcttaagcttccttaatttctacaacacttcctttgtctcaaccaaatttgtgtagtatcattcatgtcccactcttgtacatctctcacttctatgcttaattggaagattgtatcacagaacatgccacagcttgtgcccaatgcctcagtctcgttttaacctgttgaggatcatctcctgcaaatttatagaatataacatcaaaacacaatcatattatgaaaatatcaatctgacgaaaaagtttaggttgctatgttacctggagacataaccttcaaagaatcagagtcgcttattggactaccaaaagaggaagatcggtctccgagggaagtaggacgggaggatgaagaagatccaccactgcctggtgtagaaaccggcgagatctgacgagtcacagcgaagtaaaggtccaatgcaggcaatgtagttgtaagatgttgcccttgctcctcgttaaacccgaaccctaactcaatagatcctttgagctcactcaagtcctcgtccgtcaagtcatctcctccttcgttatgcttctcaaggtgatggagcatctggcgacggcgacgctcccatgcgatgtctctacgggtctctaacatggagagttgcttcgagagacgtttcttagccttagctttcggtggttccaatggcatcttttgaagctcttctacttcgctgtcgtagaaagatgacgacgatgaggttgatacactcaatgcttctccaaccctcaccatctttctctgttgttaatataagaaatcgcaggcacgtttatgattatcaacaaggggcagaatatttttgtgatgatgtgccttgttgtacaagttagctcatgtaagcgaggaaaaacagaagaacttgaatagattagtgaaaatcccagaactctgattccctttaaaaaatgttcatcccggaagaagaaaaggggtaagaagttttttctgtttggtttattttattaatgtacagaaggagatatgttttctggtgaactttaatggtgtgatattacaaaacacagaaacaatgagtttcttctaccacacatttggtgttgtttaaaagtagggtttgtagaatttccatttgccatttttaaagggatctctctgttaattccctggggagattctggagcttgattgattatggagacagaatccaaaaacaaaccttggtggtttttgttggaataactaactcttacttgatataggttttgttctagaaatttttggtgttgttgttggtcgaaacatattactaacacttgcaactaacaagatggtataaccactaaactagtacaagtatcatttagttaattaaacatgttagtatgttacaaaatttacgaatcaataacgaaataagcaaaataaccaattccaagccaagtgggacaaactcgaccgaaaagaccaaaaatcaatcataatttggtatcaaaaccattataccgggaagtaccagaataactcggttgggcctagcctctaataaaaatcggtcgggaaagaaactcacaactctctctcacacagcaacgttctattgaaatttggcctgaatccccagagtgcgacgaaaatg

SEQ ID NO: 34193 - DNA, 3003 bp, Unknown
  misc_feature (1)..( 3003): 2750-1469P.txt file - cDNA_ID_3075598; gDNA_ID_1621148; Annot_ID_173150
ctcgagtcttgtttgttgttcttctacattggatggtcgttatacacgtgtgaaaattcaaaaatgttgttcctatcttgcacttttctgccgccaacataaaagtgttatataagagactaattcaactagaggtggcattttctctgagttatgcagtgagttcccaaaaaattccaaggaagtctaaatagcctacaacaaatattaagcctaaaagagatttgaaaagtaattgaaaagtaatgagcagtgacttgcttgggatttcagtttcaaaatagtttgtcatatgttttgttttttccccatgaattgttggatttagtttgtctctcgctgaatcaataaggtttgctaggaaaatcgaaatcaaacactaatttcagcacggacacaacaaacatttgttttctaatcgagataaattttaacatcaattccgttatcaataagggactggacaacagctctgattttcccttcaaacttgtcttggtcccttggcgtataagaagccgtgtacacatcagcttcttttgcacgctcagacaagatcctccctatggacatacatgccgggatatcacatcttgacctcagaacagcttttacgtctttagagtttgttcccgcaacagcaacttgcctacatgtaacacggtgcgtgagagatgccgaaacaaagcgctttgagatgaagacatctagagtgaacggctccatgtatgcaactgttcgttgcttgaacgacacatgcttgtctggattcttcgactttttctctttttggtatgtgtatggccggcttgtgtcgtcatccacgtagtcttctacaccaaagaagcttcttggtgcaaaaacagtctgtcaagaatggtaaagccaagtcaaaatagaaacagatacaaaaagaccaagaaacgatagctgaaaagactcaatacttagaacagagctgaacttaatgattgcaaagtaggctcagtaaatcttataaaatccagctattgcatactgactcatctaaatggccagactaaaagtattggcactatcaaacaccaacaaaccattgagaggtggaacaatccagtcaattactttaatgagctacaatttatctaactcaccgtttaactaatttgggttctgctcatacaattcatctaacctctttctagcaaacagcaactaaagctaaagggagtggtctaacgtcggataaatcacattcaacatcgtttccaagcagatctagttatgagatttcaatcaaacaggagtcacaaggaactgcacaagacctgattcaaaagaatacgcttcctctactaattctactaaaaatcaaactattcagtcaagtaaacaaagtggaagaacggtggagtgtacccgtccattgtggaatcgacaactggtttggcacatgaaaggtctaagcttttctctgttacttccataaatcgccgctttacctatagaatacttggcaaccacttgcttcaacattatatctgcaaccacctacagaaaaattcagtcactaggaataatagtgctcataaagacgttctatgttctatgatatagctaactgctaaaactaaattaaaccggaggtcactagtcaataaggatagtagctttgtcacaaaagtatgctttcttttagtgtccattccattactgcatcccaacatattgaagacttcttattgcccagaaaacgaaaccatttgtaataagcaatagagaggcaaacaagttgacttctctcaataacaatccaaaagatagagagcagctaaaagcttgtgccaagaatttataatttctaattgccaacatgatatcaaattagcagctcgtaagctatggaaatgaaaagtattgaaaagattaacgaatatgatgaccttaaatcatttgaagaacacaccccacgatgtgatcataacaaaattcacttcttttatagaaaatttgactcgtcttcaattcaaatgccatggattctgtatctggaagctcaatttgaaataaaaatacactaacgcacctggaaatcgatggctagagcacgacgggttgatattgcagaggatactacactcaaagaaagctgaaaacccacccacggagatagaagaaactaaaattaagattcagtaaacgaaataggttaggtgcttcgcaatggctgccaaggttgaaacgggcaattgttcttcggagctccaaacattgaagatgaagattttctaaaaccctacaaacgcaaaatttggtcttccgtcctcggaaagttactcgtttttcattttctccccataaaaagctaattcaactattaacacccaagggtcaccggttttattatggttttcacaccgggttaaggacattaatttggaatcttgaccgacttagctggttgaaccggaccgtttccggtttaagaagaataaagacgcgggcggggttgaattaaattgattttcagaggaaccgaaccttcacctcacgactctctcactgcctcactcaccgtcaccgtcgccgtcgccgtcgccattgctttctacttcgccgtgcctggttagttttcggaatctgattttcatttccatttcgttccttctgaattctcaactttgtctgcgattttcagaggtagcgaagttcgtttatggaagcttctgctgagtctaggtttgtggaagctccattaattttggaatttactggaatttccggggattcttcgtcaactactttcaggacttgttgttgattctcacagcgtgatcctgagaaaggtattttacttttatgctttgttcttttgaatttcagattaagatatataagaatccgttatacaaaattacaatgaagattatatgaagtttcgaagtttcaaggcaaagttaatatgcacgaagtttatcagctccatcaaaatttcagggtgccaagtattagccattggaaatg

SEQ ID NO: 34194 - DNA, 3003 bp, Unknown
  misc_feature (1)..( 3003): 2750-1469P.txt file - cDNA_ID_3075602; gDNA_ID_1620762; Annot_ID_167208
aaacaatgtccaaacgctgtttaagtccaagggacaaaggacagatctatacatatattccagttcatttcccgccccatgtagacatcatgcaacagtttatcacatcggcctaagaacgtcggtgcaagaaattcaagcattgctgggaagaatataaaaagtaggcataccagtgaattcacaggttgatttaggtgcaacaacaccaacatttggacgaacacagtacttctttggtgatgtggttttaacctgtcaaaaaccacatctagtttaggtttgtatacagaaagaatactttttctcagaaattttataagatattcgaaatcctgaagccagaaagaaagagaaaaagtttgagaagaatcttctttagaccttaaatgcaacataatgatgggtagtattggttagctgtaccacgcaggaagtttgcttcttcaggtcaactacaaaagatgaaaccagttagtattacaaggataacaatgccaaggcaaagatattccttttacaacttccatattttattatagatcctcagaatcgatatgagaggtaagaaaccacatcacagaatgtcagcacatacaaatccagtagcaggaaagagttagaagattcctccaaacaacagccacattaacatcacatcaattcatcttacaggagaatagacccacaaacaatagcaccactatgatagaattctaacgaaatagtgagaattcagaaaactcggtattcataactggaacatgttggccactttgcttaaggaataacacaccctcgctatgaaatccacattttacaaaaaaataagaaactattaacgggaccacagtgtctactcactggaacttaaaaatgatcattttacaattgataagaatcagtccccttatatcttacctgcaaactgcaacgttcgtggttgaatatccaacagcggcatattcatgttgctgtgacaaaatgactcaagtatcaaacagctaccacttgcagcaggattctctccacccctatttcaacaaaaaaataataagagaaagatcagcccagaaccattcaagtatgaaactgtcgacactagagcgaaaaacaaactcagatctatactctatttgggacaatcataaacccgctctcccattgggaacatgacgaaatctaaccaaacagtcaacaatcagaaaagtttctctgttacactctttcgagtccggattctcgtcttccgtcaccataaacaaaccaccgcactaactcgtcgacgacgcgttctcaaatctgacgatacgaactcgcccgaagactcaaacgtgactatattttaccttaatgcgctcgttttttctcagcgatccgaccgacacaattttttgggcaacgcgctttcgactagccggaaaaccaaatcgtcctagtcccccagtgtgatctagttacgccaccacaggcctgatagtattaaaacaaaagggcgaaataaaacgacgacgtttacgaggagcgactcctcgggatccggtagccaatagtaaactcagatcacatagatcttcccgagccctagcgatttcgatttctaaagcagattctaaagacaaaaatcaggaaactcgaggaagaggaacctagtttcgaaacaaaaacaaaaaccagagaagaagatgatcaacgagaatgatgaaatcggaaggaaaccttaccgtctctccgacgaagaactaacggaacggagcttgagattgagcgacgaagaagcagcgatcgagagaaagagagaagtgcaaaaactaatcttagtgaaggccaagtatggaaatgtattaatgtgttcaaacacattaaaattgaatttttttttaagaaaaagtatggtactgagattcagagatggtgaatatctgttgtacctaacagcaatttagtaaactataatttctgacgactatttttcgatacttttgtaacaattatcgtaaaaaacaaaaaattaagtgagattacattcgacgttagatgccagaaataatatatatatgtgattgtgaatatgtacctttttttcttttttcaatgagtgtaatatgaatgctttgagaggattacacgcgtgattctgattcggatcaccaacttcttttgcttcccttttaatttctttcctatcttttgcttttcccattcatctctctcgctttccacaaaggcgagatttgaatacgtaatcctaattatactctcatagagatttggtaatttggcccaaaatatctttctactttgtaatatgtcgatgcatagaaaacataatcttattctaacattcacaaatctcctatatttccatattgaatctctcagtctggatcggtttgtaatctctgtccagctacctcttacgtttcaggtgtttctatgatttatccattggcttcattggctgcctataacttatatatcatgttgcaatctttgtgtgtgttgtgttggggagagcttatagccggccgctcctccattagcttccaaatggttgaatcagtctgtatcagatttaaactcagtgatagcacccacgttatgcatgatttttaagatttgataagcagactgtttttaacttcaattcaagagcatcatccactttcggcttaatatcctatattaatttctttaacaagctaaaatgaacataatgaaaataactacactcactgattggcaattactaatatctcaaaacattaagaagtattttttttttttttgggtgaaaagtcactgtctttttcttaaagccaaaatttatacggaacgacaaaacaaaaaatatgactaaaaacttcttaagcgcaatcactgaccatgcagcctattttagtttttaagtcttttatatacattggctgttatagtcgtaaaacaatcaggtatttgttatggagataacaatttgggaacgcataaatagtgcctctgatg

SEQ ID NO: 34195 - DNA, 3000 bp, Unknown
  misc_feature (1)..( 3000): 2750-1469P.txt file - cDNA_ID_3075605; gDNA_ID_1620762; Annot_ID_167207
ttctgttagcataatatgggtaaataaaatctcaagaaaataaatggtcaaaggtcattaccctttccgaggtcatcagggtctgcatggacaacaacagccctaccaacaatagagtttggtccagtaagaggaatctgttaagccaacacaaaatgtatcttaagagattggttcactacagcaggtttggattaggaaaaaagcataaaaaggtacacagctataaacctggcaatcagtgattgtgaaggtggcagttcctgagaaaagcaaaacaaaagcttttatgtaaatccatgaacactaccgctggtcaaaggtgacaactgtactatacaactaagactgcaaaatcaaatttgagagagtagcgaaatttgatgcaaaacagctctaaataagcttgagatgagggatacaaatgttgagaaggcataccatcatctccaacagtgatgtttcctagatcaccagcatgtcgattagcatcctcaggggcaccgtgtgttttaccatcggggttgaaatgtggacctaaaataggaatttaataacaagttcagttacttttggcgataattaaagttcccaatacgaaacataaatataagctccaaaagtttctaatccattgaaaatttgcagagaggtatgcataagagttaccagtagacatgcaaccgttagtggtgtcaccaagagcatggacatggaaaccatgaagaccaggcttaaggccagaaactgttccactcacagtggtcacacctgcaaaaaacccaaacaaagaactcaatcatttgagaggaaggaaaaaaaagataggcttcaaagatcttataaagcactcttataaagaactaccatcgccttcctgggtgaaaaagatagtccccgtaacaccctcactgctgttcaaaactgcaactcctttcgccattgttacttggcctttgtgatctgtaaaaacataaacataaaccaatacatatacaaataagtaaagatccagaaaaaaacaaatggttctacacaacattaaattagctcaacagacaagaaacagaatttgaaaacccaaaaacatcaatctcaactaagctttaatacgcaccaaaacatagatcctaatcccattataagaacacatataccagatattcaacgatctaagccataataactcttactagttcacataaaaaggtcaaggcatcttcagaagagtgtgatacatccaaagaaaacaagcaaaggaatcggtagatccgccgatcataaatcgaaaaaaacatttcctcaaagatctatacgtagattcggcggagttggaatcggaaaagttcgaaatcagcacagacgaggacaagaatcgatttaagaatccaaagtgaagaatcgatctaagatttgaaacaaattaaaaccaaaaaggaaagcaaacatacctcaggaaacccctttggaaagaatcaagtgcttgagctatcaaaaatgctgaattttctctctgaatgtttttgcttcgtctctctttggttacttgttttctatatagcccacgaggtccaaaagctgggtaggtacgtacgtgattagcattaatttatttcttacttgaaaaaagccacgtcaggataatccaagatagacttttcctaagtttgactcttctctgctgatgtggtaaaatttgattggataaatactgtaaaacattaagtttaagtcatcgtcattgaatttaaattacgtatgtcgtataattatttctaagacgttggctcaattataaatttcataaaatcttaagaactaattttaacaaaatacagaaaatatcatttgtatttttaataatataatctataaacatatatatatatatttatgagagtctgtcaaatttgtatgtagctaatttctttggagaagaagaagggaacctttgatggatttgtaatgttagactatatatgcctatctagatgcatgcatctcctaattaacctagctagctacaagaggttaaagataatggatgatcacctataagtctagaacgttgatatataaactctgttatgcgtattatatcaaaattttggcatattattctctttgcaggtgacatgatatttgtatgttgtttatacactagaaaaaaatattgtgattttgttccacttccaaccatcagaggcactatttatgcgttcccaaattgttatctccataacaaatacctgattgttttacgactataacagccaatgtatataaaagacttaaaaactaaaataggctgcatggtcagtgattgcgcttaagaagtttttagtcatattttttgttttgtcgttccgtataaattttggctttaagaaaaagacagtgacttttcacccaaaaaaaaaaaaaatacttcttaatgttttgagatattagtaattgccaatcagtgagtgtagttattttcattatgttcattttagcttgttaaagaaattaatataggatattaagccgaaagtggatgatgctcttgaattgaagttaaaaacagtctgcttatcaaatcttaaaaatcatgcataacgtgggtgctatcactgagtttaaatctgatacagactgattcaaccatttggaagctaatggaggagcggccggctataagctctccccaacacaacacacacaaagattgcaacatgatatataagttataggcagccaatgaagccaatggataaatcatagaaacacctgaaacgtaagaggtagctggacagagattacaaaccgatccagactgagagattcaatatggaaatataggagatttgtgaatgttagaataagattatgttttctatgcatcgacatattacaaagtagaaagatattttgggccaaattaccaaatctctatgagagtataattaggattacgtattcaaatctcgcctttgtggaaagcgagagagatgaatg

SEQ ID NO: 34196 - DNA, 3003 bp, Unknown; identical to SEQ ID NO: 20612
  misc_feature (1)..( 3003): 2750-1469P.txt file - cDNA_ID_3075617; gDNA_ID_1620762; Annot_ID_167195

SEQ ID NO: 34197 - DNA, 3003 bp, Unknown; identical to SEQ ID NO: 20613
  misc_feature (1)..( 3003): 2750-1469P.txt file - cDNA_ID_3075621; gDNA_ID_1620762; Annot_ID_167194

SEQ ID NO: 34198 - DNA, 3000 bp, Unknown; identical to SEQ ID NO: 21209
  misc_feature (1)..( 3000): 2750-1469P.txt file - cDNA_ID_3075628; gDNA_ID_1620762; Annot_ID_167192

SEQ ID NO: 34199 - DNA, 3003 bp, Unknown; identical to SEQ ID NO: 20614
  misc_feature (1)..( 3003): 2750-1469P.txt file - cDNA_ID_3075636; gDNA_ID_1620762; Annot_ID_167190

SEQ ID NO: 34200 - DNA, 3000 bp, Unknown
  misc_feature (1)..( 3000): 2750-1469P.txt file - cDNA_ID_3075644; gDNA_ID_1620762; Annot_ID_167187
tcgaatactcgaattttgaatttgacagagatgatagagagagagaaaaagaaagcttttttatcctttagtttgagaaaaggggaagaagaaactattcacatgttttccattaatactccttttctgtgggcttttgggctgacccacatcataataattattcaatctaatcataaaaaattctatcattagcaattacattgcatataatatatgaacaaaaactatattcgattttaacgatatagtaagttatgatggttatatcatctacgaggctaaccatactcgcaccaagaaaaaaatgacgtttgactttagactaaaccgaaggaaaaggtaaaaaagtaaactaatgtgatggtttagtggttgatgatagagtctaattgttaatagcctaatttcttaaagaagtcttcattacttgtacaataatatcttaacacctctatagatgtgggtgggttggagatgcccttagtgcatctaaagatgctttatttaacttggttcacaaatttcatttttcatttgctgcaattgcacaagtaagaatgtttcctttttgtttttgtttttttgtctaaagtaagaatgtttccttatttcatggaatataattatagaattacaagttgatcatatctcaacaacgttatctaggttttcaatcaatcgtttcatttgaatcaatactaattcgtttaagaccaaatccgcgcgatgaaaaattcctcaaccgttttcggaataaatttataatcttaaaatagcttaatcaagaattttttcacgtaggttgtaaaatatttgagaaagaaatagttatagacttaaagatgacatcatctagaagataaatcgaagaaggcaacagaaaactaaaagataaaagcatccgtttctcaatctccgtttcttgtctcttcttgctctcttgatctcttccattgtttattaatttacacctttgacgttcaaagagtgggtgatcttttttttgttctaggtatagtggagttgttgttcttcttacgtactacaattctgataaggtactccaatatatattgaagacaggagaatgatctatatagatgcttattgatcgagcagaatgtctaagcttatgcagaatccggtgttacatgaattgaagaagcaagcttctttcttcatcaaggaaaagatcaagactgctcgtcttgctgtaaccgatgttactgcagaagaactgtgagtaaactttactaaagttataaacctatttcctgctaaacctaaatctctcatattttagaaacctttacaagtattatcaagtgtttttgcaatcaaaacttgtttttgtggtatttttagcatatctctctctctcttgtactaattgagttgaaatataaactgtctaatgtgaagattgacagaagaagttacgggcagcgatcactcatccatagactcacgctccatggcggccataacaagagtttcttttgaggttgatcaattccaaagaatcgtgaagattctacgtcaaaggttattttgcctcactgttatataagcaaaacaacttagaaataaatatcacagattcacagaaccatcaatgatttcatcaacacaatactacaccaaaaataaaaatcaccatatttttttttgacggcaataaaattaccatttaagcatcaaaaatcccgaaaattttatagtaattcatcataatagtcaagaatcagattactgtttagtgtctatataatttattgattggtaatttttttttgtagaatggtagtgtttgatagaaaggaatggcgcggcatgtgcaacacgttgtcaatgttgaaccacttgttgctcaatggcccactaagtgtattcagtgagtttcaacatgagagagctattattgaagatgctataaagatggagtggattgatgagagagggttcgattgtggtctaaaggttcgaaacatagccgagaaagtactaagattgcttgaagacgacatgtttcttaaagatgagcgagaaagaaaccgtaagcaaagcattggtcggatcacaggatttggaaactcgagttttgtcatacattctgaaacgaacaacggacgagacggctcgttaatgttgagtaaccatcaaacttgtgaaaatgattgtatcgcggatgatcatccattcgtcgaaaatgagcacaagactgctcaactcttgctttcttcttcgacttagagttagatttcccttggttgtattattatgtttgctctatagaattacttatgaccaaagaacaaagttttggaaattctgagacgatgaactcacacaaatacgttaatcgcgacgcttacatgcatcggtgattgattatctctgtatggagaaaagaactgcatcacgtattagaaaagaaatagatgatagatttttgtttttaggtttgtttctcgaagaagaaaaaaataatagagattttgatttcttaacaagaagaagagtatttataagccaagggtacacatgctacagtatatgctaacatttatgcttaacctaaaataatatatcactatttttttatttatttttcttacaaaaaaatatatttattagaaacatatgaaaaatatctacataaaatagaaatacagtatacaatagcgaaaaaaacacatgttatgcgagattagatatacgagtaaatgtataaaaactctatttattgaattagatattcacatagaaatatgttacttaagtatgtatttgttttgtattttcagtaaaggtcacgtgggatttattttttgcatatttagtccttgggatttagatctcgtaaacggcgtcgtactaagagtatcctccggcggcatcagttttggagtttcttggatcatcacactcacctgcttcgttactcttcccttggattggattggattggattcgctctttcatggttgaagaatg

SEQ ID NO: 34201 - DNA, 3003 bp, Unknown
  misc_feature (1)..( 3003): 2750-1469P.txt file - cDNA_ID_3075648; gDNA_ID_1620762; Annot_ID_167186
aaccatgggtatggagtagcccatgtactcgatgccatttaagaacccagtgtatgcctgcaaaacattgttcactgagagttaaacataggtatacacaattaaaagaactcctgacatatctaataactagatcaaacaatcaggagcatccataaaataacgcttggacacatttatatcacatatgccgctctctttgaataaacctaatactagatggtgcaacataaaacggattctttaaaataacggagtcttgatggatatgcataccaaagatgctaagagtatagagccaaaaactaaggaaagagaacgaagaagcctctttcccattctcaatccccgtccactttcttcgccttcctcctgcagccagtgtcaaacatcagtgcacatcaggattaaaagagccactaagtgtacggacatcaaaacataaggcttcaaaaaaattcaaaactcacgttatatattggagatgaaggtgcttcaaaggattttaatttctcaaaaattctgtaaacaaatacaaaagacatgaactgcagcggtttgtattcaacattacgttttatcgcaatccatgcactctgcaaaagaaagaaacagaaagagtgggagaggctcatatctgattgtacttgaaatgtcatatatgcataaatgtgtaagaaacaagtcactttttctgcaagaattcagtcatttatgcatgatgtcttgattcataaagggtacagataaaaaaaaaaaaaaaactgacatttctaataatagcaaacctcatatttcttaaaaactacttacaaacacaactgatattgctaggttgatcaacatatcattcttggaggacctggaaaacctgtaacaacaagggtaaatcatgagtagtaacagatcctgcttttgaatgatgaaaattaataatgcgagtagactcataaagaatctctaccttggaccccatggtataatgggctgcttatcagcatatttaatgtccttggaaacctgaattatgaaaaattcaccaaggattgagaaagaaaggtcatagagttcaagacagcatatgacaagaaagaggatacgatacacaccttaaacgaaccaaaagtcacaccctttttcctattcatcaactgggcatacatgagcttatcatatgccttctcaagctatcaaaaggtaaaacagagacgtgttaacaagaaaaaaaaaaaaaaaaaatcacttacaggactccaaagaaagagagaggtaacgtaacttactagagcagcagtggcttcatcaccgctcctctgagcatctttaagtttccttccataagtttgcttgatcttgtcaaatccctctatagggttaacaccaagaacctgagaaggtacacacactcatgtcatgagaaatacacaacgaccaacaaaacaagtcctttatagggctctaacgatcaattacctcatacggattaaagtcagcatcagactgtggattaccagccgcagacgaagcagcacgtatcacaatcctgctctgtaacacctttccgaggggaagcctgagaatttcaatcatcctcattacaatgataacgtgtaccaaatggtctgataagcacaacaatggaactctcttaagtgcaattgaaagttgtaaactttataggcaacagtaagaagctcatccacgaattaagccgtcggaattcaattgacaatgtttatgaaggaagaagataacggttacccacaaaatccgtaagtttacacaacaaaaagaactatcaaacgatgattcttcgactttaaagccaccgaagagaagtggaaaacaaaaaagcagcatcaagagaaagtacctgacaaaagaaggcgatttgggagcgcgaagagagttcctgagagaaatttgaggatgatggtaacgaagcgcgtttgatgttgagaaagccatgacggaggagcaagaagtagatagtgcgggagccatggcagagcagagctctagtagggttaaaaggaaactagaaggttggtgattgatgtttggaagctaatcattcaatactcaatagtttgttaaggctaaaaactgaggcctgaccaatagttcgcgtggcccaatggataaggcgctcgcctccggagggggatattctcggttcgacctccatcgtgaacgaattaggtaataataaagacggcctgctttcttcagcccaactgatttatcggcccaatccagtgtctttattagtttgttttcgtgggatctctggtttacttacttgcagggattatctcccaattccaatccaaacatgccacacttttcttatctctttttcagatttcaatctcgtccaagaaatcgtttagtactcacattcaatttggaaatgtttttgcataaattggggttggatttcctacctctttttcactagattgtgcattatcaatttatgaactttttctggaaacatattaaattgtagatccaatattttatcttaacaaatctggatctgttgagaatgtttttctgtaatttagagaggattgtaattgtgtagtacatttgataataaacttaaatgtgaattttagactaccaccaagtaattatcatttcaaagaacaaaccaaatagataataaagaactgttagaaagtaaaattgtatataataagataagaaaagacattacaaagtacaaaccttctccaagtaaacttctaacaaaacaaaaaaatagatttggattgggaaataatatctaaaatcctatttaaaacaaaataaaaacaaaaaagatataacgttaaggaaaaggaaaatactagtagaaaaaaaaaacatgtaggcatcaaaaggaatattctcaagagttttggctataaaaaaaggtagagccgactcaagaggtcttcttaactcacacaagaaccaacacaaaacaaaaaatattaagaaagtgatattatg

SEQ ID NO: 34202 - DNA, 3000 bp, Unknown; identical to SEQ ID NO: 20616
  misc_feature (1)..( 3000): 2750-1469P.txt file - cDNA_ID_3075652; gDNA_ID_1620762; Annot_ID_167185

SEQ ID NO: 34203 - DNA, 3003 bp, Unknown
  misc_feature (1)..( 3003): 2750-1469P.txt file - cDNA_ID_3075658; gDNA_ID_1620762; Annot_ID_167182
atatgctgaataaccgaagccacctcttccaaattccctcgcctgcagttatagttaaccagagaattatatgtgacaatgtcaggatagcaaccttccactgccatgtcttctaaaacttctatagctcgagcgcttccacagtacctgcacacgagttcgaccaaaaccgtgtatgtaatcataaatggagggcaaccattctgcagttgatccttccaaaacctgatggcttgctcagcattcccataatcaaacatacaccgaatcactgtgttatacgtgatcacatcaggagggctcccactcaaactcatatcttctaagaggaccaaagcagttcttatatgccctttcttgcaaagatttccgatgatcatgttataggtaatagtatctggaaccccaccagacattaccattactctcaagatacacattgctttatccagttgatcaattctggctagaccacggactaagtttgagcaagaaggaaaatgaggaacctgattatgtcgtgccatcacctcgacaagtttgcacgcatctgttaacttcccattgctgcacaggttatgaaggatctcattgttggtctcttcgtcgttctctgtaattggtccatcagatgataaaccaaattgcttcataggtttcactctggctctcaagttagtaccgacaccatagtgatggaactctgagcttctctcagcatgatcatttacattgtcaatgcacacactacttaacaagccgtgacatctaaaaaaaacatcctttttcagcccaatttcttgcttccaatctaaagaagaaaactttctgcaagataaaggattcgcctgcttttgagacagactaggaatatgcaagaactgaacctcaagtagcaaattcgacgaagccatttctcagaatccagaagctattttaacaaaacagagatctttccttttacaaaagcttatcaaactcaatgaagaagaagttagaccaataattatttgctggtatgatgttcagtctctgctgctttatctcataacctattcttgagtgaatggagaaaccaaacctgtgaaaaggaaaggtacaagttatagagacagagaagcagactgaaacagtttccaacaaaagaaaagaagcagaaaaccttcaagttgcggttaagtttgagaaaccctaacaaatctggagaaatgatgagtgtgagaaactcactgttcgttgttcgaagccgacgcgggttttgagatgataagtagggtttatcctaaatttacaatgtgcaccctatatgtctcgacatgtttcatttattcccacaaacttatgaaacatctaacattaacctcctctgtttttattccctttgtttttgtgaatcggtttaattattttgggccaattcagctatcggattgggctttttcaagttttgggttgagttacaaccaaattaaaaatcaaacagagatcaatttctccgcatagaaaaataacatgttacattaccattcgaaaacaagatgaatagtcatttatacacgcctctcttacacattataatgtctaaataattgcattatcatattcaaaatttagatatgttggtcaaaaacagaattaagtattataaattgtgtataccaaattagttgacgctatcattgcatatcatactcacatactacaatatttattacatgaactaagtgattgtattccagtggctattttcatttaactataacaaaaaaatcgaatgcgataaaactacttcgaaaataatcgatggctcttggaatttttataaaatctagttcttgaaataaataaaaatttctatgcaatatttttcggtaaatttttgttctctattacaataaaattttattttaaagaaatgaaattgttatttagcgtatatttgtaaccaaattagcaggcgtaaatacaaatcctttaaataactctgttgttgtgtggatatgcggtaatgtccacccgtgaataaatgtttacgtgttatatgacccaacaaagtgaaccaattatattactcctctctaacgcacttgtttattgcatttttatttatttgatggtcgaaacaaaatagtaagagtagttgttgcataggaaattgcatctgcttgcttttgaagcgttaataacttataaccaagcaagacatatatcatacagagcaaaaaattaggcaaacccagaaaaagccaccacatgttcctcttctcatgatcttaaaattgaaaaaaagaaggtgataagtttaatctaatcttgaccagtgaaatagctttttgttgcttgttgtttttgttcattcttcacagatttaattgtcacatacccaacgtatatggatggacctgtagatttaattccagttttacccttttcttcttcctttcatctgattttgtttgctgctttttttttgttttctggggaatatggaaaaggttaggtttcatatttggacctttttttttggtgttgaatttttcttcttaatttttatgcaaacatggaaaaggacatgcgatgataatcctgaatctactagtgcttagatctgatgaatactggattattaaaaaaaaatattactaaaaatttcaatgatctagggtttcttcagatctttaaatttgttgctgattttactcgatttctcttagtctgggtgcagttgatggagctccagctattttgaccatccaatttcaccagaaaccctaaatcacaagactatgtaagcattttccttatggctcttcttcctgatttttgattcagctaatttggtgatgaaccgtttatatatatctgtaatcgtactttaccctgaaaatatgtacctaccatatgtgtcatgtgtatttttattattttataaatggttgtgatattattgagacatgaatgaatgatgcttcaattgtatgtagtgttggcacagaagtaatg

SEQ ID NO: 34204 - DNA, 3003 bp, Unknown; identical to SEQ ID NO: 20618
  misc_feature (1)..( 3003): 2750-1469P.txt file - cDNA_ID_3075666; gDNA_ID_1620762; Annot_ID_167180

SEQ ID NO: 34205 - DNA, 3003 bp, Unknown
  misc_feature (1)..( 3003): 2750-1469P.txt file - cDNA_ID_3075670; gDNA_ID_2096295; Annot_ID_195535
gatattatgtaagaaggcagatgcagtgattaaaaatgcgggtgttgtgttgtttaggatgagattctggaagttgctgggaagatatacaaggcagggatgtctcttctagtgattgataccgagaacaagtttgtttcaactggttttgcaaaggagatcgcaagagttgctcaaggttgggtctctgcaattgattttgagatatttttttttgtcatttcaaagcagaaaataatcacattgtgttttgattgttcttcttcctcacaggaaaatattattacttgccaaatgcttcggatgctgtaatctcggccaccactagggatgcactatctgatctgaagaattcttgacctcattttgtctgcaataccttgattctggatcaaagtgtatattctaattgtgcaacacatcagtcactaaacatgaaattataagaaatgaaattttgttttaacatactcttaaaatgaatttccgattttattccgttggtcggtaattgacgactgatatgatgatgcattagtgacagatcactgtttgtattaagaagaagacgatgaagctgcaatattcacaattgatacaagaattaagatagtcggtataatcccggtttgcagtaaaccctactctaatgtctaaaccacatcacaacatcaaatagatggttcggtggtttagttacggcagatacaccggcctgaaccgaataaaagaaaactggacttggctcctggagaagagaagactgtacagctttctgaattccgaaagaaatgaaatctctctgcttcatttctacagctccattgattcgttcgcctccatttctcgatctttctccaacaagcttgaatcgatttacccttaaaattccagcttctctctatgtatctcatccaacaagatgcagcatttcaaacccgtcgagctctgaggaattgttgaattccaatggtggaatgtctagggcatcgattagtgtcttcggaggtacttcccttaacaatctcaagatgcaagtgggcagtccaatttctctgcattcaatcaatccattagcaaagctgagtttgagtgatcaggcatttcttctcttggccttcatcgtttgcacggtaaaaggagtttgctcgtgttttgttttgaccatttttgttgattcattgataaaggtttagactttttgatctcttttgatggtcctctgttacagacttcagtggcttttacaagtcttgtgattacagctattcctacacttgtggtaagtctccacatttgtctcaattcttttgcttcagctatatcctaaccgcatcactaattttaaaactgtttcaagtcattaccaatgaatcaacaaaaatggtcaaaacagatgaacaaagaattgattatttgtaatatgctatcaacaatctgacatataccttttcaaactcagtgagaaactatgacatgatctatgttatgagtgtagtcctctgcttgaaatttctactccacacttgctgttagcaccaactgaaaggataaaaggctaatgagtaacacatgagtacagtcactaacagataaaagattgaactataattgttgaattccacacttgactcttctttatatgtgtcctagatttggttcagctatatgatcatttctatttttggatttggctgaattcaacaaagcttggtggaatttttcagtttaatatgtctgtctctttgttcttggattgatatctattcagtatgtcctatatttacttacacaccttcaggccatgggtagagctgcaacttcctttgcaaagttagctgacacagctcgcaaagaactccctagtacattggcagcggtaaggctctctggcatggaaataagcgatcttactcttgaattgagcgatttaaggttatctctaaagctcttttcttttcttttcttttctggcttttgatcatctcaactctaaaaaaagtgaatgctacatgtttcaaagcaattagttcacaattagttcttccgagtcaccttgttatctgtccggaataagaaactttttctaaatcattattatgcgatgcaaatggtttcagccaagatataacagatgggataaacaaatcagctaaagcggttcaagcagctgaagctggaatcaaacagattggaacacttgcacagcagcaaactctctgtaagcttcttctaagcttttggataatctgtaataaaagctgctgttcatggtggcaacagttcacactggtaaaaaaaaagcggaaaatatgatctgatgatgaacttgatcttgtgattcagcaatgattgaagagagagcaaatttaccagaaatatcactacaacctgttgtggctggtgcagccgaaaagacttctcacgcaatcggcagtgcaaccaagagactaatgaacattataaccggaggaaacaaggatgaagattagacatttagaagttttcacttggagtgtgtttttggtccgtctttgtttgaagggattagtacaaggtaaagtccatttagggaaacagagaatctatgaacaagaagactttttagtaaaatttggtatatttatgaaacctgaagtgtaactgtgtaagacacaaaagaagaaataataacagccacagccattttaagatgtacaacagcagataaaatagtttacataacaagccgacaaaaaaaaaaaactattctattcttacatatgggttgactttgcaaagatggtaatagtgtgattgggattgggccaaagttaataggcccaaaagaagtggaaaattagaagtaatgaatcctttgattgagatagaagctttatcctcttcttcgtcttcatcatccgcgcatcaccagttttttctctctctctacaaatcttcttaacggcctttcatcaatggtcagcagacttagctttcgaatataggctaagaacgagcatg

SEQ ID NO: 34206 - DNA, 1386 bp, Unknown; identical to SEQ ID NO: 20622
  misc_feature (1)..( 1386): 2750-1469P.txt file - cDNA_ID_3075670; gDNA_ID_1620762; Annot_ID_167173

SEQ ID NO: 34207 - DNA, 3000 bp, Unknown; identical to SEQ ID NO: 5110
  misc_feature (1)..( 3000): 2750-1469P.txt file - cDNA_ID_3075696; gDNA_ID_1620763; Annot_ID_167251

SEQ ID NO: 34208 - DNA, 3000 bp, Unknown; identical to SEQ ID NO: 5110
  misc_feature (1)..( 3000): 2750-1469P.txt file - cDNA_ID_3075696; gDNA_ID_2926194; Annot_ID_201301

SEQ ID NO: 34209 - DNA, 3000 bp, Unknown; identical to SEQ ID NO: 5108
  misc_feature (1)..( 3000): 2750-1469P.txt file - cDNA_ID_3075702; gDNA_ID_1620763; Annot_ID_167246

SEQ ID NO: 34210 - DNA, 3000 bp, Unknown; identical to SEQ ID NO: 5108
  misc_feature (1)..( 3000): 2750-1469P.txt file - cDNA_ID_3075702; gDNA_ID_2926194; Annot_ID_201296

SEQ ID NO: 34211 - DNA, 3003 bp, Unknown
  misc_feature (1)..( 3003): 2750-1469P.txt file - cDNA_ID_3075709; gDNA_ID_1620763; Annot_ID_50059
atgatgatgagagatatttcacgcgtgggtgttgagagaacataaaaacagagtcatcactctaatttttgttttgttctctagggaaaatcaaaaagaccaaacaaaaatttcagtcaaataatggatcatgattaaacccacaagagaatttcgattacaaaactcattagataaaaaaagtttgagactttatataaacaagtgtgtgatcgtatgtctctgacaagacaaagagagagaggatgactcacctgagatggtaaggaaagaagaagatattgttgttttagtagaactgagaaaggttgtacttggaatggagtttagaacatgatactgaagagacatggctttaaaaagctctgttttctctgtctaagtatttagtgaagaagagatgatgaaactatttggtgagaaagagagagagagagaagtcttaatgggtatttataaggacagaaccgacttcacatcagagattgtgtttcattttactctttgagaaagaagagagagagagagaaggatatgatgcatggaatgtgtttttgtgggatcttccaaagctacggaattgaagggtaaatttggctttttcttctatttcctattctcttgtttatatctcttttacaacttgatttttttttataaaaataatggcataaggtcgatatctttgaaagtacacacacacatacacatacgagggcttctaatcatatcatatcacaaacaataatttttaaggtcgtaaaagataattaggaaacaatatttgtcgtgtgacaagtcatatatgactattgcaatagaattattataaatttgtcttggtgtaaaaaacaaaaaaaaggatggtacttatctagtgtcatatggtactaatctatttgggattcctttttttgtcaagtttaagattattttgttttaatcttaagtaacaaattagtttctgtttaccggaaactctaaatacatggattgatatatttgtcgtgtggacaggtaacaatacattactaatattgcagtaaatctttataaatggtatttgtctcggtctagataagaattagaagtagatggtatattacaatctcttgtcaaaacagtatcaatctggtagtaattcctagtttgtcaagttcaaagaggagttttacgatttcttccttttacttacatcttatcttaagactctagactctctctatctttttccagtttttcatggattccatacttataaaattaggaagtagaaagtacacgtgtagttatattattgcatgtataactatttgaaatttgaattactaccagtcaaatatagagttgagacgttttttttgttacgtgacaatagctttaaaaataattacagtagtcttgctactcatcaaatgcctaaataaaataaaataaaataatgcctaaattatttattcaaacatatatatatatatatacgaaatgatataatttacatatagttatatcaggaaatgtatttgtaaactgtaaaaatctttcaacagatgttatcatattttgtgatatataacgaaatgatatactatagttttggaaaacaacaaatcactaaatgatacatggttgatcgaatttgcaaaattatcaattttaggagaaattatttttgataacggtttataacgatactcataaataattgatcgttaacgtgcatacaataaaattaacgaattccaacatttctataaattacatttgactcaaatatgtcaaacatgaatctcacttaatgtcaaacaatatgttattgaatgaagtactaccgttcggaaaaacgataaatcattaaatgacatgtggtagattaggtttgcaaaattaacattttcaggagaaaaaatttctaataacggtttataacgacaacaataaatacttgatcgttaacttgaccatacatagtattaacgaattcgaacattccaacaaaacgcatttgatgcaaatatgccaaacatgaatctcatttaatgtcaaacgacatgtaatgaaatactacagttcggaaaaacgacaaatcactagatgacatatggtagatcaagtttgcaaaattcatattttcaagagaagaaattcctaataatgatttataacgataatagtaaatagttgatcgttaacttgaccacacttaaaattaacaaatttgagcattacaacaaaacgcattttatgcaaatttttcaaacatgaaccttatttaatgtcaaatgatacgtaatgaaaaataaatactacgtacgattctagaaaaacgcaaatcactaaatgacacgtggtagatcgagtttgcaaaactaatttcaggagaaaaaagttataataacggtttataacgacaataatatataattgatcgttaacttgaccacacataaaattcacaaattcgaacattccaacaaaacgcatttgatgcaaattagtcaaacatgaaccttatttaatgtcaaacgatatgtaatggaaaataaactaccaattttgtgttttaatttatacttgaataaattcagaaatactaatttcgatcatcggtgttcacctttcttctaaaattgttatacatattattggagatctttgtttaatatatagatatatagatatctatatatctatatatatatatatatatatatatatactagattttaactcgcagtacaccatatgacgatttattttctataagtagtgtatttgaaaatttaatgattatatattatatataaaattttacaaattgcactaatttttgaagatccaattgtaccaattctataattttacaaattagtgaattttctaagcctttaagataactgggcctaagagtctttaaaaaagcccagaaaatgtcatcgtccaggtaatggggataaggggttttagattcttttaattttgtttccgagtttttcagccatg

SEQ ID NO: 34212 - DNA, 3003 bp, Unknown; identical to SEQ ID NO: 34211
  misc_feature (1)..( 3003): 2750-1469P.txt file - cDNA_ID_3075709; gDNA_ID_1620763; Annot_ID_167239

SEQ ID NO: 34213 - DNA, 3003 bp, Unknown; identical to SEQ ID NO: 34211
  misc_feature (1)..( 3003): 2750-1469P.txt file - cDNA_ID_3075709; gDNA_ID_2926194; Annot_ID_141183

SEQ ID NO: 34214 - DNA, 3003 bp, Unknown; identical to SEQ ID NO: 34211
  misc_feature (1)..( 3003): 2750-1469P.txt file - cDNA_ID_3075709; gDNA_ID_2926194; Annot_ID_201290

SEQ ID NO: 34215 - DNA, 3000 bp, Unknown; identical to SEQ ID NO: 5105
  misc_feature (1)..( 3000): 2750-1469P.txt file - cDNA_ID_3075713; gDNA_ID_1620763; Annot_ID_167234

SEQ ID NO: 34216 - DNA, 3000 bp, Unknown; identical to SEQ ID NO: 5104
  misc_feature (1)..( 3000): 2750-1469P.txt file - cDNA_ID_3075717; gDNA_ID_1620763; Annot_ID_167232

SEQ ID NO: 34217 - DNA, 3000 bp, Unknown; identical to SEQ ID NO: 5104
  misc_feature (1)..( 3000): 2750-1469P.txt file - cDNA_ID_3075717; gDNA_ID_2926194; Annot_ID_201285

SEQ ID NO: 34218 - DNA, 3003 bp, Unknown; identical to SEQ ID NO: 20639
  misc_feature (1)..( 3003): 2750-1469P.txt file - cDNA_ID_3075736; gDNA_ID_1620764; Annot_ID_167299

SEQ ID NO: 34219 - DNA, 3000 bp, Unknown; identical to SEQ ID NO: 5130
  misc_feature (1)..( 3000): 2750-1469P.txt file - cDNA_ID_3075740; gDNA_ID_1620764; Annot_ID_167293

SEQ ID NO: 34220 - DNA, 3003 bp, Unknown
  misc_feature (1)..( 3003): 2750-1469P.txt file - cDNA_ID_3075744; gDNA_ID_1620764; Annot_ID_167292
gacaagctgatgtggtaacctacgaaacatattactcattacatgtttggaacgaaaattaaacttcacatcaaatgctctttctctgttatgcaggttcgtaaacgcaatgtttgcctcaagttctcaggtttagatcctagcgaattgtctggtgcaacggtgaagatcagacagacacgtaacagtttcccactcgggtcatgcatcagtcggagcaatatagataatgaagactttgtcgatttctttcttaacaatttcgattgggcagtgtttggttatgagctgaaatggtactggacagagccagagcaaggaaacttcaattaccgggacgcaaacgagatgatcgaattctgtgagagatacaacataaaaacccgaggccattgcatattctgggaggtagagtccgctattcaaccgtgggtccaacagctgacaggttccaagctggaagcagcagttgagaaccgcgtaacagatcttcttacccgttacaatgggaaatttagacactatgatgtgaacaatgagatgctccacggatcgttctatcgagatcgactagactctgatgcaagagcaaacatgttcaagactgcacacgagttagacccattagcaactctgtttctgaatgaataccacatagaagacggatttgactcgaggtcatcacccgagaagtacataaaactcgtacacaagctgcaaaaaaagggtgcacccgtgggaggaatcgggattcaaggacatataaccagccccgtcggtcacatcgttcgttctgctttagacaagctaagcacactcggattaccgatctggttcacagaacttgatgtgtcctcgactaacgaacatataagaggggatgatctagaggtgatgctatgggaagcctttgctcatccggcagttgaaggagtgatgctttggggattctgggagctgtttatgagcagagaacactcacatttggtgaatgcagatggtgaggttaacgaagctgggaagaggtttctggagatcaaacgcgagtggttgagttttgtggacggagagattgaggatggaggaggattggagtttagaggttatcatgggagttacacagtggaagttgtcacatcagagagtaagtatgtgacgaactttgttgttgacaaaggcaattctccagttgatgtgattatagatctttaacgtttcataatactaaagatctaaacattacaagtctttatctttattttcttctgaagatgggtttttgctgaaatgatagttcttctttatttccgatacttgcatcacaagaaaacattactaccttatttaaacagaaaaattatatgtattaaatttgaatttcatcaaaatatttcaaaagaaaaaaaattaccttatgaaaatgcgtacaaggtttactataagttatcagatgcagtggacgaaagaatatgatccgttagttgagtcgatcattctaataagagcaatcacgaatgatccacaccacctacaatctcatacgtacttgtccagcttcactgcacctaccatatccttaatttagttggcagatattatgtagatatatgtatatttcaacttggtgttctccacaaccacccatacatacaactttcgacaattgatgagacaagtatacaaataggttgggttttaaagcatttagtactatcctaaatagaaacgagaagggatcatttaatgatgaccttgaggaaataaagttggtttgcatttagtttcccattgatatttatgtgaatagtgaccatacgtaactgtaccatacttttatgtttccaccatcagggcaacacaataaaattgaatgccatctaaaacaaagcaaaaagatttactataattattttcttactcatgcatgtactcccaatctcccatagatattttcgaaggtatttttgtggtaacgtacaagtcttggcttcgtaatctaaataccgaaaaagaaaatgcctctaacttcccttcctctctctatatatttcaaccactctctgtctctcttcctctttgtagtttctcaaatattttcttcagagttggcacgacctcattaataataatcttctctacacctatcaataagagatatattttagagtttcactttggtgcacaaacaaagctcgtacaacattcttcgtatatggctcttcgtcgctgcttacctcaatattcaacaacttcatcttatctctccaaggctcgtactttctccaatataccatcatactgttcttttttctttttcttttttctatacagtaaggaaactgtacaacttacataattttattttatttttatgtaatagtaaaaataaaagacatttgctttgtttgtaataacacagatctggggatttcgtatgcatgggaccaaggcagcagcttctgttgtagaagaacatgtctcgggggcagaacggtaacagtaacctccaatcaaattcaacatttgtccgttcttattcattgttaccatttacaagaaatatgcaagaaacaaaatggggaaaaaattaaaggaaataaaaaaaataaaaaatagatgctaaaattgtatacttttagaaaaaatattgcgtgacggaaagcgcttattggtggtggttgcacaatgcagctcaagcccgtgatcgtttcgatggagtaaacaaattttgtaaaaaaaagtgtagtatgttttttttttaaaatcagtaaaaatagtgctttacatttccaaccattaaaagttttaaaccaaaaaaacaaaagtttaaaagttagtgttttgttaggaatatgaatagtccttgtcttggattctagttatcatataagaaaataggcttcaataggcaaaatattcttcctgtgatgcagtgaggatgaagaatatgctgatgtagattgggacaaccttggattcagtcttgtacggacagatttcatg

SEQ ID NO: 34221 - DNA, 3003 bp, Unknown; identical to SEQ ID NO: 20642
  misc_feature (1)..( 3003): 2750-1469P.txt file - cDNA_ID_3075752; gDNA_ID_1620764; Annot_ID_167290

SEQ ID NO: 34222 - DNA, 3000 bp, Unknown; identical to SEQ ID NO: 5122
  misc_feature (1)..( 3000): 2750-1469P.txt file - cDNA_ID_3075760; gDNA_ID_1620764; Annot_ID_167286

SEQ ID NO: 34223 - DNA, 3000 bp, Unknown; identical to SEQ ID NO: 5121
  misc_feature (1)..( 3000): 2750-1469P.txt file - cDNA_ID_3075762; gDNA_ID_1620764; Annot_ID_167281

SEQ ID NO: 34224 - DNA, 3000 bp, Unknown; identical to SEQ ID NO: 5135
  misc_feature (1)..( 3000): 2750-1469P.txt file - cDNA_ID_3075789; gDNA_ID_1620765; Annot_ID_167313

SEQ ID NO: 34225 - DNA, 3003 bp, Unknown
  misc_feature (1)..( 3003): 2750-1469P.txt file - cDNA_ID_3075806; gDNA_ID_1621189; Annot_ID_57478
acgacaatcaacattttcccgccaaaacgcaattcaacattttcccgccaaaaacgacattcaatattttctcgccaaaacgcaattcaacattttcccgccaaaaacgacattcaatattttcccgccaaaacgcaattcaacatttttccgccaaaaacgcgattcaacatttttcgccaaaaatgatttcacattttcccgctaaaaacgcaatttaacatttttccgccaaaaccgacattcaacattttcccgccaaaaaggatttcacattttccgatcaaaaacacaattttaacatttttccgccaaaaatgatattcaacatttttccgccaaaaacacaattcaacctttttctcatcaaatatatatgtaatacagaaaataaatacaatttaaaatatatttataagcaaattatagatacaacatacatataatagtatattagcagttaaaataaactctaagaaaatgacaaacaccaagttgggtacccacgggtagtctcaaaacaatcagtttttttcgggctttacccactaaatcaaaaacccatctgggttttctaaagttgggtttttggtgggcaggtttattttgggttcaggtcgggttgggcttttttacccaccacaacatctctagatcttggagtacatataccatccagtttagttagaatatattattatccggttcaattgactggttaagttagaacagttctatataagaaaattgttttacactttactctttaagaaataagaatcgaaaatcttaacaaacttttcttaatagctcagctcaattcttattttgtaatatggtatcagagtcaggtttcaatgtgtctcgattgtagaccatccgtggatgtccagtcccacaaacttcacgtttcagatgtccagtcctgagcgtgagggggtgtattagaatatgtcctacatcgagattttgataatttatggagcaatatataagtatgtggtaaacctcaactcttgagctagcttttgggtatgaggtagactcatactaatatgaaatcatatttttatcatctgttagaaaacactagtccttttaggaaataccaaaatctacaggatgtaaacataagggatagtggagaatctatttaaagtgaaatggagttggtaaattgaggcttagtactacataggtcagtttgttgacttctaaagtggctttgcattcacaagtatgaatggtcaagcttagcgtttggtggtgcgatcaataaaagattaattatcattagtattaatgtattatagtatcactatacatctcttattaagtgctatacatcacagatacccacaaaacaatttgtaactcaatttaaaggtagtaattttttataaagagatttcataaatctaaatgaaaagttaaaggacagaaagtaatcaaagttgaaccaaacaaccataagaaagaagggaatctggttattaacatagctaaatttgttagttagtgtattttctagaatccaatatttatatatatatatatatatatagctaaataattgatgatttttgaaagaaaattttcctaaataaaactattactatacctccccaacatcaatccggctaatagttacttaatttcatgcttaattgttgataaaataatattttgtataagttatacatacgatcaaaactaataatacatataagggtttttaatatataacaacgccattctaaaaaaattgaggcgacaacaaatatattctacggactatatagttttgaaggttaaaacctatatatacttgctaggaaaaaccaatttataatatttcgaatggtgtaagttttttttccaagtaattaagtaagagttgtaggctttctatttatggatcatccactatttttctacttggccactcactataaacgtaaaacatattaaacgaccaaaagtaatttagattctatcttaagagttaagactacactgttacataaaatattttccactcttaaattttctttctttgctaaaaaatttaaagttgacaaaaatatctaaaataaaccataataactataccatttagttacagaatatttttgattgagtaggattatgcaacttaagacaactctctaagatttattgtatattttattcaaatataaattgaagaaaatatattaaatttttgagccacaattactggagatggtggtgtcagtatctttgaaataatgaagaaattgtcccctctaaagttaaaacccacaaattatgacctactttcaaacaccatatatttctccataaacttggggtcttaatcaattaattataaaaacagattgtacattaacattttccttttttcattgacacgaaaattttagaaagaggttatccaatgtcaataatgtttcatttcagattcggctcaaaaatagaaaaatatacaaataatttgaattaaatataataatgactttttcttcgaactcacagtacataaggcaacaagtgtcagatttgatgcatagagataatagcatttttcgtagtttttgttaaatataagtataatacaacattccaaatttctattacagatttttaactggatcggataattagatcggcatatttttcaagctttcagcaaaaacgatcaccctaaaattattttttttgatggaatgatttgtttgaggatattgaatatatacactccaattccaaaaaggctataaagtatgaattaaacaatcaagtagtaatagccattattaatgattcgaaaatggtaaagaaataattaacactaaacaagagtcaaaagaacatgacgtaaatattacatcaactttacgtataaaccccttccctctctctatttaaacccaacacatacatatgaaactcctcaacaaacacaaaaacctcacaaccactaaacaacacacaaaaatg

SEQ ID NO: 34226 - DNA, 3003 bp, Unknown; identical to SEQ ID NO: 34225
  misc_feature (1)..( 3003): 2750-1469P.txt file - cDNA_ID_3075806; gDNA_ID_1621189; Annot_ID_174544

SEQ ID NO: 34227 - DNA, 3000 bp, Unknown; identical to SEQ ID NO: 5140
  misc_feature (1)..( 3000): 2750-1469P.txt file - cDNA_ID_3075821; gDNA_ID_1620766; Annot_ID_167341

SEQ ID NO: 34228 - DNA, 3003 bp, Unknown
  misc_feature (1)..( 3003): 2750-1469P.txt file - cDNA_ID_3075842; gDNA_ID_1620767; Annot_ID_167374
gtataattgatttgcattctggaatgtgttgtgttgttcacttggattatgtttttcattttccttttgtattccctaaaaagttttgcatcctgttcagactacatttttacacaatcaacagtttatccgtttaggtaaaatccatttgttggtttctctttcatctttcagtgtccttcttctatctgttgtttccagtatgtttgtgttgttcgattaagtgacagataagtcctaagctatctctagtgtagtggctttcttaatcttgttgcatgttatggttatttcttaatccttcttttttttaacttccctttacgttctcctcctatagattccctctgtttatgatctctaactagatttaagactcagttcgttttctccgctatcccttaagcatcaaatcaaggatttgaatatgcttcccctcagaaaagagatctaggaatctctacagagccaccacaaaaccatccgaaaccaattttaagctcttttccaacattcaaaaggatgaaaaggttattaatagaaattgactcttaccgtaaaacgtagattgcattgcatgatcaaaaacattcaccacaatcctctgtaaaagtctctgaaaactgaaacgtttattttcttgtaaactgtcttaacaaaacctttaacagacatgaaatttcataaagttataatcttaataaattctgatacaaagagagggtcttaataacatgtcccaagtcaaacacatcataaagctttgttttcttccaatgtttccatgtaccaaaaattggggaaaaaaagaatttcctctcctctcaaatttgtaacaatgagcttttatatgttcctccacaaaataagcagttttgaattcaagtgcagttcttgctggaacatcatcaaccacatgttttaaatcattcttgacaagctcaaattgttcgatgtttctaggtttagccgcttaagacactttttcttcttgataactttgttaatttttcattatccaccatacatcatatatatacactaaacttaaccatataacctatggttttatgcaaacctctaaactcatttactagttgggtcttatgtacatttgtggcccaaaagaccatttatacttaaaccgaagtcttcttcttctccctcaatcttggacgcttcttcttcttacgtcttctcttgtcaatcttcttcactttcccatctagtctcaatctctggttcctcaattcgaatttagataataatcatagtttgattccaacacaaatgtcaatctattcttttgacggtagaacattctgttttcagatgaacaaatccttgacatccataccactgtatgttcaacttctcatcttctctagcttcattccacactataaagctattggatatgcaaaagattcatgagggttccaattaaacaataactcaaaatgaaggtttcgttttcttcactagtcccttgagtcatcaaattcttcattgagtcatcaattttttcattaggcatcttaaaaccccccaattatttgcacctggtttcctcaatataaatcttggtgttcattttctaaatcattcacatctttgtcttcaacaaacaaagtctgtaaaatcttcttccatcttctttctctgatccagaatcactaaagacactacttctgaagcttagtgaaggagctgcagaccttggtcctttggagcatcatctactagttctaaccatgacgatacctacatagttaggtttggatcaacatttcggcggtcaaaggttggtgaactgcatcacttcgctgcatattcatgcttttcaagaaaagctattcaatacatcatcactggctagtatggagaatcttcatcatctctatgtcgaaagtagtcatgtctaggagatgtatagattgcaggaaagctaaatggactagtctaatttaaacaatccgacaattccatgctttaccagtcgtctctcagacgtgtttatacgtgagtgcataaatgatctggcttggcttctgtttgcctgcagattagatgttcagattatgtgtcattaatttttcaaaatttaaagaaagatgcgtattctactcttttaagttttaatgatcaaatctcacaaaaaataataatcttttcttttcctaagaataagttcagcttctttagatattgataagtaattaggtagatggggtgttagggatatttctcaatttcattcagttccacaattgtcaagtgtttttttttcttattttgcttcttcttcttctttagtgatgtgggttagtcataagttgttcactagctaaaagcagagtccatggcttcttcttatgttgttctccctttcttcttgtaatttggatttttttcattacttttcttttgcatttttttctttctccagtgtgttgttcacttggattatgtttttcatcatttccgtatcgtattacttaaaagttaaaacggattgaattaatccttttcaaactacatatttatacataatttcttttctagagttcaattctatatacaatttatttagttaaaagacttgatatcagagcgacaaaggacttaaatagttctaccaaacatgaaagatactaatttccaaacatgaaagaaagaattattcaatttttactctaacagtctacacgaaaatgaaagagttgtcattttgagaagtccttagatgccatattattgccagaaactaatttgtatggactctagctaccaaaaaaagaggagaaaaatcaaagtccttcatatggaaaatgggtggtctgaaaatcagtgacagcaatgtcttttattatcttctatctttctttgataatctcaacccacccgtactggaacaagatgttatctaaaaaacttcttcaccttcagctttagcttcgttgttgcttactgaaacttttctctctttacatcaaatttatg

SEQ ID NO: 34229 - DNA, 3003 bp, Unknown; identical to SEQ ID NO: 27875
  misc_feature (1)..( 3003): 2750-1469P.txt file - cDNA_ID_3075855; gDNA_ID_1620767; Annot_ID_167365

SEQ ID NO: 34230 - DNA, 3003 bp, Unknown
  misc_feature (1)..( 3003): 2750-1469P.txt file - cDNA_ID_3075859; gDNA_ID_1620767; Annot_ID_167364
tatgcgatgaaaaaacagagtttgagaatgcaacttatgcaaagttcctttctgttttaaatgcaaagaaggcgaaactgagagcagtaagggacaaagaagattcagtgagagcagttgaggaggaagagtcgacatacaaagctgaaagcttcgagagtggaagaagtgatgatgagcagagtggggaagaagcgtcagaaaaggcaacaagcagcaaagcccgtggcggaaagagagctgcacggagctaagacttagagattcccctgccttgagatttcaggtgggagattccattcagtgttttgtgaatctcatagctaggaaatgagagttttcgttgaaaaatcgctagaatctgtattgcttgtgaaagaaaatgcaatagacttggagataaagtaatttttaatttcggatccagtttggtttggttttttaatttccttggttcagttcagaatctggtttggtttttaaatttccttggttcagttcagaatcgagtttggtttgcaatctttcacgtgcgttcgaaattgtagaatgatcgtctcctcttctatctggtgagtcggtggcaatggtacaccaatattgactgttgaagtcagctattttggataaaaacagtgaatccctgatggttggcgttggaaatggccatagtgtgtagattggggcattattgtacaacggtatctctgaacgtttatgattatgcattacaagtgttcgatgaaatgcctgaacgagatttcacgtagtctccagttcaagaaaactggttctactgaaccagtgagaaagagtgttaatgtttaccattcgtaggttctgggtatatcaatctatggtcaatcaatgcgttcagatttgtgaattttctcatcttttgattggtgaagagtatatatataggtgcctatgtttcactggttctcggcgcaacaagcttatgtagtcatgaaaaatgacagtgttgcgttattgactgggtaaaaagttgactttttcgtggaaatgacgtaactattgacaaatttagttggttttattagatatggtttaagttgatcttgtatatcagaattttggaacaagagtactgtctggtctagtctggtcagtattgtatataggtgcttgaaaatagtcttacaagtacctgagtatttgtttccatggatttcttgttcttgttattggagagaaaaaataaacacatggggaagaagagggtcgtgttgctttggcttagcatctttataagttttagctctgcagagataacggaagagagccctttgtcaataggacaaactctcagctcctccaatggagtttatgaactgggcttcttcagttttaataactcccaaaatcagtatgtcggaatctccttcaagggtatcattccccgggtggttgtgtgggtggcaaatagagaaaagcctgttacagactctgcggcaaatctggttatcagcagcaacggaagtcttcagttatttaatggcaaacatggtgttgtgtggtccagtggaaaagctcttgcatctaacgggtctcgtgtagagcttttagacagtggaaatctagttgtcatagaaaaagtttcgggaagaactctatgggaaagttttgagcatcttggtgatactctgctccctcactcaactatcatgtataatgtccacaccggtgagaagcgagggttgacttcttggaaaagttacactgatccatcgcctggtgactttgtcgttctgattacaccgcaagtgccatcacaggggtttcttatgagaggctcgaccccttattttagatctggtccatgggctaaaacaaagttcaccgggttacctcaaatggatgaatcatacacaagtccattcagcttaacacaggatgtaaatgggtcaggatactattcgtattttgatagagacaacaaacgttcacgtattaggttaacaccagatggatcaatgaaggcgttacggtataatggaatggactgggacacaacctacgagggtcctgccaattcatgtgatatttatggcgtatgtggaccttttggtttttgtgttatctcagttcctccaaagtgtaaatgcttcaaaggttttattcctaaatccattgaggagtggaaaacaggaaactggactagtggttgtgtgaggcgtagcgaactacattgtcaaggaaactctactggcaaagatgcaaatgtcttccatactgttcccaacataaagcctccagacttttacgaatacgcagattctgtggatgcggaagaatgccaacaaaattgcctcaacaattgttcttgcttggccttcgcttatattcctggaatagggtgcttaatgtggagcaaggacctaatggacacagttcaatttgctgcaggaggagaacttctttccattcgtcttgcacgttctgagctaggtatgacttggaatataattcaaggaccttctgtatattttgcaattatattgatattgatgttttcgatagatgcatgacttattgtttaattcttatgctaaattcctcagacgtaaataagcgcaagaagaccatcattgctattacagtgagccttaccctttttgtgatcttgggctttactgcgtttggtttctggagacgcagagtggaacaaaatggtaacacattaatgactttactatcgaaaagatctaatcatttggttgtcaataaaattgatctgttacatttattatgagatatcgttaaataaaaggttgtttttccactacatcagacctatactaaattgatcgactcatatatgttcttttggtacattggtttcgccttaaaaaactcttaatatactcacttggtactaacacacaaattctaacccaaatttcagctcttatatcagaagatgcatggaggaatgatctgcaaacacaagacgtcccaggtctagaatattttgagatg

SEQ ID NO: 34231 - DNA, 3003 bp, Unknown; identical to SEQ ID NO: 20659
  misc_feature (1)..( 3003): 2750-1469P.txt file - cDNA_ID_3075870; gDNA_ID_1620767; Annot_ID_167360

SEQ ID NO: 34232 - DNA, 3003 bp, Unknown
  misc_feature (1)..( 3003): 2750-1469P.txt file - cDNA_ID_3075874; gDNA_ID_1620767; Annot_ID_167359
ctcagggcagggcaaagaggagttcatgaatgaaatagtactcatctcaaaactacaacacaaaaacttagttcggattttaggatgttgcattgaaggagaagagaggctgttgatttatgagtttatgttgaacaaaagccttgatacttttctcttcggtgggttctttcttgcctcattcctttactatcggcagctttttttctctatatggaattgtcttttctgattgttttcacgctgtattgttgcttagattcaagaaaaaggcttgagattgactggccaaagagatttgatatcattcaaggtattgcgcgtggaattcactatctccatcgtgactcatgcctcaaggtaattcaccgtgatctgaaggtcagcaatattcttcttgacgagaagatgaatccaaagatatcagattttggattggctcggatgtatcagggaaccgaatatcaggacaatactcgcagggtcgtaggaactctgtaagaatctatttcaaaaacataattgactaaagactcaaagttataatcagatattaacttgggagaaactatttgatatatgtgcagaggatatatgtctccagaggatatattagaaatcataagcggagagaagatctcaagattcagctatggcaaagaagaaaaaacccttattgcatatgtaagtacgactttaggtatacagttgcaaatatctcaaatcgtttcttgcttttataattttaagatcaaacaacaggcatgggaatcttggtgtgaaactggaggagttgatcttttggataaagatgttgctgattcatgtcgcccattagaagttgagagatgtattcagattggtcttctctgtgttcaacaccaacctgcagacagaccaaacacacttgagttgatgtctatgctcacgacaacatcagatcttccatcaccaaaacaacccacatttgtagtgcactggagagatgacgaatcatcgtctaaggatttgatcactgtgaatgagatgacaaagtctgtgatcttagggcgttgagaaatgatgtttgattgaaactttagtctgttttgtaaacgattttttctatttatgaaaggtatattccaacagatgaacctccattttggtgcaccagtgaattactgtagagtaagaatttaccatggttaaagattaggtgactaataatagtacttagattcgaagccaatggctaaaagtttcatatttccagaaacactaatcagataatagattcatcatttcatcttccatgtaagccaaaatagagttcttcacatccatgttcttctcttccaacatccgaacttcgttttccagacgctccttctcagccaataaactcctgaattcactgtcttcaatctctctttggaatccaaaacacatcttcacaaacccttccctgtgtacaagtttccatataaatgcttagtaacttcaagattagacaaaatcaagaacaatgcagttattgatgtttaccgcttctcggttagtctttgtaattagctcactgtgctcacttcttaagcaacaaatctcatcctccaatagcttcagagagtttcttgaatcagcttttaaggaaataaaaccatagtgatcaaaattacgaatgtgaatattgaacaaatccttcggaaaatttagacacctgtaacggagatcaaaccgctgatctcgaattgagaagcaaggaacgatctagtaagctcaggttccttgagagacagagaagattcaatctcagaacacgctccgatctgtgattcgatctctcgcgtcacctgaatgtttgcttcgatttcccgattgacctgtttcattcgatcacagctcagattaagctaaagacgagagataccaatccagtgaagaagatgaagaatagtgaaacctgatcaagcatgtccttgaaaatggagatctgacatagaatcgctcctgaatcctccatctccgcagaaatcactctctgtctctctctctctctcgctcgctcttgcttccgcttcttttcaaaattcaaaatcaatatcgttatgagttaggggaagataagattttaccgggcctttatgggcgtttaccaaaatcggcccaatcggatttcggatctttcaatatttgtaaatacgaaccgactttttaatttatttcggatctagtttggttcggttcagattcgagttgggtttgtaatctttcaatatgtgcgttcgaaatggtagaattgatgatcgtcttcttctctctggtgacactggcacaccaatgttgactgttgaagtcagctattttggacaaaaacagtttcacgttgggaatggctatatgtactttcaattgtgtaatcggggcattagtgtcaaacgacattatgggagctttgagcgttctgataatgcattacaagtgttcggtgaaatgcctgaacgagatttcacgtagtctcccacttcaagaaagctcttccggtgaatccactaacatttaaaccgtgtattgtacgggtaaaaacaatgatttcagaaaccaatgtcatctgatttattcatataccaagagttttgatgtatatcattggcacgttctggatttaaagagctggcaagattatggtcaagcaatgcgttctgcatcgaaaaatttcttatctttagattggtggagagtaaatttgcacatctttcacttgttcacgtcatgaaatatgactatgttgcgtaattgactgggtaaaaaattggactttgtttgtggcatttacgtttccattgaaaaatgagtattttggaacattagtgcggtctggtcaacattgtttatagtaggtgcttgaaaatagttttgacgagtccctcgaagaaaaaaaatccctgagtgtttcttcacttggctttctttgtcttgttatatgttcgtttcttagttattagagaaaaaaaaatacacatg

SEQ ID NO: 34233 - DNA, 3003 bp, Unknown; identical to SEQ ID NO: 20661
  misc_feature (1)..( 3003): 2750-1469P.txt file - cDNA_ID_3075897; gDNA_ID_1620768; Annot_ID_167403

SEQ ID NO: 34234 - DNA, 3000 bp, Unknown; identical to SEQ ID NO: 5176
  misc_feature (1)..( 3000): 2750-1469P.txt file - cDNA_ID_3075901; gDNA_ID_1620768; Annot_ID_167402

SEQ ID NO: 34235 - DNA, 3003 bp, Unknown
  misc_feature (1)..( 3003): 2750-1469P.txt file - cDNA_ID_3075907; gDNA_ID_1620768; Annot_ID_167398
taacatgaggatgtttttggctgcagcgttaatcactcctccgaggaagaagctgacagagccaacgaggatgcttcctctcctaccgtagattctggtgacgtaagaagctccgaaagttgagattaaaccggcgaagtagagagaagaagtgaagagtgtgaggatttgattgtcgtatttgcagtaatctgtttcgtttagatgcatttgctttcttttgtagatccctgggaagaactctttcaagaaatcgtccattgatgtaacaccacctgcgtttaacaaggacgaataaacaaaaatgagcattggtcttgcataggttccttgatttacaagaaactaagcagtcgacacttaaacaaagctgaagctaactctcgtcagagagggaactgatattttcggacaaaacaggggaaatttaacaaaactgaagcaggcccttttcaaaaacaatacttggcagtttcagaatctggctatttgattggtataagataaaaccagatcgagaaagttatctaaccagagactccaagatcatagccgaaaagagagcctcccatggatccgacgatgcaagcgaagatgaagtaagaagtgatccgatgttcatagagatgagctctctttaggcctccttcatcggtaagagctccaccggccatggctttaaaatcttgaagacaaaaggaggaatattctggtctccctctttgtaataaaatttgactgagggttgtgaactagttgtgatcactatgatcaagattttagagataaataaaaaggttggatattagcagactagctgttacactttgaccatctatctttccttatccctttttctaaggatatatatatgacttcatctttcttgattattacaatgactagttggtaataattttcttgataagctatgtccttttaaagaaatttcaaatatggtgatgatctaaaaaataaagatatttagatcattttctatataaattatagtatatctcgactccatgtcatattttatccataatttaatgctagcataccattaattattttctccataaatgagaaaatacatttccctttctattgaattgtatcataactttgatattaaaaccgtcttaattacctgagttgttcagttgatctagagattttttttttttttgcacaaggtattgagaaggtgtgtccaaagttggatcgaacttgatgaatgttatttgagtgacaatgtcatcattttttggcgatctacatgacagaaaaaaaagaaagatgttgtaagagttgtttataactaccacagatacaaacaaaagaaagagagatgctaaaaggagataaacaatatttttactctttaagacatcatttatcctctgtgtcctctaccacataaacattcctttgttggcttgagggtttcttgagttagcttcaccaaatactaattttctatagcttatacctttcttcttgttactggtttcaccggcccctacattgtggtaattgttggttcatatacttttgacgcattatttggcttaattacatataagattaatagatacaaaggacatgcatttgttgaacttacatgtgtttggacataagttggtatcgtatccaatccatcatccgcattaagcttcctttgcgcatcgctcttaaacaaccatagattctacgaacctataagggatctcaacctataaactcaacgaaacatgaatgagatcagagagagagagagagagagagagagagcaatggtaataagaatacaaaaccgatttctgatacggttttgcaacgtgaaaagatcatgtgagatattttagggatttctaaactgattatctatccgcattacaaaaatgtaccgtaaaacatatatctaaatacacaccacatttacgatgtataactttacgtaatagacatgatatctacgatgagttaatttttaaaataagatgtgtttgccatttttatcaactatcaccattcacccatcaaactattattttgacaagggaaattgtcaaaagtttgaatattatacgtagctcatgataacacaccgattaaagaactcatctactttgtgatatcaatttaagagtgatccatcattttcgattagcttgaatgatagaaaatactgattgttgaattgttttaaacgagctaataataataatttctacaaagtgatcggacaaaagaataaagtccaatgaggatgagacacatcagattatttaacataacacgtcagcaaattaagggatcgaagaaaatggtttagcttgacacaaccgccaaagcaaaaaggctgaagttttcctttttaggctctttctcttccacgcggaaattaataataaaaaagatccaaactttgaagatagcgaagagcaaaaagataatctctggctcgatttttgttggagtccttgattcgagcaagtttaaagactcgagggttttcttctggataacgtaattagatactcgtgtaagtgcaatttctctctttttcttctgttttatgggtgttggtgatttagggttttgcaaaatcgttttgtttgctgggtgattaagcttgggtgatttagaaagacgaattagatcaaggaacttatttcttgttatgagtcaatttgggttttaaagattcaatttttgatcagaatataatctaattgttgtgtgttgttactcgtaatgcaggttttctgaaagggtcatcactgctattgtcatagcttgagaaaggatctatttttaatatcagtgatattggtatctatgagatttggagtagttgtttggaggaacgtgtcctcttgcttgatgtgaagattgcttcttgttgtttgctgtttcttaatggagtggaggggaatcctctgctcgttgctttttattgtttccgtgggagagtcgtcaagtagatttgggataatg

SEQ ID NO: 34236 - DNA, 3003 bp, Unknown; identical to SEQ ID NO: 20664
  misc_feature (1)..( 3003): 2750-1469P.txt file - cDNA_ID_3075917; gDNA_ID_1620768; Annot_ID_167387

SEQ ID NO: 34237 - DNA, 3003 bp, Unknown
  misc_feature (1)..( 3003): 2750-1469P.txt file - cDNA_ID_3075949; gDNA_ID_1620769; Annot_ID_50171
taaacacgtccgtgagattttcagattgacctttaggtcacatttttgtccaccacatcaacatgagagggcttttctcaagcatttcaataatcggaatccaatcactgaccgccacgtggacatcatacgtctcaataaccaatcatagaatggttgtgacgacgttcacggtgagttgcagtacccgatcccttttaaggtccgtgacagaataattttgaaaccagcaagacaaatttagtcaaaccaaaaaaaaaaaaaaaacgaaagcgcaaagactaaggagaaaagaaattcttcgcttcttctccggtgtaatcatggtatagcccgcgatctcgattgtttcttattatcggtattcatgttatattagctagaattgtgttttgtacctccgatctgattcacagattcagtatgtgaaattcattattttgaggatttgatcgtcttatcaatgatttaatctatgtttgaatattgttgaatcacgggcaatttcgcatcacgccaaaagaattgtatctaacagatgcgaaaaagtttgaatctgttttcgaaatgtagttattcaaattagctgagtttttgtcttgatagtatgtattgtttcttgatttaaaatgcatggccaaatcttaccctggctttgcccagattaaatactttggtgagtgtaaacgaaagagattctgattttagtaatatggttgatctggagagaaccattaccaatgtgtattactgaatagggttgattttaaaaattgttgcagacaacctcaaaaagactagcagacaggaagattgagaaattcgacaagaacatattgaaaagaggatttgttcctgagaccaccaccaagaagggtaaggattaccctgttggtcccatcctcctcggcttctttgtctttgttgtcattggatcatgtgagtaacctcttcttctttgtgctccttgattttaagtccaaatttagacattggtttccagaatttcttctttgtcccccttttattgaaaattctttgtggaatctgaatgatttgattatactatgtgtatgtttattaaacttccttgtatatgcttttgttacagctctcttccagatcatcaggaccgcaactagtggaggaatggcttaaacccaatcacattcaagctggaagattgcaattctcaaattgatgaatcatcactttcttctcttctgacttgtctctttttttcccttatactgtagaatgtgactactttctgttgactacatgttattgaaagaatttttgagtctttttctaatatccactctttactattgtcttgataccaaatacaagcaccgttaaactatttaacgttgaattggtgaaactatttccctcggccaaattgttcggtgaacgaaagatctgatctgtgaagagtttagttgaatagattcggctgatggattggtagggagagacaccatgcggttggtggaaggtacccgtgatagagtcttgacgtgaacaacttagtccaagagttaggagacacaataatgataagtagccgtcaatatatcttttgatccgaatttgaacttattatatgctttacttggcaaatgatatgaaaaacttgttcattgttgaagaatctatcaactattgtattcaatcacttacctttttatcttttaccaatcatacttataactgaaccacaacaatctctctttagtcttattcttgaccaataacttgtattttaccgctttatagcagttgggccatatatatgtaagaatagtttgagaaaaagaaacaaagagagagaggttatgatgagttaaatcatgattaatctttaatatataggtaattgcaatgttaaatggaagtgacatgattgaacaaagcatatttgatgggatgagaaaaatgaacccccacgctttacgactactttacattctctgtggaatgattttgaaaaatataattattacaccaaaagaaaaagagaacaaggcaaaattatgcacatgcaatttattacattcgattcacattgattcagtgactttctttctttcttacaacaaataaaataaacttttggaatcaagttgttcgtagtcttcttctaacgatgatgacacaaaaataagattcaagttgtcttattcttacctagagttatttggttccaaaataaatgaagtcgtgatataatagtaatttggtttcatacttactcactcactcaattgtgtaaaaagccgaaatgcagtaaaaacagtgatacacaattgtatcaaaagataaaatgatggacgttaaatccgtaatttaaatatgttaaaagtaaaaaaaaaagttagatcttctttgtataattacaaaatatatatcataagcaaaggtggaagaaaccatgatttagtataattgccgcaacctcaatgatcctctttataaattaaaaagaaaaacccataattaccaatttattaccaaagcacgcgtctttctttattacaaaattgttttgttttattcttgttagaaacatttttatttttattacaataaaatggaactatagtgtatgttgtttagaataattgtattaaaaaaagtataacgtacaaaagaataaagtgaatgaggaaaaaaaagagaggggcaaaagtggaaaagagagagatagagaaggatggaataattggtaagaaataatcatatggggccaactgaccatggaaaaagatgaagcaaaaaaaaaaagagagagagaaaaagacaattcagagataatacaaaggaatggttttgttttaagagagaaagagaaagagagaactcgacgaagaatgatggtgggaggttaaattccccaaacccccagagctcttcattttcttcatatcgacgatatgctaaatggctgctgctaccattactgatctcttctcttaagctctctttgtttggggcatg

SEQ ID NO: 34238 - DNA, 3003 bp, Unknown; identical to SEQ ID NO: 34237
  misc_feature (1)..( 3003): 2750-1469P.txt file - cDNA_ID_3075949; gDNA_ID_1620769; Annot_ID_167425

SEQ ID NO: 34239 - DNA, 3000 bp, Unknown; identical to SEQ ID NO: 7833
  misc_feature (1)..( 3000): 2750-1469P.txt file - cDNA_ID_3075953; gDNA_ID_1621167; Annot_ID_173865

SEQ ID NO: 34240 - DNA, 3000 bp, Unknown
  misc_feature (1)..( 3000): 2750-1469P.txt file - cDNA_ID_3075963; gDNA_ID_1620769; Annot_ID_167437
ataacaatgttcatttcatcgttgctaatgacataaaacgatcaaaaactgaatcatagtacttcttttacagtgatctcaaatatattaatcgctaatcaatgaattatgtcacctataattgtcgtattaccaacaactataaaacatatatataaaaaattgttgtcgttaactagttgttgatagtggccactctaaaacgatcatgacctactacggaagttataactagtcaacgttggacgttagcaaggcccaatggacattaactcagcccataatagcacgcgccttgtgatgtgcaccagtttccgtctttggtcgttgaattcaaggaaaaaaaaagtacatcacaagcaatttcttacttatctgtgacttgaagctatttctccaatttcgttttccatcgacactctatttcattttcaccattcacgtcttccttctgaataaaataaaccctaaaacctaataccgaagtaaactcgtcaaccactgcgcccatgacctcccaacgatactcttcccttatattcttcctcttccttcttcctttctgcgatccaaaccttcaaacacatctccggtagatatgaaaatccactcttgcctctccgccattcttctgttcctcttcttctctgcttcttccgctaaacaaaatgttcggacagagcgaatttcaggtacttgttcttcttgctccagcagattggaatgtagagttgaattgattaatccttgagggtcgctcaaataagtttgaaatctgtcgtttctccagcatttggtttatagacatataatttgatttgcttaagaagtcaatgctattgattgaggaactatgtaacagctgtgtaagagagctcaaaaaggtgtgtttttgaaatgcaggaagtgctggtgatgttttggaggatgatccagtgggaaagcttaaggtttatgtatatgagcttccaagcaagtacaacaagaaattactgcaaaaggatcctcgatgtcttacacacatgtttgctgctgagatttttatgcacaggttccttttatctagtcctgttcgaacgcgtaatcctgatgaagctgattggttttacacgccaatttatcctacttgcgacctcactcctaccggcttgccattaccgtttaaatcgccgcgtatgatgagaagttcgatacaactaatctcatcaaattggccttattggaatcggactgaaggagctgatcacttctttgttgtgccccatgactttggagcttgcttccattatcaggtagattatctctgcattcaggaacaaactctattttttatatgcattgaatactttggtggttgctgttcatcaagaataccctgtgatcttacaatgatagatgatcattagcttaaaattagctgttgtatcatcacattagtacttagttacatggaaactgagaatctgtttatgagtttattgtataagattgtggaatattccaatgatttgtgtgggaattgaagatttgattgacattaaacaggaggaaaaagccattgaaagagggatacttccactactccagcgtgccactttggttcagacatttggtcaaaggaaccatgtctgtttggacgaaggctcgatcactattcctccttttgcacctccacagaagatgcaggcccattttattcctccagatattccacgctctatctttgtctacttccgcggtttattttatgatgttaacaacgaccccgaaggtggatattatgcaaggtacatattttgtagacttgtaaaactctcaagtgatgagttttctctagtcttacatagatttttcaaccaaaatggaactgcaaactctatagtatcatacaataaaagaagcacatatacatcaagatctacctattaagataacaattaagcattcctcattaggaagttaggttatatataaggttagctaagatcaaattgttttagaatctgctgactggaacttctctctttgtatagaggtgcaagagcagcggtgtgggagaacttcaagaacaaccctttgtttgacatctcaacagatcacccgacaacatactacgaagacatgcagagagccatcttctgtctatgtcctctaggatgggctccatggagccctaggttagttgaagcagttgtgtttgggtgcattccagttatcatagcagacgacatagtactgcctttcgcagacgccatcccctgggaagaaataggagtctttgttgcggaaaaagacgtccctgaactagacacgatcctaacctcaataccaacagaagtgatcctcagaaaacagagactcctcgcaaatccttcgatgaaacgagccatgcttttccctcaacctgcacaaccaggggatgcattccatcagatacttaacgggctagctcggaagttaccccacgacaaaagcatatacttgaagacaggtgagaaggcactgaactggactgctggtccggttgctgacctgaaaccttggtaaagtcagaaagagaggaatctttttgtatatcttgggtttcacctagagcatacgttgttgcctttctatagcacttcaaaaacattagaagtccaagtcctccgagtggattttttttgtagataacattagtacatttactcgaggtacatgtaccaagtttgttgtacattttctcttcgattgatcatataatactgtacactccttttgtcttggctaactccaatcatgtaagtttcaatgtccaataacctgaaaagttatgaaaacatgtggtaattaattttgttgtgaatcaaattagaatccttattaaaaaagaaaattatttattcaaaaaaagctcgtagatgaaatgggcctaaagtctactaaatgggctgattgaaggaaaaactcgaactaatctaagatctttgctcttgagagagaacgagagaggcggccatg

SEQ ID NO: 34241 - DNA, 3000 bp, Unknown; identical to SEQ ID NO: 20670
  misc_feature (1)..( 3000): 2750-1469P.txt file - cDNA_ID_3075971; gDNA_ID_1620769; Annot_ID_167433

SEQ ID NO: 34242 - DNA, 3000 bp, Unknown; identical to SEQ ID NO: 15679
  misc_feature (1)..( 3000): 2750-1469P.txt file - cDNA_ID_3075975; gDNA_ID_1620769; Annot_ID_167432

SEQ ID NO: 34243 - DNA, 3000 bp, Unknown
  misc_feature (1)..( 3000): 2750-1469P.txt file - cDNA_ID_3075981; gDNA_ID_1620769; Annot_ID_167426
gactttgtgcttacgatgataacccttagcagatgagagatccagttcacagccatcaatttggcaacgcgggactggcatgctctgaccacacaatttggatttcccagcgacaacagatggagttaacaacttcatagaaaccgctgaaatttcattattgtttctaccccagtattcttcagagtatgtccgctttcctagttttaaacaaagatctgattcagctgaggcaacggatacctcgagagctgtgggagccttcacctggacaaagtctatgttgctgcaagaatctccaggggaactttctgatgcaagcttgcatcgtttggcttcgggagatgatgagttgatagaggtcgactgtgagcttttcgatacagcagtgtgccagaagctggtggcagagccactactgactctctcaaggcctgagaaatgtggaactatagattcaattccttcacctttttcaatttcccactcagtaggtagctgtttgctgtcatcttcagtccttgacggattggacatgatcaaatgctcccaatcccactgggacgaagataccatgttgcagtccattcacgatatgggttgatttcatagacctaccaccagagccagagcaacaaatcctacaacaactacaagtttgcagaactttgattagtaaatgagaacaaaaatcatataagaaaagactagacaatcaatcctatatataactctggctaggcaaatagataccttatcgacgacaccctcaactaccaatactataagtaagatagaaaaagaaaattcaaaattccaaggaccagacaaggcttatcagcgtttattgctctcacccttttatcattaacttgagcaagagaaacttttctatgtttcacccagaccagcaaaaagggcaagagaggaagggtattacttttcatcttctcatctccatcacacaaaaactaagtggcatttattgaattggtcctacactcctcaaatcaaaaatttccccaaagtatctatcagtaacttgtcaagaaacacgatgtacacattgtaattgcaaacccttccctacccattcctcctttgtacttggagaaggttcctaactaacttcctcaaaaccaaagactaaaaagcttacaactttacacattgaattaactatatgtcaaagaaaacggcagcaagctcagccattagtggacctatctgcagcaataaagattgaacgataaaaaaagtgacagtaagttaggttacgatcccaatcaaggtccctccctcgcaagctagggttttcgatgaaagcaaatggtccccccaaaccaataagttcaactaactaacgaagagattaaaaaaagttaccaatgtttcaatcaaattcgtcattttgacaaattctctatacctagagaccattcaccttgaaggtaattttactgattcgtcgatctataactagtctaagaggcataaagctgaattttacaataaataacgaagacgcccaaatctaagaagcgcaagttttggaaaaatttgagggagtaaagagtacaaaacctcaagtatgagagggccgaagaaatctccggacgtcgatgatcggagaagatgctattgactaagaaatacagtgaaagggacgaccatacaccaaaatcgcctgaggaaaatcgaatgagagtagctcagaggagtctttcccactatttttcttcaactgttttgcctttttttgttttttgggctttcgtatttattttggtgtctaatttttaactaatactagtatatgaaacgaattatatttttaccaacacagattcgattctatatcgaaattggttatttatttcaggcctaatatgtaggtacaatcatatggacaacaaaatgatgaaatatttgtaagttgtaactaattttaggctctctaaaattagatgtaaaacaaacaaaaaatgcaagtaacaacattataagtaagaaaggtcaaatttatattgttggatctttcttcatattcttatcggtcgctaattaaacatgtaaaaagccgctgaaaaatcgaatttgtatgttcaaaacattaattcaaaaaggctgcaactcttttcatttgttagagaacctagtacctaccattcatacctagtacaattcgtgcaagttttaatatctataaacctctcttttactttcacaagtacactaatactaatattttagagtgtccatccccgagaacatcacaattaaatgaaaatttattagacgtacgatgaactgactaagattagtttaggggaactatatattttaaattaaattaaaagcattactaaacatgaaattatgagtttggtcgatataccgttagtacatagtacataacacatagtacattccattcatttgtacttttagtacacatggctctttgatagacacaaattttagcttttgtggaattacgtgagtcttgtttgctgtgatgatgtcaagagaaagtgatactaaaatatagtcatggggtttttacagttggacgagatttttacacattttgctttgtcattttacaaaacgaagtaaatatgtatttccaactataccattatcatatcatcaccaagaaaatccaatgttctgagattcctcttcatatccaccaaaacaatcatattcaagaaaaactattatcaatccgaatattatgagtcttcaagaccatatatgtgcgtttttgtggaagaccgtgcatcgtttgagatgccacactctatgagcctgcttcgaataatcgaatccttaaactctcactaaaaacacggatcatgtattcatatccaatcaaaatctatccaccaaagaacacaatgttcatgaacggtctaggaaaaacagtccgtaaaaccaagctctctataagtttataggttactactactagtagaaaattagaaatctaaaatg

SEQ ID NO: 34244 - DNA, 3003 bp, Unknown
  misc_feature (1)..( 3003): 2750-1469P.txt file - cDNA_ID_3075983; gDNA_ID_1620769; Annot_ID_167424
actaaaatgacaaaaacatctcttatcgaacaaatctagtaaagagcgttcaacactaaaaagagaaaacaatgtcttacggcagatgatacaaacactgcaagcatctcaaactatttagagttgagacaatttaatcaagaaggtggcatatctacaactacaacaagatcacatatgagcatagttgaaaaaaactagcagaatcatggcaaagcagtttcccaatactacattcacgaagtgcaaggagatagaagctccacaagacaaaatctaaatgacacaagattacatctactgatctacgcaatcatttgggggaaacctcttttatctccaaccttatcacagatctatcactaaatgcatcagggagggtctaaaatttcgagacaattccagatcattgaagcttttagtgacctaatacacacatcaatctacagagcagtaaggataaaaaccctatcgtacatgatcaacagcgaggaatacaaaggaaacactaaaaatcgaagtgatctaaacccaagggaaagagataaggcaaaaaaaaacctggctgaacttgagagcgtgttgttcaccagcgagctgaagattgccggagacaaagacgagcataccaccggcgggaccagaaggctgacaatcgacggtggtgatgttgtgcttacactgctggaaagggaggccggtgagcttagcgacgatgttctgagagccctggatcttctggccttcgaaggtcaacatggatccttcttggtatagagaaaccaaccctggacgatttgcatcgaaggtggagtagtagtgctcaacgaaagcctttgcaacagcgtctggatccatctctttcttcgtcttcctttttgatccttagctcttgcgtcgtgctttttcaacaggcgagagaggatcgagagggttagataatttactgaaaaattatacgaatggaccaagactagagatactgaaatgagtgtttgacgatactttaaatgggccttatatttttcaagttgggcccgttaatatatgggacaatcaacagtatagctcaattggtaaattgactaacttcatttgattcctacaccatttaaagatttttaatcaaattctgatataactaagataatattttaaagcatttaactaacatggaaaattatgaaatgaaatattaattttggatagaaaatttaaaacatttatctttgtgaaataaaaagaaagtctcttataatataacttgtaaagtaatcctttaaattctaaaagatctaaaacaaaatgagttaaatcctatgtctatgtgttgaatctggaagatcgaggtggaagaaaaaggatcatgattcatgggtgagagaacaaccgttgattggtgtgtttcaactttcaagcaatcccattttaaaaaaataaatttatgtaagcaattgcaaacaaaatgaaatgattatgctttaagatatcgacacgtgtaaaacagatgacgtaccaagaaaataaatgattctgtattttgttttagccatttgttttttctttaaaggaaagtgtatgttgaaattgaaaaaacaaaccgagttatatatatagagttatttgactaaagaaggaagctttggttaaactaacttgtataattcttttgtgtagtttagttttgataaaatggccaaacaattttggtcactttaccaactactgcaaaaaaaccattttcataataataaattgtaacacgccttttatttttattattggagggtgagaactgagaccatatatgcctttgttcccttcttgtgggtccctttagcctttttttttcttttgcctgcgccgtttagtgttttttcttttatatataaatagaggtaagttattttaccaatcatttggtgttattaatagtagtattaatgaggttctaaacttgtttataaaaatcagatcttactaaacaaactcaaagaatctcaactatgaacatttttcttctagaatcgagttttaacatcatcatcagcaggatataattttttgtgtttgaattttatctgtattttttttaggagtacataagcagcttaagattaaaatatatattaatggaagtatgaatgaaaaaagaaaagaaagataatcagataatagagagagagagagagagaaggaagcagacatttgtcttccaccatattcttctcatcttttccgatgatagattcttcttcttcttcttcttctactactacttctgctcctctttcttaagtttctccatttgataattcactcaagtctccagctcctcttcttcttctcgttgctttattcgctctctttcactcatcatcatcacactcaaagatttctgttgtattggagcaagctctagcgaattttcgtactccccttgtagaattttagtttcctgttttagatttcgaggaatctcgctttggaaactttaagctcctgttcaaagtttctacctttgtttattttgtttttgttttcttctctcttatctttcgtcatctttgattaagtaaccactttgatctctcaatttcagcctttgggttgtctaatctgacacgttcctctgtcttagctttccttttctcttctcgtttgtgggaagcctacaaggattaattattaaatacccaaccccaaaaaattcttcctttttgattctctgattcgtccctttttgtacatggtttctgtttggttgttagagcttcttgctgagttgaattgagctggttgcaatcactctgtttcttgggggttgatcgtgtattcaagtggtggatgagtctgttccatgtgctagggtttggtgtcaagattgggcatctcttctggatgctatgctgctggtttgtttcttggttcgttgataatgggatcgaggacaagtctggtcttttagttggctctgtcggtgatcttgagaagactaagatg

SEQ ID NO: 34245 - DNA, 3003 bp, Unknown
  misc_feature (1)..( 3003): 2750-1469P.txt file - cDNA_ID_3076048; gDNA_ID_1620770; Annot_ID_167504
tgatcactcacaatgtagaattgtcccaggtggtacctaacgacacaccgtgcttctttatgatcttcaccgcctcaagaaggacctcttgttgtgtattgtatagctcttcttttccctgagacaaatgaccaccattctaatgtaaaaagatcacatcaagctactaaactttgtctacatttgacgaagactgttacagagactaaagagagagtgtaccatgcgtatcagattgcaagactgttacagagactaaagagagagtgtaccatgcgtatcagattgcacccaatggtaagttcagcgaaagatttttccactcgcgataagtaacagtgtggagcttcttttcctaagaaaacttttgtgttggacctcaacatttccttgatttcatttgatatttgaggaatcatatccaagtcatcgatctgcagtgggatcttggatgctattgctcgccactgagcacgtgacttattcacaaaattaaatcattgcgagtgttaactcagtgtggcattatgaaagctagagaattaaatcattgcgagtgttaactcagtgtggcattatgaaagctagagcattagcttctgcaatatgaagatgaatagtgagaaacagataaactaacctgactcgaaaacagtgaattgggtaccaaaaccggaaatttttctgcattcaacaaagatgttgtcgtaagtcccatttcaataacttgaccttctacggatccagcctgcaaagtggggacaaggaagacactatatcttgagaaaaaagaagagagcagaaaagaaaaaaaggttcaactaactttgatagtatcacagaagagagcagaaaagaaaaaaaggttcaactaactttgatagtatcacccatagagaaaggccgcgagaattgcattgacagaccactcagcacattaccaaggatatctctggcagcaaatgcggtggctacccctgaaaacgcaaatcaaaattggtatgttatgagcaaatactatagaatcagtaggatatctaaaaatgttagcaacccctgaaaaagataagactatatgcttgtgatggccgagcaaaacgactaatatgaaatggagaacattagacagacctccaactcgagcaaaacgactaatatgaaatggagaacattagacagacctccaactccaccaactgtcaagatagattgaacagctacaccacatgcttcagcagaagccatcaaaccgatagcgaaaagaccaacagatgatactttgtctaaagtcaataccttctccctatcaagcccaccaaaactcttagccgacaacattcgggtaatcacattggtcttccaccgatataggaaccacacaagtgagagatggcgccaccattgcagcactgcagcatatcacattcatcaagtctatcttggcgccaccattgcagcactgcagcatatcacattcatcaagtctatctattttctacaacatacatgtcaaaggaataaagctagagagactcacatttgtgcaaaagcaatgaaggtcaccaagtaacgagcaggatcctctaaagctccccaaaagcttttctcataaggaacatcttcgttagagaagccaacgggaagcagtttagcggaactttgcatagcataagtgtgaaaccttctaagaaacaggaactataacatctttaagataagggttagagtcaaggaactgctaacaggaactataacatctttaagataagggttagagtcaaggaactgctgaacatgagggatcatctcatcagagacatctttagtcttctttgcagtctcagtaacagcatcgacactagtctgcaacacatctttagctttctcaacccaatcattcccattcccattcccatcaccagagccagtaacaccagaggctacaatacttccgaaatcatcagatttggagctgaaagctcgtgcgtacgttcgatgaaaaggagatcatcgaaggagaagcttttggtccatcaagaagttcgatgaaaaggagatcatcgaaggagaagcttttggtccatcaagaaggtttccgcaagtaaaggccctggcatgagagtttaggagaccagaacacgattttgcagtggcatgaggttttattgatctttgaattgacttgagaagcgataacctaactccggccattgatctacaaatcaaaatcaaaaatcaggatttagaagtcttaatcacattcttaaccaattgaagaagaacacagtgtaattgaagtcaatggaatgtgaagagatcatagaacttgtatattacctgaattgaagtcaatggaatgtgaagagatcatagaacttgtatattacctggagagacttgaaggtagctagattcttagccaaaattctcgctgagagataaagaaagaattctaaattttgcttggcaaagagggaaagaagatgaagaagaagaagagacaggtttatttcgtcaactctgcttcttattcggtaacatcgacgtcgttttagtcaccttcaacttctgggccttttgggcctaatgatattaagaaacacacacacacaaagttgtgaatttgtgaatttacttaactattaagaaacacacacacacaaagttgtgaatttgtgaatttacttaactacgtacatatatataatcattaattaatcacggtgtttgtcaaatatatatggttacaaattcaatatgttttggacaaaataatatgtgcctaaatctgcttataaatgacaaaatatatacaaccactaaaaatagaagagatatttatcatgaattgtactccaataaaaaaggtattgactttagacaaagtatcatagatttgtgtgaaaaacgctattttcagttattaattactgtaatcatatagatttgtgtgaaaaacgctattttcagttattaattactgtaatcattaatgttgaaatg

SEQ ID NO: 34246 - DNA, 3000 bp, Unknown
  misc_feature (1)..( 3000): 2750-1469P.txt file - cDNA_ID_3076055; gDNA_ID_1620770; Annot_ID_167497
gttcccacttggtactcatacccgagaatctgaaagaagaaaatccaatggctcctttggaaagtccagcaaccgcttcttcaagcgaagttgagagttcttctgaagagatctttaagtcttcttctgaagaaagcaaacccaaagatcctgtcacagttccttcctctaaaaccctaaaatctccttccgccgctgtgaattctaagacagattcttctgatgactaaaatctccttccgccgctgtgaattctaagacagattcttctgatgactgctgaatcaccggcggtgaagtcagggaagaagcgagctggtgaaggaagcacctcaagggacatgcatgtcaaaagagttaagaaagaggacgataacaaaaaggcgaatcctcagagagtatggagtgaagaagatgagatctctcttctacaggcagtgattgatttcaaagctgagacaggtacaagtccttgggatcataagaatgcgttttttgatatcgccaagaaatctataagctttgatatcataagaatgcgttttttgatatcgccaagaaatctataagctttgatttttgttaaccggaagaacaaaagtggtgaatcgaatcatgataagaaatgtttgggtttggctgttttgatttggggatctgatggtatgaacgttgaatctcctgtgaagaaagatgaatctattcttgttaagggtaaggctaatagcaaggagaagaaggtggagaaacctttggttatagaagatgagcaagtgattcttggagcagattcggagtggtttgaggagtcttttcttgttccggttttcttggagcagattcggagtggtttgaggagtcttttcttgttccggttggtgtctctggagactaagaagaagattcaagagaagatgaaggttgtggacgctaagaaatgtgagttgttgttggcggagatggatgttttgaaggatgtgacttcggtgcttgctcaaaccaactaagaagaagaagaagaagaagctatcttagggattgtatagggttaatctaaggatgtaatgccctcttttgttatctatcttagggtttatctttctatctacgtttatggatttttagtcttatctatcttagggtttatctttctatctacgtttatggatttttagtcctaacaaaccttttggtcgatggttgtaatgaacttttaggattttgtaaatgtgcttctttttttaatgtctctctactcaaaactcatgaccagagttattacaaaacaaagaaacacacaatagaatggattcacaaacatattcaacaagagttctaaatagcttatatggtgataggttcaacctcattaaacaaaatggattctgaaatgatgtttgtaaattgtatatttattgtttatgataaatggattctgaaatgatgtttgtaaattgtatatttattgtttatgatataccaaatgcaaccaaaataaaacatatacatttagttacaatctttcacagaagttattatgtctataataaaaaaattaagagattctgcatcttgaaactgcaaagtaggtgaggaaataaaaagaaacataaattgtgtttatgagcatgcttgttgttagagtcccaatatgtagtagagtagcttgcaagaaatcagagttaattatgcgtttaagagcatgcttgtgtgtgtaagtgtttcaacagagttaattatgcgtttaagagcatgcttgtgtgtgtaagtgtttcaaagttttattatcaagacatcatgctcttaaacgtgttcttgtttctctctaaagaaaacaaaagcaaaacagagtgacaagagagtgagagtgctgacctcaaaagaatgttggaagaggtagtttgagagtgaaagtgtgattttcaacagatatcttcctcacgtagaagaagttgaatggttaatatcaatattgttatgtataaccaagaaagctatagaattgcactatgatattgtgaagctgcatgtataaccaagaaagctatagaattgcactatgatattgtgaagctgcgttagtccgcgtacttgtcttaactcttatgcaggggtagccaagcaatatgaaacatttagtgtggcccattttttttttttcaaattctttaacaaaaattatttacaaaatggccccaattttattgattttaacgataattggccctaaattttaaaacctttcaaaataatcttggattttttgtttttttgtatgttgcccataaaaccgtcaggtcttaggtaaaacatctataaattaatatgttgcccataaaaccgtcaggtcttaggtaaaacatctataaattaatattgaaaccagtgtaagaattgatacaaatcgataaattaataaaataataactttttgtgaaaatcatatgtaaatatttggtcccatcaatattataaattcactaatttatatatatatatatatagatatatactaaaatatgaatatagtattcaatttgtattaattctttgtagaatttaattctaatatttttactaaatcgaaaaatttagttttggtttttaaacttgataattgtttaatactaaatcgaaaaatttagttttggtttttaaacttgataattgtttaataaccttttttgattgaatattataagaaattacataatttgtaaaatttctttataaattaatatctcttcaaattaataaattttatcaatcttaaaattattaatttatagagattttacctaatatgcatttttaactaaaagtcataatgttatatattttatttatatttagagaataatatatatattaaaaaaaaaaaaaaaaaaaggttgacaagtggaaatatgtgaccggcaatagtaagtaaaaaaaaaaaaggttgacaagtggaaatatgtgaccggcaatagtaagtttcccccaagcgaagaagcgatg

SEQ ID NO: 34247 - DNA, 3000 bp, Unknown
  misc_feature (1)..( 3000): 2750-1469P.txt file - cDNA_ID_3076071; gDNA_ID_1620770; Annot_ID_167485
aatgtttgtgtgtaaggtagattgagatatatgaatggtcaaatcggaaataaaattgtgtgtaaggtagattgagatatatgaatggtcaaatcggaaataaaaatttccgttacatgatttcgcgattaattactttttataattagtcaacttcgacgccttgtgtcgtcctcgattttaatgttctgtctttctctgcattcatagtttatcttatttcatttcatatccttacttcttttttctacaaacaataatttctagacgaattgaaacaaatttccaaaactttatgagtatatataggatatttttagtggcaaaggacgacttaaattgtaacgaaaagaatataggatatttttagtggcaaaggacgacttaaattgtaacgaaaagaatatcatatgaattgattacttaatgaagttaaatttttgaaaactctattagggacaatgtcccacatcggaagttgagtaggatcttaagtggtatatataagatatgagcctctccacctattgccaattagttttacgttggaagcccacagtctgatatggtatcagaccccgatccgcacatactcaacccgatccacatcggtccggcccaatacttggcccgccgatccatgcccaaacatatcacatcggtccggcccaatacttggcccgccgatccatgcccaaacatatcatatcccacatcggaagttgaataagatcttaagtggtatatataagatatgggcctcttcacctattgccaattggttttaggttggaaacccacactctaatatggtatcagagcctgatccgcacatactcaacccgatccacatcggtccggcccaatacttggcccgccgatccatgcccaaacatatcgagatcaatggctagaagaaccatcatctcgagggggcgtattagggacaatgtccaatggctagaagaaccatcatctcgagggggcgtattagggacaatgtcctttccatctattgccaattggttttatgttggaagcccacactctaataaactcaatacaaatactaaagttgcaaacaactatactatatttgcttgaagttctattgtgataggattttgacttacaaaaatcatattctatgtctacactatatattgtgaaaccggatagccataatatttacaaaaacttaaactaatttcagatataaataaatttaaatttcactatgacctagtaattatcaaatttcagatataaataaatttaaatttcactatgacctagtaattatcaagcgaaaccacacacttgcgggtaaaaataatgatgacaaaatgatatacattggaatgtagagaaagtatatacaaatactaataaatagaaaagggcatggaattgacgaggatcgagggaaagtgtggtgtggcagaaatgttattaagtgtgaaaacaactgatgaatgagcctttgcttaatcacttccatgcacaagtccctttcctcttcctctctctcccacttcatcgaactttgcgtcctaagtccctttcctcttcctctctctcccacttcatcgaactttgcgtccttaaccagattagatttaacttcgtttattttacattatcttcttcttcttattttgcggagaagacttgtacaatgacctcaatacgctgaagagttggattcactgcgagtgtatatgtgcatatagaaacaaaatatctagctatatgaccacttttaactctaaatatgggtgtaatatgccaaggactttctggagatccaccacaacacacattcaagttcaagttctgctgcttttaggtctatatccaccacaacacacattcaagttcaagttctgctgcttttaggtctattaagtatattttcatattgttccctctttattttcatgcttttagttgatattttttttgttattgtattatcattagtgcgacgacacaaagtcacaaaccatgtaacaaaatgcttaaccaaaatagaaaaccttaacaattccaatatattttctgttattgcattatcaattatcatcaaatttttttccactgttgcattatcatcattgcgacgacacaaggtcacaaaccatgtaacaaaatggcattatcatcattgcgacgacacaaggtcacaaaccatgtaacaaaatgatattatcttaatttttggatgttcgacattcaaataaactcctaattaaaccctatagatatggttaatcttctatacatgtgtcacgtacgacacttattagccaaattgaagttttgttttttccgcaaatatataagcggtttaaatagttggtaaaaaaaaaaaaaagttagcatgtttgtcgtatgtacatgtttgatgctgcacaaatcttgtcgttataaaactttgaaatctttatatctatgatgctgcacaaatcttgtcgttataaaactttgaaatctttatatctatagtcccaaagtagagtttttatctgattatatagaaacaaagactagttccggtttgatatatagaagaaagaaaaaggatggataggaataataaagaagataaaccggttcaaaaggtagtaaatgagaatgcaggtatgcagcttatctctacaatggcctcttcatcacatgtcgccaatttgtttaggtacagtgtctcttcatatttacataaatagatatctctctctctctctctctctaagtctcttcatatttacataaatagatatctctctctctctctctctctaacaacttctggagaagtacaagacatttataaagtactgctcatcacccaacactaaacacaattgtcaaaagggtgtggtggaaggagaatctacttctatctgaacatcgatcagtcatatcttttcaatcaaatcaaagccctcctctctctcttactccttttttgttttaaatcaagaaaaagactccatg

SEQ ID NO: 34248 - DNA, 3000 bp, Unknown
  misc_feature (1)..( 3000): 2750-1469P.txt file - cDNA_ID_3076079; gDNA_ID_1620770; Annot_ID_167483
gcatgtccatgtcgtcctcctcagctccagcttttccaccggaccacttctcatgtccatgtcgtcctcctcagctccagcttttccaccggaccacttctcttgctgtaaattttggattattcttatatctcatctcaatatttcaaatttataactctagctagggtttcacatgaattactagttaattaatgtgtgatattaattggcaggtgagtgttcctccgagtagtttgttcaagacggtgacggtcagatgcggccactgttcgaaccttttgtcggtgaccgtgagcatgagagctcttcttcttccatccgtttccaaccttggccattcctttttacgagagctcttcttcttccatccgtttccaaccttggccattcctttttactcatcgaaacaaattagggttctttcataaaaaaaacagagagtaataattagggcttttcttctcgagaaacgcaaaattgtgaaactcaatccaaaaatgtttaattttgttagcatcccgggatagatctaagtagtttggcaatggctagttaactagggtttctttcgaaaacatcatatcaaagtagtttggtttgattagtgttttaagttttttttgccaattagtttgctgatttcatttatgattagtgttttaagttttttttgccaattagtttgctgatttcatttatgagccatcacgcttcagctcaccacccgaacgagcatttggttatggcgactcgcaacggaagatcagtggatcatctacaagagatgcctcggccaccaccagccaatagacgtaaccttccatcttctactctttatttcaacatcttcatatatatatatataagaaaacaaaaaccctaattcacaaaaccttatccattcatttcttcaaccttttatatatacactccaaagaatctcgtttgccattcatttcttcaaccttttatatatacactccaaagaatctcgtttggacttctcgcatgcactttttttttggtcagaaaacaatttcgacaacaaaaggaaaattaataagtgatgtgtttatcccccggaaatctagctaaacctatagatgccaactgatatagttttgggggtagatcgtaagaaagataatgatgaagtgatgatgataacgagcaaagtgagagggagagggagagagagaaaggaggaagagtcgaagagtgattgtttttttttttttaattgtttttaaaggaggaagagtcgaagagtgattgtttttttttttttaattgtttttgttttttttaacaaaagggtttgatttggaattaaaattgaatatgttctgtttgtttgtttgtggaaaagcagccccagagaagcgacaaagagtaccatctgcatacaaccgattcatcaagtaataagtttattcctttgcttaaaatggcataattaaatttccctaattaaccattttactcatataattaagggtcgatagatgtgacagatttgatttcattatatgatataaaaataaaaattcgatagatgtgacagatttgatttcattatatgatataaaaataaaaatccacagagaagccttcagtgctgctgccaaaaacgtaccatttctttttttaatatataaaactaattttctatattgcattatatccataatcatacaatctcattttagtctttatgaattgaacctagctagattattgtggagctacattgatactcacattgctttaaattaaaaacataaaacaaaatagttaccgtaataatccataattcataagctttatccagcatacattagctaggaccgtaataatccataattcataagctttatccagcatacattagctaggacttttagtctggctttgtattcgtatatttttgaccaagtttttatgttatgtataagataaatacacattaatgttaaaagagctaagtatatgatgtaatatgtatgaaacagtgggctcatttccctcacatacactttggactcatggctgaccatcctcccacgaagaaggctaacgtgcgccaacaggttacttactactactacactatatttatttattcaaatgtatataatcaggagcatgctactactacactatatttatttattcaaatgtatataatcaggagcatgaaggaaggagaggatgggatgatgggaagagaagggttttacggttcagctgccaacgttggggtggcccataactagctacgaagactttcccaatcttttgtaatcttcaaaatgtggttactttcagctcaaacttaactttcttattactattttatgatatttgataatcgatcaggagaccttttttttttttcttaaagaaattttcggaactactagaattttctcttggaattgaaaatatttaaagaaattttcggaactactagaattttctcttggaattgaaaatatagctaagctagctaggctttaccatacgttaatgatactgtctttttctctttacaattccatattcgaatttgatttgtatataacatattgggaagaatcatcaatatgtattcagctcaaaagaattcaacaaaaaaaaatgcctattatcaataaaaattcactgggctttagaaggcccacaatagtataatggatcctttttgttgggcttatttcagtcagggaacaatagccttgattttgttcctttttgttgggcttatttcagtcagggaacaatagccttgattttgtaaatctagttacgtggcatttaatatttaaaactacaaaatttaccagtcttggctcaaaaaaatatttattcacttttcttcttctctgaccaaaatcaaaatttgttcgattctcattcttcttctcacagtcgtaaaccctaaaaaaaaaacagagaaatcaaatttcaatctcgaaggatctacaaagaagcatg

SEQ ID NO: 34249 - DNA, 3000 bp, Unknown; identical to SEQ ID NO: 5190
  misc_feature (1)..( 3000): 2750-1469P.txt file - cDNA_ID_3076083; gDNA_ID_1620770; Annot_ID_167481

SEQ ID NO: 34250 - DNA, 3003 bp, Unknown
  misc_feature (1)..( 3003): 2750-1469P.txt file - cDNA_ID_3076097; gDNA_ID_1620770; Annot_ID_167469
ttctcatagcccatattgttacacagctgtagaagttataatgttttgtctgctcttgcgatattgacaaacatacctcgtatgtcaataatgttttgtctgctcttgcgatattgacaaacatacctcgtatgtcatatgatcagtatccatccttaattcttggtagggatcagtatccatcctcaaaccctatatcaataccaaacatacagaaactcaggatcaaacaagcataaacccaattcaaatccagaaataagaaggaagatgctcttagtacgactgcaataaaaatttatatcatattaacaacaatttagctatggtttaattcgaatcaaacctataatatattaggaaaatttaaactaaaaatgtggataggaatcaaacctataatatattaggaaaatttaaactaaaaatgtggatagtttggtcaacaagagaggagccaggcgaatatattaacaagtgcgcaatgtgcatacattccaaaagagttgggtatcagatcctttttctatgaataacttcattcatgtcccgttacttttcccttacccttgtttctttcgagagaggggaactacaagaagcaaagaaaaaatcgaattttcccggaaataaaaacacaaaataagaagctaagaaattaggtagtttaagaatcaacgaagaagaacaaaataagaagctaagaaattaggtagtttaagaatcaacgaagaagaagtgaacaagccagtgaaatcttgttcccttatatcgatatccaaccttgagaaactcagaatcaaacaagcataaactcaagtcaaacccaaaaatatacaaaaaccctattctattcgagtaaacccttattagaaaacaaaaactaaatcgatatgaaaccctaatctattcggaaaaaaaactgaacaaaaactagtgtggcttgattacgtcgatggaggtggtctgtataaccttctgccgatttgtggcttgattacgtcgatggaggtggtctgtataaccttctgccgatttgacttctttgattgacatatcgaaaataaatggaaagtaattattacaatcatacatgcatgtcaaataaaaaaataaaataaaaattccatttatttaatataatgttcgtttgttttcgagatgtaatacgaacgtgaactagtcaatgggagctaattgagaaaaaataggaactaaaaattaatcactaacaaaccctagaaaaggcatagcttaatacaaaaaacaaatacctgcaaaatcttccctagaaaaggcatagcttaatacaaaaaacaaatacctgcaaaatcttcatcgctactgttaacagtttcttctcttggtgggattttatttaaatcaaacaaaaattcatctccatcatcactataaacagttttttctggaatttcatttaaatcaaacaaaaattcattctcttcacttagaagtgacatactcaaataaaaatttggaattgtgaagaaaattagaaatcatttttttttaaaaaaaatttttgaaattttttgtttaaaattaattatgtaatggttgcacaaaaaatttttgaaattttttgtttaaaattaattatgtaatggttgcacaaaaaaaataatcaattatgtaaaaagttgctccattttttcaagtaatttgggttgtttgagagtttaatgcgtaacgtttaatattactctttaattgttttaattactttacttgattgtttttattaaataatagttttgttaattactgtgctaaacctcaaaacatctgatatattgagtaatttatatatccaaatctctcataaaacctttgaaaaaagctattaaaaaaaatctttttttttttctctcataaaacctttgaaaaaagctattaaaaaaaatctttttttttttgagttatatatcttgatactgtctagcctaattatcaatgcttaattttcgtacttaaatactatcatcaattcatcatggatttcagagcggatactccaatcttctttgcattttatcttttttttaccgtttaaggttaacataaaaaaaaatatattctaaattttttttttactgaaaaaagattctattagaaaaattttgtcttcttgcatattaaaaatctaacctatattttacatgaacgaattttgtcttcttgcatattaaaaatctaacctatattttacatgaacgtaaatagatgattttatgagtggcaaaaacgaactcaccataaaaccattagtaacacatgtagtacaaacccaatattgaataggaaccgtactacttttctaattatttaaaattgcaggagtggtatgtcttggagaatcgaggagacacgcatcgagtttaaatgtgtggtcggagagaataaaagtgtgtgcagaacgagcttcttccttttcgtcttctccgccgcaccctttgggtcaacagtacgagcttcttccttttcgtcttctccgccgcaccctttgggtcaacagttaaaccctctccattacgcgtgtgaatatacacatataatattcacattatataagattatgtttcataacgtagatcctgcctgttctatatacaacaggttttggtatgagacgttagatactttaattcatctggtcaaatgcctagctagaataaatatctttaatcacgttcaaaattgattttatacgaatacatgtaaccttccttcaaactctagctgctcatcaattgaattaacaaacaatgtaaccttccttcaaactctagctgctcatcaattgaattaacaaacaaaaacaaatccaagtcaagtgatcttaaatccagctcattcttattcacgtgccatgcaaaatgatgcatacagtatatataagggacacacacaaagacatgtaaatattataccatccaccgattaagctacatatcctctcagttaattctctaattcgccatg

SEQ ID NO: 34251 - DNA, 3000 bp, Unknown
  misc_feature (1)..( 3000): 2750-1469P.txt file - cDNA_ID_3076113; gDNA_ID_1620770; Annot_ID_167465
gataatataattgtattttgattgttatatatatgatttcgcccgtggtataccgtctcgtattactatcgactcaaacccgtcctacaatctaatctcgttcagtgaatatcaaacatatcttatggatttcacccatgatatatcgtcttgtatttctatcgactcaatcttatggatttcacccatgatatatcgtcttgtatttctatcgactcatcatttttgtttaataatactttaatcgaaaagatatataattcaaatcaatataaaagttttctttcaaatggttatttaattgttctaaagttcatatattataatactctaaacccgtcctaccatctataccattcggtgaaattaaacattattttttattttttgttttaataatacttttattaaaagatttataattcaaaaatcaattaaaaagttttctttcaaatggttatttaattgttaattcaaaaatcaattaaaaagttttctttcaaatggttatttaattgtagttcggtgaaattaaatattattttttattttttgttttaataatacttttattaaaagatttataattcaaaaatcaattaaaaagttttctttcaaatggttatttaattgttctaaagttcatatattataatattctaaacccattataccatctaatccagttcggtgtaattaaacattattttttattttttgttttaataatactttattaaaagatttataatttaaatcaattaaaaaggttttaataatactttattaaaagatttataatttaaatcaattaaaaagttctaaacgttttttccgtgaaaatatttaataaactttaaataactaaaatatttacctttaataaagtatatattttttattggtaagggtttaataaagtataatattaataatgtcctaaaatttctctttttttaaataattagaattgatggagatatattagataaggaaatcctaataattaggaatattaattaattgataataataaaatgtcaatagcattgagttgtaaataagtctcttaattgataataataaaatgtcaatagcattgagttgtaaataagtctcagtgtgtcacactatgttacgtatgttcctttgctagaatcgagtgaatctttgaaagccagagaaaacgacatctgaattatgtaaggttgaaattactttttggatgcatgaagtaagatgccattgaagaatacttcaattatgtatataaacttactgtattgatgtatttctgtgatttaccattaaagaacaaaactaatgcaaccattacatgatgtatgtgtgttagcatcggttcctgtatactaatgcaaccattacatgatgtatgtgtgttagcatcggttcctgtattgagaaagccttcgaaagtgattcccggtccgaaagctaagcccagaccccactcttctccctctgtgcctttcttctcaagctcatctctgactttgtccattatgtagaagatggtgttgctgcttacgttcccataatccatcaacgcccttctgctgcattccagcttttccggcttcagcttcagctttgtctccagcccgctcaggatggctggtccaccaggatgaactgcccagaaaaggtcagcccgctcaggatggctggtccaccaggatgaactgcccagaaaaggtcactcctccacgttgtcttcgatcttctgagggaggtctcttcctagcttgaaggttatgccctcttctgacagccgcccgtcgatcaccccctgtgtttggggcaggaactgctgcatagcacagtgaagctccatgaaaggagattccgactctgtagggtctgctccgatgatcagggcagctgctccatctccaaagagtgcagccccgactaagttgtaaggacgagctttgttgggtgggcggaaagtgcagccccgactaagttgtaaggacgagctttgttgggtgggcggaatgttctcagcaatgtctttggccacgcgcagcccactcaaacctccatagcatccaagaaaatacagcatcactctctgaacctcgttgctaaggcccagctgtgccgagaggtaaagatcacctccgggcaaacggaactcactggaggaaacgtagacaagatgagtgatatcttccactgcccttccccattccttgatgcaaaccaagctcgcttcatatgccatctgcacaaccgcatcgtttgcatgcaaaccaagctcgcttcatatgccatctgcacaaccgcatcgtttgcggtatttgtgcagcgtctcccgtgacatgactgtgtagcgtgtcttgacagttgtgcttttgcctaacatcaccaagacacacaaacacgcttatctttgcacaagtgctcaaagaaaaaaagttgtcaaagaaagtagagggaagttacacaagtgttgcagcttgtctttgatagaaaggttatcgcatttgatttcacggagatactcctccacgagattctcctgggaaacaacattgctcggcaacggagatactcctccacgagattctcctgggaaacaacattgctcggcaatttgtttctctacccttgcggacaccaacatctttgtgagttcacaatgaaataagagacaaaggattagtgttggccttttaagtcatggattgtgaaaataacattaaaaaagggcatagaaaatgtgggtggtgtgtttgtaacaaacacagacaaaaaccctaaataaactcaaggatgacactttgaatgatccttcaaattcctcttcctcctcctccctatattcctgcatcatctatttgagtcaaattcctcttcctcctcctccctatattcctgcatcatctatttgaggcaaaaagcatcacaaattatacaaatgattcagtccagttataaggagcacgatcaacaattaagtagtctcctctgatg

SEQ ID NO: 34252 - DNA, 3000 bp, Unknown; identical to SEQ ID NO: 5193
  misc_feature (1)..( 3000): 2750-1469P.txt file - cDNA_ID_3076117; gDNA_ID_1620770; Annot_ID_167464

SEQ ID NO: 34253 - DNA, 3003 bp, Unknown
  misc_feature (1)..( 3003): 2750-1469P.txt file - cDNA_ID_3076125; gDNA_ID_1620770; Annot_ID_167461
gtgaagagacagacttgtccaaaacgcccaccacgaaggtgcatagtgagaagagtaagtcaagagatagacttgtccaaagaagagtaagtcaagagatagacttgttcaaaaagaaacagaagagaatagaagagtaagtcaagagatagacttgttcaaaaagaaacagaagagaatgcttggggttacactcacgaaggtgcatagtgagaagagtaagtcaagagacagacttgttcaaaaagaaacaaaagagaatgcttggggagatagaagtgtgagatagttctcaagctaagaaagttgtaaaagctaagaactagcatcaaatgatggatgaaacacaaggtagttgttgaaaagtcaaacacttggtgatgaaaactggtgattgttgcgaaaatcgtccaggattcctcgaccaggaatgaaaactggtgattgttgcgaaaatcgtccaggattcctcgaccaggacttgaaatcgtcgaggggaaaaaatcggttccgaggaatcgtcgatccggacttggaatcgtcgagaaaagtttaccgggtccgaggaatcgtcgagaaaagtttaccgggtccgaggatttgtcgaccaggagtggaaatcgtcgagaaaaatctatcgggtccgaggaatcgtcgaccaggacgaggaatcgtcgaccacttcatcgaccgggtccgaggagtggtcgagggtttgtcgaccaggacgacttcatcgaccgggtccgaggagtggtcgagggtttgtcgaccaggacgaggaatcgtcgaccgggtccgaggatttgtcgaccaggggttgaaatcgtcgaccacgtccgagacttcatcgaccgggtccgaggatttgtcgaccaggacgatgaatggtcgatgaaaatctatcgggttcgaggaatggtcgaccaggggttgaaatcgtcgaccaggtccgagacttcatcgaccgtgtccgaggagatttgtcgaccaggggttgaaatcgtcgaccaggtccgagacttcatcggatttgtcgaccaggggttgaaatcgtcgaccaggtccgagacttcatcgaccgggtccgaggaatcgtcgaccaggacgatgaatggtcgatgaaaatctatcgggttcgaggaatggtcgaccaggggttgaaatcgtcgaccaggtccgagacttcatcgaccgtgtccgaggagtggtcgagggtttgtcgaccaggacgaggaatcgtcgaccgggttcgaggaatggtcgaccaggggttgaaaggtttgtcgaccaggacgaggaatcgtcgaccgggtccgaggatttgtcgggtttgtcgaccaggacgaggaatcgtcgaccgggtccgaggatttgtcgaccaggggttgaaatcgtcgaccaggtccgagacttcatcgaccgggtccgaggaatcgtcgaccaggacgatgaatggtcgatgaaaatctatcgggttcgaggaatggtcgaccaggggttgaaatcgtcgaccaggtccgagacttcatcgaccgtgtccgaggagtggtcgagggtttgtcgaccaggacgaggaaatttgtcgaccaggagttgaaatcgtcgaccgggaccgagaattcgtcgaatttgtcgaccaggagttgaaatcgtcgaccgggaccgagaattcgtcgaccaggacggcggaatgctcgaccaggacgatgaatgggcgatgaaaatctatcgggttagaggaatggtcgaccagaagttggaatcgtcgaccgggtccgagaattcgtcgaccaggacgaggagtggtcgaggatttgtcgaccaggagttgaaatcgtcgaccgggtccgagaattcgtcgaccaggacggcggaactggtcgaccagaagttgaaatggtcgaccgggtccgagaattcgtcgacctggtcgaccagaagttgaaatggtcgaccgggtccgagaattcgtcgaccaggccgaggagtggtcgaggatttgtcgaccaggagttgaaatcgtcgaccgggaccgagaattcgtcgaccaggatggcggaaccctcgaccaggacgatgaatgggcgatgaaaatctatcgggttcgaggaatggtcgaccaggggttgaaatcgtcgaccaggtccgagacttcatcgaccgggtccgaggattcgttcgaaaatcattggatatgatgcaatgttttgtgatcgaatctcttaaattcgaaaatcattggatatgatgcaatgttttgtgatcgaatctcttaaaatacatcaataaagagtttaggatgtcaagtttgcatcaaatatgcccacggagccccaactagaccatgaaaatccgatgttgtatcaggtcaaatgacctagctagaggtgtcaaaaaattatgaaaatttaccagaaaataggatttagtatccttatgatgcatgccaaaaagaattttcaaattccaagtatttccaagagggaaaagggctattaagctatataggggggtgggtgttgagggacaagagggaaaagggctattaagctatataggggggtgggtgttgagggagtctgggcagtccgtggggaaccccctttttcggttcggacttgggtagcgatcgagggatggtatcggatatcggcacgaggaatgaccgaccgtccggccgccgggattttcgccggaaaacttttccggcgacttttccggcgatcggttttgttgcctttttccgagttttctcagcagttctcggacaaaaactgttcgaggcgttagggtggcggcggtataaaagtgtcggagttttttcagcttcgaggcgttagggtggcggcggtataaaagtgtcggagttttttcagcagttctcggacaaaaattgctgagtggccgagaagaatgggcgtgccatgcgtgggctgacatggattcttcgaggcctaggggtggcggtatataacttgttcgcatgatattaccgagatg

SEQ ID NO: 34254 - DNA, 3003 bp, Unknown
  misc_feature (1)..( 3003): 2750-1469P.txt file - cDNA_ID_3076129; gDNA_ID_1620770; Annot_ID_167460
aatgttttgtgatcgaatctcttaaaatacatcaataaagagtttaggatgtcaagtttgcatcaaatatgcccacggagccccaactagaccatgaaaatccgatgttgtatcaggtcaaatgacctagctagaggtgtcaatgccaaaaagaattttcaaattccaagtatttctttttttttggcaccgatgccaaaaagaattttcaaattccaagtatttctttttttttggcaccggtgtctcctcagacatttcaatgtctgttggtgccaagagggaaaagggctattaagctatataggggggtgggtgttgagggagtctgggcagtccgtggggaaccccctttttcggttcggacttgggtagcgatcgagggatggtatcggatatcggcacgaggaatgaccgaccgtccggccgccgggattttcgcccgagttttctcagcagttctcggacaaaaactgctgaatcgtcgaggagccgagttttctcagcagttctcggacaaaaactgctgaatcgtcgaggagaatgggcttgccttgcgtgggctgccattagttcttcgaggcgttagggtggcggcggtataaaagtgtcggagttttttcagcagttctcggacaaaaattgctgagtggccgagaagaatgggcgtgccatgcgtgggctgacatggattcttcgaggcctaggggtggcggtatataacttgttcgcatgatattacgtgtcatggcatgggctgacatggattctcctaggccgtttgggtggcgggtgtcatggcatgggctgacatggattctcctaggccgtttgggtggcggtatagttgtcttgcgtagaaataccgagatgtccccatgggcatcgattccacccgcctaggttggatgggcgtgcttcgttggaaagcatggatccgcctaggctgtcccgagtgtgagcgaggtgtgagtgtcgcccatgggcatcgacaccttgcggctaggaactggaacgagacgggtggcaaagatttcgagtatattccgagaattagcaaaccgtaacgaagatgttcttggcaaccatctttattccgagaattagcaaaccgtaacgaagatgttcttggcaaccatcttttgatgggagtccggctgttcgatagccggccaagggtgatgaacgaaatgtgaacccttgtctcgcctaggttggatgggcgtgcttcgttggaaagcatggatccgcctaggctgtcccgagtgtgagcgaggtgtgagtgtcgcccatgggcatcgacaccttgcggctaggaactggaacgagacgggtagcaaagttgttgatgttattccgagaattagcaaaccgtaacgaagatgttcttggttgttgatgttattccgagaattagcaaaccgtaacgaagatgttcttggcaaccatcttttgatgggagtccggctgttcgaaagccggccaagggtgatgaacgaaatgtgaacccttgtctcgcctaggttggatgggcgtgcttcgttggaaagcatggatccgcctaggctgtcccgaaggtatctcgcgcttgtacggctttggctcggattcgtccgtcttctttcttcttagccgagtacttcgtatgagtggtgatcggatagctagtgttcgtaggctccatgctcgcgccgtatgagtggtgatcggatagctagtgttcgtaggctccatgctcgcgcatcgaactacctaccacctatccttctcagttaattcacgggcgatgttacgctcgatgatgagttccggggcctgtgtttcgtacctaatttgaaggaattgttgagtttggtttacacctttgcccgcggcttctccttcgtggggaagtcgtgggcacaaacatcggcgcttgttcacctctcgtcatcgcatttgtaaaagttgtcgacggtgactcgaagtgattcagtcccgccaaagctcatcaaaagttgtcgacggtgactcgaagtgattcagtcccgccaaagctcatccgtccttcgggcaaaagatgacggtcaagacctcgtcctttctctctttccattgcgtttgagaggatgtggcggggaattgccgtgatcgatgaatgctacctggttgatcctgccagtagtcatatgcttgtctcaaagattaagccatgcatgtgtaagtatgaacgaattcagactgtgaaactgcgaatggctcagtaattctagagctaatacgtgcaacaaaccccgacttatggaagggacggtaattctagagctaatacgtgcaacaaaccccgacttatggaagggacgcatttattagataaaaggtcgacgcgggctctgcccgttgctctgatgattcatgataactcgacggatcgcatggcctctgtgctggcgacgcatcattcaaatttctgccctatcaactttcgatggtaggatagtggcctaccatggtggtaacgggtgacggagaattagggttcgattccggagagggagcctgacctgacacggggaggtagtgacaataaataacaataccgggctctttcgacctgacacggggaggtagtgacaataaataacaataccgggctctttcgagtctggtaattggaatgagtacaatctaaatcccttaacgaggatccattggagggcaagtctggtgccagcagccgcggtaattccagctccaatagcgtatatttaagttgttgcagttaaaaagctcgtagttgaaccttgggatgggtcggccggtccgcctttggtgtgcattggtcggcttgtcccttcggtcgctttgaagaaattagagtgctcaaagcaagcctacgctctggatacattactttgaagaaattagagtgctcaaagcaagcctacgctctggatacattagcatgggataacatcataggatttcgatcctattgtgttggccttcgggatcggagtaatg

SEQ ID NO: 34255 - DNA, 3003 bp, Unknown
  misc_feature (1)..( 3003): 2750-1469P.txt file - cDNA_ID_3076178; gDNA_ID_1620771; Annot_ID_167555
tgatctcattccaaaagtaattccaaaagtagttgatgttatatccatagatataacactatcagataatgtgtcaagttggttggaggaatataaaaccgatcattagacttgtagattacaagagcataaaggcctaacctatataataagtaaacacaagaaaaagcttaaatctctcttccaaacagttgatttcctaaggatcattctgggtaccacgtcaatttttgtttgcctaaataaaagaagaaggaaaaatacaaaagagaaggataaaaggggataactataccgggatggttctaattagcttagtagctatgtgggtggtctgatccaccggaatcgagttcttaagtacacttgaagccatggcaaaccgacaaaatgatgatgagaatcaaagcgacaatgatgccaaagactatgagctttatcttcatgttttcgaaccacaactttcttttcatctttgttccttgtgttctaaaatcttgtgcctattaacaaacagaagaagaagagcatgttaccactagataatagtgatgtagtgtctcttatactgtatttgagatgtggttattattaacctgtgagcgaaggttctcagttttgtctactaatagctcgattttctctccacggtcaaggacctgccataggattgaattgcagaaaacacattcagcttacaggtgaggagttgtcgatgaaaaacatggataatttagtctaaccttctcaatattctccatcataacacccttcacttcagtcacctgagccttaactttggaaagtttgctaatctcctcaggatgatccgcacagtactgcatgtgctccttcaatttagacctacattcattacaacaaaaccatttaaaacacacatccacaaagatggaattgaaaagaaatgctctgactaaaaatgttaaaagtacccgaattctttgttcaagctgttggctttagcagtggaagcttttccaccaccgtatctcttgttgaaatcctccttgactctctccaagaaagccattggtatctgcctcccagcagattcaataacaacaacacaataggctgcataacaacagagggaaatgagaaatcttattgtcacattccaactaaagcaaattcgtgcattggacaaccaaagctttccaaacataaaaatcttcacaataaacattccaaagaagccatgcataaagctgattaaaatcagaacgaaaacaacagattgcatatccaatcaagacatggcattgattagaagaaaatctgaatataacacaatgccacaagaatcgagagcaacgaatatcctacgaaattcaaagctacactgttctcgaacatttgatttcgaaactaagcattcataagaaaacagatgaaccaaggcataaacagagaaatacagagcaaaatcgacacagatcgggagatagagacttactgaagccattatcagcgagataattgaaagtgtgaccgtcgcaattgtaggtaaatttgttgttcgaggacggaagtttctggagacactgagcggcgacggaggtgaaattgcccttgaactcggtatactcggcgaggatcaccgtaccgcgagcgacgaagctgtagatcaacgattgttgtcccattcttccttttatccagatgagagaaagataaaaaaacgaaacctaagaacaccacaaaaatccgatcgaattgatgagagagattagtaagcgatgtaaaaatacacaagggaacgaggggtagcgatggagaaagcaggacgcagagatcggagaagagaaactatatgagagcgctggatttgcgcgagtaacagagacattattttccctttggtaacgttcaaattttgaatttttaaatataaaaagtaaataaaaagaaaaattcatcatttgtatagtcgaaaattgccttaataaactttattttggtaaataattcacgtctaattaataatagtatcttcatgtttttacaccacggtggctcgtttttcaattcaaatgtgaaatgtttatcaatgagcattttaaaaaacaaatatatatatatatatatatattatatattgattttttataaagaaaattgcgatgtgtaagggatatttgagttgttaaattttctataaattatatgttatgttacttaaaagaacgttcaattgataatgttgcaaaccttcctaccaaaaaaattaaaataatgttgcaaaccttttctttcattccaattcactaaccttctattctaaccacaacctaactacctaaatttcaattatttgattgttgatcaaaatctttaggaacacgttaaacaaattaattagcaggttctaaacaatgcagagcaattgtagatgacaagagataacggtagaagttcgaattttgttgctgtaacaagatactatgactatgagctccccccgtccattaagaattaagaaatttggttaattacaacatttgtttttatgtttaagccttttgttcgtaactgagctaatactggaatcactgatcaatgatgaatttggaaaaaaagatattttgaggaagacagagacagactctcttcgaccatgggacctgaacttgtcctaaagttggtaattactaatttgtgccatcggcagagtccacgagctttttggctggatccgggcgggtccaactttctcgacatttgtttgatctctccgttttgaaattgtttttttttagtccttaaattcaaggttttatactatttttgacccaatctgactaccttaaatgacaactttacccttgcccgcttttcaactttttcttctcccatgtccactttagtcctcgttttgttctttcatagtcttctagatctgtagtttttttccgcgaccgcccaaaaaattctctgatcagacggtcgattggatcggagatttaaggtaaagaaaaaatg

SEQ ID NO: 34256 - DNA, 3003 bp, Unknown
  misc_feature (1)..( 3003): 2750-1469P.txt file - cDNA_ID_3076180; gDNA_ID_1620771; Annot_ID_167543
atccgatatcgaagatcagtgctcaggaagtggcagtatcactagtgatatcaaactagaaggtgctgtgaccagtgatatagaagcaagagatggttatgttgtgcgaggtttagttaaccttgggaacacatgtttctttaattcgataatgcagaatcttctttctttggatcggttacgcgatcacttcttgaaagagaatgggtctggggtcggtgggcctcttgcgtcttccctgaggaaattattcactgaaacgaaaccagaggcaggcttgaagagtgtgataaatcctagagccttttttgggtctttctgttctaaggcaccccagttccggggatatgaccagcatgatagccacgagttgctacgctgtttgctagattcgttgagcaccgaagaatcggccttgagaaagaagcgtggtgtttctgataatgatgagaaatctactactctcatagaatctgtatttggaggcgaaacgtcgagcattgttagttgtatggagtgcgggcattcctcaaaagtctatgaaccatttttggatctctccttacccgtaccattcaagaaaagccctcctaaaaaaccacaacctgtttctcgagcaaaaaaagctaagcttccacctaagagagtcccaaagaatgtgtcaaaagtaagtaaggtttcaaaagttctcccaggtatggttctttcggaactgaactcttccggaaaatctatggctgtcacagctgattcggatacatcctgttccagtttagcaccccttgataatggtccggttttagaaactccttcagttctaacccttgacaataatcaggcctcagaaagtgcatcacaaagtgatactggtttcgatggctcctggttggattttatcggaccagaaacctctggagatgagacgaatttggatatgcaagaagatggtattgataatgtcattacagctgaggttaatcaaattgttcccagtccaaatattgtggcgaatagctcagtttcatcgggtgatcagactttggaaggtaatacagagaggctgatgcaagattatgaagaaattgcaaaggcggaagccaatttggatgaaaaagatgtacaagctatgcagtctgatgaatgcccagctacaagtggtatttctgctgaattcagtcaagctagttgcattggttgtgatcctggtataggggaaagttcttcctcggtgaatccttgggacgaggaagagcttcctttggtggttgcagattcgcaaattttgtacatgccatacaaagaaatatcctgtaatgataaatcagttgaaggtgagtgtgaagcttcatcttcatttgttactggtgatcatgaaccacaaaacagtgattttgttgattttggcggtttatttgatgagcctgagactactgagggacctgtttttggacctccttccaaggctgaagcctcgggagttggttttatggcgttcagcagcgagtctgatcctgaagaaatcgatgattcggatttaccggtgtctgtagagaggtgtttgggtcatttcacaaaacatgagatactgtcagatgacaatgcttggaactgcgagaactgttcaaagaacctgaaactccaacggttgagagaaaagcgaaaatccaatgaagatgaatcgagatcaagcaacaccagcaacggatgggtgaaagaaaatgaagatgaaggttttggagaaaccgaaattttggctgttaaacaagatccaaatgatactagttgtgtcaaggatcatagctctgatggaagaaaagctgcgaggattcactcagctgatgaaagtgaatccaaaggaactcaagatgaagacgaagattctgagaaggtgattacagtgaagagagatgcaactaaaaaagtacttataaacaaagccccacctgtcctaaccattcatctaaaacgattcagccaagatttgcgtggtaggctaagtaaattaaatggtcatgttgctttcaaagaggtcatcgatcttcgacaatatatggactcaaggtatcatcatctctcatcttcttttatataaccacattttgatctgtcttatatcttaatctccatgaaagcgattcttcaatcttttggttcattcaggtgtagcggagaagacccgcccgtttacagactggctggattggtggagcattcagggacgatgagaggaggtcattatgtggcgtatgttagaggaggtcagcgggttaaagagactgattcctcctccactgcgtggtataacgtaagcgatgcatatgttcgtcaggtttcattggaaaaggttctgcattctgaagcgtatatcttgttctatgaacggatcttctcacaagaatgagaaattattttgtttccattacgaaaggaaagaagaaaaccagttttgatcttcttccttacaatagcttttgctgggaaagtttttgacgatcacattagatcaaataccattaattttgttttttcttattatattttggagtcatgaaatttcattatatgtatcatcagaaacatttctgaaagtatttgagcctctccaatgagttacattcttttatacagaaaaagagttggttctagattcgcagaatttgaagcttcttgcaatggagagatatcgacagagtaccgggcgggtatttgtttttaaagcgggtcgaaacaatatggatcgtccgattcaaactggtgtgatcttaacggaagctccgtttaccaaaccgttacttacgtgcctaatctaaaccgattaaatcaatttatatcaatgtcagaaccggaaacaactgaaccggtactgaaaacgattgaaccgaccctatgtcttccttcctctctacccaagcaacgaacggacttccccattaaagggaaagaaagacaatcgagtctcgagtctgtgaaaccaagtctcgcgagtgggagattgtagccatg

SEQ ID NO: 34257 - DNA, 3003 bp, Unknown
  misc_feature (1)..( 3003): 2750-1469P.txt file - cDNA_ID_3076184; gDNA_ID_1620771; Annot_ID_167542
acccattggtctctctgtctttcttgtggtattaatagtttgaattgttgtttctgtaatgtgatgaagactgttttagacgtgggcaccgggagtggaattcttgcaatttggtcagctcaagctggtgccaggaaggtttatgccgttgaagctactaagatggctgatcatgctcgtgcccttgtcaaagccaataaccttgaccatattgtagaagtcattgaaggatctgtcgaggatatttcattgcctgagaaaggtattattcactttcccttttcttctctttcactgcgattagaaaagagtagtaatcagggtttaacttagtggctattgattgagacattgcaatttggttgagttgaacatgtttcttttgataatttttactctactcgacattgcgctaatatctacatattcaatttaatgggcagttgatgtaattatctcggagtggatgggatacttccttctgcgggagtccatgtttgattctgtgattagtgctcgtgaccgatggttaaagccaacaggtgtcatgtaagtggattttctgttattttatttctattctttgttgtaacattaaaatttcatgatgcatgattgttacttatgagcctatggcacttgagagcttgatgctgtgtagctatactgttaatatcttgatagcataatcttttcctccagtgccagttatagaatttcttatcaaattccatgcataaattttgatatcatgtggcacatgttactaatattgaaaacaattgggtaaagatttggttgatgttggcactgtgtgtatctaagcattacaaataacctttgtatacaataggtaccctagtcatgctcgcatgtggcttgcacccatcaagtccaatatagcagatcggaagaggaatgatttcgatggggcaatggcagactggcataacttttcggatgagatcaaaagttactatggggttgatatgggagttttaacaaaaccttttgctgaagagcaagaaaagtattacatacaggtgatttcagaactctttttttctgcaatttaatttatctttagataagttcctcagctgacagttgaacaattaacaaattgacttacagaccttttgctctgacatttcatggaactcataaaattttgtcttttgtgcacagactgctatgtggaatgacttgaatccacaacaaatcataggcactcccacaattgtcaaggagatggattgtttgacagcatctgtcagtgaaatcgaggaagtcagatcaaatgtaacgtcagttatcaatatggagcatacaaggctatgtggttttggtggatggttcgatgttcagttctcggttagttcgtacagattactgtgttgcatcatgttgaagaaactcgtatacttactcgttgcttgtttgtttttgtaactaggggagaaaagaagaccccgcacagcaagaaatcgagttgaccacagctccaagtgagcagcactgcacgcactggggacaacaggtatattactccccaatctctggcctatgatggttaaggcttcgattgtttcaaacgctaatttccgcgtaatggtctgaaactggcaggttttcattatgtcgaatcctataaatgttgaggaaggtgataatctgaatcttggtttgttaatgagccggtccaaggaaaatcaccgactaatggagattgagcttaactgtgaaataaaagaagcatctggtaaccccaaagaatctttcaagaagacttacttcatagagtgattgattgattatagagaagctttccttggggcttgctggttcttgtatcccatgtatgaaccccaaatgtaatgttttattgcttcttgccttttttttctatgtaaacgagattgttataccaattttcaatagatttttatatgggtgatataatttattatttttggtatttgattaaacatccaaaaatttcttcggtattaattttgaagagattttttttctgtgaagattgtttaacttttttgaacatttttcagtggtttagaatatttgttaaagtctaaaaaaacatttttttggtttaattaatatcgaactaaatgtttaaagatttgttttggagtaattattaatatttacgaaccaaatatttggtcgatagagttgtgttgggagagcctatgtcactaacccctttgtctgcccctctttcggagcgattcttttctcattctttcgtcggactctctgtctccttttgacggcggcaccaacgacaaagcaagcaagcagtgataacatctatctatctctccgtctaaaccaattgattaggctagatcccaattcttcgagtatcgattcttcttcaatcctttttatgtgaatattctcctaaagcagcaacctcttgggttcttcttcttctgggtaaaattctctggattctgcttttgctttgatacgattgttttgagctacttgttttttttggttcctgattgcgttaagggtcaggaggcttagtagaactaagatatgaaatcttaatctgagttatttcgatgcatagactttggattctggatctttgagtactagtcattaaaaagtcggataatttctctgtagggtacttcttagaatactgatttgatttgattttatggttaattctcagttcgtgataattcttaagacttttttagtggtatgtcttagaatcatggaattgaaatgggcaggttcgatttttgaaggtggatattgattttgaatccatatatgcgttgatggatgtggattagtttcttgttgtctttatctgtgcattggtgatagttccaaagtttatctgttggtatacacttcgttgctttgctcagttgtatttgattatgtagatgcagtaacaactttagtaacccactctcctttttctggctttgaattttattatagtaactgatg

SEQ ID NO: 34258 - DNA, 3003 bp, Unknown
  misc_feature (1)..( 3003): 2750-1469P.txt file - cDNA_ID_3076196; gDNA_ID_1620771; Annot_ID_167534
ttccttagtaggaggaaccgagggatcttctcctaaagcggttccaactatctggtctgaagtgagttttcctaggcagcttcattaacttctttcgaggtttgtattttagattgtgtttgatgtttcgttgcgtatatttggcaggttatgaggttttttacaaatcctcacaaacctatgatcttggcattatctagaccagacccaaagaagaacataaccactcttctgaaagcctttggcgaatgtcggcctctacgggagctagctaatctcgtaactgttaaatagctgtatttattccagagcatgaaaccaagaatcctctgtttctgaaattctttttcctgtgtgtttgcagactttgattatgggaaatcgagatgatatagatgagttgtcatctggaaacgctagcgttcttacaaccgtcttgaaactcatcgacaaatatgatctttacgggtctgtcgcatatccaaagcatcataaacagtctgatgttcctgatatataccgacttgctgcaaatacaaagggtgttttcataaatccagctttggttgagccttttggccttacactcattgaggtaaagtatgcatatgtgatatatatatatatagtccttcttactcgtttccaatcctgtttaacctaaatagtatccagaaatctattcacaaaccaaactagacaagaaattaatcaatctggtttaaccaaaattaaaaatgcaggctgcagctcacggacttccgatggtagcaacaaagaatggaggaccagttgatattcatagggttagcaacgtgtcctgaaactgaaaatcatttaaattggtaatgcttatttctttctcatggtatttaacttcaggcattgcacaacggtttgcttgtggatccacacgatcaagaagcgatagcgaatgcgttgttgaagctggtatctgagaagaatttatggcatgagtgcaggattaacggttggaagaacattcacctcttctcatggcctgagcattgccggacttaccttacacgtatagccgcgtgccgtatgagacatccgcagtggcagacagatgcggacgaagtggctgctcaagacgatgaattttcactcaacgactctcttaaagacgttcaagacatgtctctgagactctctatggatggagataaaccatcgttgaacgggtctcttgaaccgaattctgctgatccggttaaacaaatcatgagccggatgaggacacctgaaatcaagagtaaaccagaattacaggggaagaaacaaagtgataacttgggtagcaagtatccggttttgaggcgacgggaacggttggtggttttagcggttgattgctatgacaatgagggagctccggatgagaaagcaatggttccgatgattcagaatatcatcaaagccgtgcgatcggatccacagatggctaaaaactctggttttgcgatttccacttctatgccgcttgatgaattaactcgcttcttgaagtctgccaagattcaggtgagtgagttcgacacattaatatgcagcagcgggagcgaagtgtattatccaggaggggaagagggaaagcttcttccggatcctgactattcctcgcatatcgattaccgatggggcatggaagggcttaagaacacggtgtggaaactgatgaacactactgctgttggtggtgaggcaagaaacaagggctctccaagtcttattcaagaggatcaggcatctagcaattcccattgcgttgcatatatgatcaaagatcgttccaaggtaaagtttgattttcaacaactgtaccaatcattaatgcagactgcagagtatctaatcagggtttctacaggtgatgagagtagatgacttacgtcagaagttacgactaagaggccttcgttgccatccaatgtattgtcggaattcaacgagaatgcagatcgttcctcttcttgcttctcgatctcaagctctcaggtacgttaactaaaccacattttgctacggaaatgctacaaaacaaaattatatttttgaacatgtttgtttccttattatcgcgatttaattgttgcggtgaaggtacttgttcgtgcggtggaggctaaatgtggcgaacatgtacgtggtggttggagatcgtggcgatacggactatgaggaattgatatccggcacacacaagactgttatcgtcaaggggctcgtcacattgggttctgatgctcttctccggtcaacagacctccgagacgacatcgttccatcagagagtccttttatcggttttctcaaggttgattcaccggttaaggagataaccgacatttttaagcagctctcgaaagccactgcttgattccactaatatccaattctcccggttcaaccatgtagattaatttgtttatttattttctacttgttttgggacttttaagttttggtattttggccgatcgaacattaggatttaacaggcttctatacataaaataaaattttcaaatagtgaagtcgaggctattatattttttttgtaaaaattatgcaacttgtgttcccatccgagaatggttggggaaaaaaagaagataagcctaattcaaaaaacaaattgtaaaatttgaaaaatcttaactgtaaaatggcgcctataatatgggaaatatggatcacataaaataattagattttaatgttcgttcttttaaatgcaggtttaataatcaaccggtcggtttgattgcaagacccgacgccggtttgttgctggtgtgactcgcgcggctgcgacggtgattcgaagcagctataattaattaccttaattaacgaaaattcagaaatctacatctcgccagtgagaaagactccaaggagagagagctcatacagagtattagaaattctcaaatcactagagaagatctcgtcttcttcctgattttaaacgcgatg

SEQ ID NO: 34259 - DNA, 3003 bp, Unknown
  misc_feature (1)..( 3003): 2750-1469P.txt file - cDNA_ID_3076203; gDNA_ID_1620771; Annot_ID_167526
tttgatcatcgtttataactctcattgtgatttcagcaaatttttgtagcatttcggaattttgatctcttgatgagttttatttacgttttctgtttgctttttttatctagtgatcaagttttgagatttatgttgttgttgttatgatgatcttgtagatgcctttaggaagatgaaagtaaatgagaccggcgtggaggaactgaatccgtatccagatcgtcccggtgaaagagattgccaattctatttaagaactggtctctgtggctatggaagcagttgccgttacaatcatcctactcatcttccacaggtcagaaactaaacttcatttattttggctgagtcttacttaagttgcaattttggcctcatgggtttactgcttttaaacatcttaataggatgttgcttattacaaggaggagctccctgagagaattggacagccggattgtgaggtgcagtttcttgtatctctcactatctcaaatcttggttgttgtttggatgagtacattgtaaacagttaaaaagaaaacgagatttttgttcagaataaagctaaagtaagagaactgattctagtttgtaacttcacataagagaggtagcaagaatatacattgaaactgcagaagatattcctcatctggtttagtctttcctccaaatgttttccacaaacaactttttcttctacatgcaattttcgctgcagtattttctgaagacaggagcttgtaagtacggcccaacttgtaaatatcatcatccaaaggacaggaacggtgcacaacctgtaatgttcaatgttatcggtttacctatgcgtctggtaatttccatcgttgtagctaaattctttttctttagtcgaatgtggaagacttatttgaatttcttctccagggtgagaagccatgtccatattacctgcgaacgggaacttgcagattcggagttgcttgcaaattccaccatcctcaacctgataatggacattctactgcatatggaatgtctagctttcctgctgcagatttacgatatgctagtggtttaacaatgatgtctacatatggaactttgcctcgtccgcaagttccccagtcctatgtgccaatcctggtttcaccctctcaaggctttttacctcctcaaggctgggccccttacatggttagtctgaattgaagctgccaataacgtaaacctgttctttactgttgatatcacattttatgttgcaggctgcatctaactccatgtacaatgtgaagaatcaaccttattactccggtagtagtgcatccatggccatggctgtggcattgaaccgtggtttgtcagaaagttctgaccaaccagaatgtcggttttttatgaacaccgggacatgtaaatacggagacgattgcaaatacagccatcccggagtaaggatttcacaaccaccaccaagtcttataaacccttttgttcttccagcgagacctgtaagtctcttactaaactgaaagaagagctttggttacaaacaaatgtggtcttacaggtcactagtaaaacttttacaaagattttgaacatctaatgagctactgttttgatttttgctgtctagggacaaccagcttgtggtaacttcaggtcttatggattctgcaagtttggaccaaactgcaaattcgaccaccctatgctgccatatccgggcctgaccatggctacttctctgcctactccttttgcttcacctgttacaacccatcagaggatctcaccaacaccaaaccgctctgattcaaagtctctttctaatggtaaacctgatgtgaagaaagaaagctcagagactgagaaaccagacaatggagaagtgcaggatttgtctgaggatgcgtcatcaccatgatcatgattcttaaaaaccccaatgatctctctctgcccttttttgtggaagaggaggggaggtgaaaagtgtttctcttttctttttttttttggcttggagatggccatggctgaaaacaatataggatgaaaccagtgatgttgtcacaggtttctcttctgtttttgactctgttaataaattttaatcagacttatcagaggaaaaatagagtttgtgttgtgacactcactaagagctctttatgaatgacaactcgaacgtaaaattacatcttttgcttttgtcaagtgtttacatcagtaatatccccaatttcaagcttatttttttttttcaattttaaaactaaaaaggttccaaattttttttatcgatgagtcatatttcatttgaacattccaaaagtaaagaaaagagttgaaaactttcctcagcctattacaattgcctttagctgttaatgagttttagagattcgattagttttaaccaacagttcctgaataattggattttactctcttgttgagtttaattattccaatatttcttcatggtgctgttttgctattgctggtgataaacagttgatctaccgacgatttgcattcgacggtggtttcttcaccagaaatcgatatctccgatggcgaaggatgacgatgggaatcttttttggctcatcttacacgtgtattattacgtgtctttggatgatctttcttgatgcaatcttcttctgtaaacggtgtattattgggctcttcttgagcttgcttttgttcgcaatctgtttatgtgtgttgggctgtaattggccttgtagcaaacggtttattgaataaagtccactattgagaaaaaaaaaaaaaaaaactgaaaagggttgtttttaggcattttttgtcggagaaaaatctgggaagaagcttcgtcctttgcgtgacagggaatctctccgttggggttttgtggctgcctacgatttctgcaagcaaaaccacagaactcaatctaattaattagccgagtcgactcaatccgagtttctacagccgcacgagggaatcatg

SEQ ID NO: 34260 - DNA, 3003 bp, Unknown; identical to SEQ ID NO: 20686
  misc_feature (1)..( 3003): 2750-1469P.txt file - cDNA_ID_3076244; gDNA_ID_1620773; Annot_ID_167586

SEQ ID NO: 34261 - DNA, 3003 bp, Unknown; identical to SEQ ID NO: 20686
  misc_feature (1)..( 3003): 2750-1469P.txt file - cDNA_ID_3076244; gDNA_ID_2926216; Annot_ID_202997

SEQ ID NO: 34262 - DNA, 3003 bp, Unknown; identical to SEQ ID NO: 20927
  misc_feature (1)..( 3003): 2750-1469P.txt file - cDNA_ID_3076247; gDNA_ID_1620773; Annot_ID_167577

SEQ ID NO: 34263 - DNA, 3003 bp, Unknown; identical to SEQ ID NO: 20927
  misc_feature (1)..( 3003): 2750-1469P.txt file - cDNA_ID_3076247; gDNA_ID_2926216; Annot_ID_202988

SEQ ID NO: 34264 - DNA, 3000 bp, Unknown; identical to SEQ ID NO: 6090
  misc_feature (1)..( 3000): 2750-1469P.txt file - cDNA_ID_3076251; gDNA_ID_1620844; Annot_ID_170136

SEQ ID NO: 34265 - DNA, 3003 bp, Unknown; identical to SEQ ID NO: 20924
  misc_feature (1)..( 3003): 2750-1469P.txt file - cDNA_ID_3076251; gDNA_ID_1620773; Annot_ID_167576

SEQ ID NO: 34266 - DNA, 3003 bp, Unknown; identical to SEQ ID NO: 20924
  misc_feature (1)..( 3003): 2750-1469P.txt file - cDNA_ID_3076251; gDNA_ID_2926216; Annot_ID_202987

SEQ ID NO: 34267 - DNA, 3000 bp, Unknown; identical to SEQ ID NO: 20688
  misc_feature (1)..( 3000): 2750-1469P.txt file - cDNA_ID_3076288; gDNA_ID_1620774; Annot_ID_167633

SEQ ID NO: 34268 - DNA, 3003 bp, Unknown
  misc_feature (1)..( 3003): 2750-1469P.txt file - cDNA_ID_3076311; gDNA_ID_1620775; Annot_ID_167680
gtgaaccttgtattggtatacaaagatgtgaagagaggaggcacagaggcattgtgaacagtaacagtctctgtgaaattggaaagaaagtaagaaatcgcataaggcatctcgtcggatcctatgaatttacccgaaattccggatttccagtatctcattgatcttttccaaatgatgaactgtttgtcttcttcttgatccatctgaaaggtgaaatttccatgtgatggatcgttgaagcttctccatgatgataaagtcatattctcatccatcctcatccctgggagaaatgtatcagtaggattctgaaaactctgccaaaccacatttgcttcatttccatcactaatcaacacaagattaccattatccatcagctttaccattctctccgcagatactgaggaaggtttaacaccggtgtcccaatacactcttccctttgaatcaataacttcaagattcccatctttagagatggtgaaaatgcaggaacggtcaagaaccggagattcacgatttgcaacccagacaacagtcagtggatgtaaattgtaaaaccaaatccctaagtaccttctttcgtcggagcttccattaggagtgaagaagccaagctcaaatctctgaccagctgaaacaagagtctctccatggctgtcattgatcaatgttgaacctttgaacaatgttttggagtcttgaactgcaacaaaacaatctaatcgacgaatatgcagcaaaaacatatagaagaagacagaaagaatcattctctgaccagtactagcttttttttactcatctgatatctccattatttctgcttaagaactcaactcaaaacgtgtctaacgaaaaaagaaaaagtttgcctcaacgtcaacgaaagacccacctgaaaagtaaatatgtggaacgcagctaatcatgtgttttaagatgtttccaagaaaaagcagaacaagtctcacttgagcatctgaaccaaaagccatgaaagtagtagatactatttacactctcttagccactgtatgtagatacacatgtgaccaattcacgcactttgtgtcaactttttccgcgatggatctctaaatagttcaaaaagatccaacattttttgaataatacgtacttttagagtattttttgacaatgagagagacataggggtacctaaacgtgaattactggaaaaaggggacaatgatgttgaagaagtcaatcttttgtccttattggtgctttcgaagaagtggagattgaccctgcaaacattgttaaccaacttttttccgaaattattgtgagattcgaggagttttgacaaatgtaggacttttgtcgttcaaaagaaatgttttcatctaaaacgcgtaaacctgtaaaaggcagcttcagctctgattaaacaaagagacttgcaacaatgtcactatgagacattactgtttaaaaatagattcagaaacactaatcagttttcacactaaaacaactttgtcttctgccttgtttgtttattcctctggatgtttcatagatatacctttaacagggtatagcagtttcaagttcatagatgaaaccctttcgctcacaaatattgttttaaagccttctttatgagagttggattggttcaccacatagattctctaactcctcttccaggagtttatgcaactttgcttcagttcgccgatatatccacgcattagcatcacggtcccagtcaaatctagaagggccactgcaccgagacaaaaggaagaatgaagattacattaatgtgaatctaagatgtggaagcacaaagtcaagagcaacaacactatacagtcataaacagtttcatttctccaaatatcatgagtacaaaaatcagaagagagagcagaacatgataatccagatgcgaaattcaatctaggcgcctaaagttagcaactttcaaaaggcaagaaagaatctttacctcacaggtgaagacatccagatttgtcgatttggagtttgcttattcagtacataagtgcctaaagatccaagcttaagggtaagaacttcattctgttggaaacagccaaaaggactgactataataagtacacatagatttccagaaatatgaacaagatcttaaattgcttaaaagagtttaatccttaccccataatctatgtcgaaaccatcaatctgaacattatcaccataatcctgaacatgaatcatgcaagtagaacatagtgtaagctattgcaatctcaagtaaaacgaagaaccctagagagaaaaaggttccagcttcaaatacctcaattttctcaagaaggtgattaattgtgaagttggctaatttgtgaaactcttcctcctgcaaaaccgaactgtttttttcttccactttgttcatattctcatgaaattaacgattcagatacaataaaggagatcaaaatggagaatattaaagtacctgtaatcgacagaagcaggaccttgagaagagaagcttctggtagtcaaagaatcatggcggattcgagatcctattctccagaaggaatccaacggttctatggaatcttgaatcagattgcttgaaactcttacgccattgctacggagaagagttggagacagcttgagaaacctcggcaatttccgtagaagaaaccttgaagctgtagccatggcggttctgtcacaagaaacattcgacgcctctcttcttcttattccttcgttgtccaatttaggcccacaataaggcccaaatttagatttacccggttcacgtatttcccatgttccggtttactgaaaccggtatggttctcaagagatttgtcatttgtgtgcgaagaagagttttcttctcctctcataagaaaaaaccagaattttgaagaaggagaaagaaaaaaatctgggtttttgggagctgattaggttttgttccttcaatctctgggaattttcgctatg

SEQ ID NO: 34269 - DNA, 3003 bp, Unknown; identical to SEQ ID NO: 34268
  misc_feature (1)..( 3003): 2750-1469P.txt file - cDNA_ID_3076311; gDNA_ID_2926205; Annot_ID_202139

SEQ ID NO: 34270 - DNA, 3000 bp, Unknown; identical to SEQ ID NO: 5257
  misc_feature (1)..( 3000): 2750-1469P.txt file - cDNA_ID_3076317; gDNA_ID_1620775; Annot_ID_167678

SEQ ID NO: 34271 - DNA, 3000 bp, Unknown; identical to SEQ ID NO: 5257
  misc_feature (1)..( 3000): 2750-1469P.txt file - cDNA_ID_3076317; gDNA_ID_2926205; Annot_ID_202137

SEQ ID NO: 34272 - DNA, 3003 bp, Unknown
  misc_feature (1)..( 3003): 2750-1469P.txt file - cDNA_ID_3076323; gDNA_ID_1620775; Annot_ID_167674
cttcaagtttggagatctgctcacaagacgctctaaatccgagattttaacctcagaatctaaacaagagaagtcaagagagaccaaagaagttgaactctctggaaaatagctaagccaatctcctcctaaatcttcaacaatacactctcgtagttccaacactctcaagttcctatattgaaaatcagacaacaacaaaaaacaaaccaaagctacttactactatgagatataacttgcagccaaagaaaagattgtttttgtatttggttggaaccgaacctgcaagtagctgcaatagcagcgataccatcagtagagaaaccttcacaagaagtcaacacaaggactttaaaatccttaaacgaagcagcaattttctctaagcactcatcagtcaccaccatcctcttcattctgatctcttcaagagacgaacttttcgccgccatagcttcaatccacggccaagcataaccaccccaaccatcaggaacgagattatagtcagcgaagtgtggcttccccttcaaagtcaaagatctcatctccgggaaccgtcgtgtaaccgcagcaggactgaccgcgtaacagtttccgacaaagactcgcttcctagtcttccgttctgtctcaaaccatgacttgcagaccagagaaacagagttccggtcctcgttggaatcaatgaaggagaggatatgttccaacaccttaggtgggaatcggagacccatcagaaacagagtgagagagagagaggggggaagaaatgaagaaaaaggtttgagattttgattcgatatgagtgtgatctaaatcgaaagattgaagcttttgatatatataaacagagcaagtggaagacaagaaagagtatgacaagacaagagaatcgaaggagacagtgtccatgtgagaccattaataaagttgagcttgcacccatgtgagcctactgtgtatagctcactaatataattagtttccttaatcataattagtttactctgtgatccatcacatgtaagtctgtgtgagaactcgtggatctaatcatttatggtattacccagttcacacatgatgtcagattcgttaattagtattttacttatgcttcagtttcaaagtaaaaatatattttatctttggtaccaaatatcaattcatattgttaccaatcaaatgttacaactgaatctcttcaaacaatcaacgtttttggacgtgaaaaacatttttatgattaaagcttcgaatggcaactcattatcaaaacggtacagtttatacagttttgacaattatcatttacaaaaagaatttcaaaaacgttacaatttttttttattttcaatttttttatacagtttttttttacagttttgcattattctataacagtttaccgcgtcagttaacaacttatcgctctagctaacagctaaagttttgttaccaatcagactcttaaatcttaagaaatggagtaatccatctcagtgcataagtgtcacaaaatgatcgagactcgttggttacaaactctttatcacatttgaagaagcttaacttaagttgttttgattttcgagaaaccgatagagtaacaaagaagttaacatcccaattaattatgttcctaagctttattttcttagtgtcggattggttagattttctcatagacgctattccgctaaaaaactatgactctacacaattacacaagatgtgggttagtaaaaatttgaagtctgaaaaaaaaacagaaaattcagattcaagagccatcttcttgtcttatctacacgtgtcacatactgaactcctccaacaagagaaagatgtgtccgaagctccctcgctcgaatggcgaatcctctacaccttgagttcgtttagccaatctcaacaaacgctaaagaacgacgtcgttttgttgatcgtaattctaaaaaatcaatcagcaatgctgatgaaaagtcttcacttgttgtcttcctcaatcctcctccaccgctttgcttctcgcagcattgcatctttgtctactctacccagaagaagaaatatcgtccgtatacataacccttcgttttctagccctttcccgccgattctctctagacccatttcctcaggcaaggtcttagccatggcggaagagtcttcttcttcttcgacctcgtcaacatctcagaaacataccaaccgtttagccgctgaacacagtccttatcttcttcaacacgcgcataatccggtgattactctcttttataaaagtattcgtctttagataaaattgataagagaagaacacctctcgtttcaattagggagctttcttgcaatttgctaagtcacaactggtttagattgtagctaaccggttcttagtctaaaagtttggaactttttttattttttagattgatttcatggtttatgtcaaaaaggttgattggtacccatggggagaagaagcttttgaagaagcaaggaagagagacgtgcccatcttcttatcaagttgtttactttatcctcttttgatcgttttaattactgcttgattagattccattaatgacttttagtttgtgaaactaatttggttccttttgttttcaaaatctcttttatatggaatcttgaagttggatacagtacctgtcactggtgagactttcaattgttttcttggatttgagtttgacttcttctttttactgaattggaggattaagagaatgaatgacagattcaaagactctggatctgttagtatcattactcttctctcctcataggtgtaactctaatgaaggatttaaggattttataaattgaaagtggaaagaagtcttatagcctaagaactaagtgttattgtttgaaatgttaggagtagagaagcagataatcttatattcctattttgaaatgtatgtttaagtaacagttaactcttttgtcaggtgccatgtcatg

SEQ ID NO: 34273 - DNA, 3003 bp, Unknown; identical to SEQ ID NO: 34272
  misc_feature (1)..( 3003): 2750-1469P.txt file - cDNA_ID_3076323; gDNA_ID_2926205; Annot_ID_202133

SEQ ID NO: 34274 - DNA, 3000 bp, Unknown
  misc_feature (1)..( 3000): 2750-1469P.txt file - cDNA_ID_3076331; gDNA_ID_1620775; Annot_ID_167664
ttgtgcctaaacatccaaatagtgagaaaatcaacatgtttctcgagcttataactcttcacgaaattcttccatcccgacgtcaaaacaggtgtgcccttaatccatatcttcaacaccatcttatgattctctccgtttggtccatacaccgaaacattaagccctttagtcccaagtttctctgtttttcccagagcatccatcatctttttcaccggctccttccctaacatgagcctgtattggttgtccttcacgtcgctatccatcaactgctttcacattggtttgctgcaagctcccatagcatctggatcacggacaatacttctcggaggattacttttcggcctagtgtctcccaaccgcgcatgcactctagggtttcttcggaattgtctacctcagcgacttttctcttcttacccttattttcatttgtttgcatacacgattttacttccaaatcatcctcacatacggattcttcatcatattcttcttcttcgtcttcttcttcttcttcttgatcaaagaaaacagggtttggtagtcgtaacaatactgacacagcctcaagttcgtctggagttacatcatccatctcctcaatctcttgttcgttagatcatgtacataggtgatatttatagaatatcacaagtccaaaaattatttttatattgataaaataattagaatgaccttgatcaatatcagtccagtgatgtttttgatataagtatcatctgacgtgacatcctcagattggtcgcatttgcgaaaagaaagaaaaatatatatatatatatatatattaaacaaacattataaataatattaaaattttcttaatgacttttatgaatatcacctatgaaagaagaaactgtttattttccttgatatagtttagtttttccattcttcaaacggttgcatagtttagttttttcattttatttttttcatcaatagtttagtttttccatgtatatctcaattatgaattaattcaatatatagtccaagtactaagactatgtccatcagtgtttctaatgggcttcttatctgaaatcctaaagaataaaagcccaaaattaaagaaaaacccaacaaaattattaggatcgatcctaattttaggttttttagaagtgtttagaaactcaaacgtggttgcttctaaggatgaaaatttaggcaaaacaaaaaaaaatcatgctccgcgtgtttttctttcctcttctcctatctcttttctttggttactctaacgacgaaatcaggcgatttgaatcgatttgataagaaactatggtgtatcgatcatgaaattgggagacagtctctttgctccaatctctttctcatggtaagaatctctctgtattcatgtgaggattatttgatgatggtttcgagtcatctaatcagcaatttagggttaatatatgtggttatatgcttgaaatttcactcgattacaagtctgttttgatctgagacttgttctactatgtgttcaagtttgactctgaaattttgttccggaatgaatcttaagtatacaattttgttttagttgctaaggtttgatgatgaggatgtggaagagagctatgtaaggtctgagggaaagatatgacgatgttgaatcacatgtatatttctcctacattttatcatcaaacttgctactcttttccttcgatttcgttaagctaaattttgttctgttttacagcttggcaatggaggagatggtgtgtttaatggaccagatgaggctcctatgtcgtcacttaacgatcacgtgcctgagttaatggagaaaggtgggtttgatgagattgttgataaagagattttgaatgatttgggtggggatgatgatttggttctgagacggtcacatgttaaagtgttctgaaaccctcttaattagttttatttttcttgttagttaatgtattcttgaaagaatgataacctctgagaagttttagtgatgtctcactgtgtttgagttcttttataatgtgatcaatgtaacattgctttaagattttctatgtggaaatgatgccttaagctcaccattgtagtgtacattcctttgaagcttccttataagaatgtgtgatggaatcgagaactcgagactgtctttctctgatttttttttgctctcacttgttcttgtgcatgagttccctattacttttggcgaaatataaccattgtagttcaatctgtacctaagaggacgacactttgaattgatgttttatgatgttttgcttgacgataatagtgtcacttcaaatgcaggacttggcacgaaatagtaaagttagtacacatatgttttcaagcatctgtggtagtagtgaagacagttgcagcaacaacaaccatgaagaggaagatggaagaaacttaatgaaagaacagaacaacacagagaataagaacgatagctgaggaagatggtcagattctagctaagacagaaagtctctctttcttggaaacatctgctcttgaagccaccaatgtcgagaaagcattttaaactgttttagcaaagatttaccacatcatcagcaaaaaaagctttggctgctgaagctttgataatttttatttgtaagaattattaagttatatcaaattataattatatcaaaaatatttttttatttttaaaaaaactcatttaaagattctaccattggacattaaaaactgtaaggattcatcaacaatcctaaactataaaattatcaaaatttagtattataaaatgttaaggattccttttaagaaactaaccaatggacatgctctaacacaccacctttaaaccataaagagagagaggccaaagagagaaaagaggattgatacgtcacccttgaaatctctatttgcattaattaaactgtcaaaaatcttgaagtaggtgcaaaattacaagtgaagacgatg

SEQ ID NO: 34275 - DNA, 3000 bp, Unknown; identical to SEQ ID NO: 34274
  misc_feature (1)..( 3000): 2750-1469P.txt file - cDNA_ID_3076331; gDNA_ID_2926205; Annot_ID_202124

SEQ ID NO: 34276 - DNA, 3003 bp, Unknown; identical to SEQ ID NO: 20919
  misc_feature (1)..( 3003): 2750-1469P.txt file - cDNA_ID_3076358; gDNA_ID_1620775; Annot_ID_167708

SEQ ID NO: 34277 - DNA, 3003 bp, Unknown
  misc_feature (1)..( 3003): 2750-1469P.txt file - cDNA_ID_3076379; gDNA_ID_1620775; Annot_ID_167691
ttagttgcatatggtgccttgttgacagcttggtgttcgtaatggcagggatctatcgtctgattcatgtaatctgtgccacattcaattggccggttttgagatccttgttttactactctttcgttgttttgaaagaattatttcttttttattgtaagctaagaatttgcgaattttgcttgggcatgtgtagttttgtcataatggtttcttcgtttaaataatagttttttttttaatatgtatttatttcttgttagagcatctccaatgcagggctctcttgataatttgagagagttttgttgattttattgattaaaaaataatcaaaactagtcaaatttgagagaaacgactctctaaagagaggttttgggagctgagagagccggacacgtggcactacgtgataggttgattgtttttaacaaaaaggaaaaaaagatcctttttttctttgctcaggacatctcgttcccgatttcgacaaaaagctctatctctcctgaatttttccggtttcgttcagtgtggtgagttaaatcgtctgaaatgtggtgtatgtgattgtaaacgaatttttttaaagattgattgatttatggttgatagtttcggaaattttgttgaatctagtgaatcgatctatttactgtgatgtttgtttctgatgagatcgtttgctgtacttgggaatacagattacagaggaagaaattctcaaggtttctttgatatggagatgaacacttacatgtgctatgatctcttgtacaatgccacttgactgatttgctttgtttggctgattactttgcttggtcttgtatagttgatgtttatgggctatttcagcacttcttagtttatcttgtctcagattttgtgatttttttaatgtcataaattaagaaactttaatggctaatttatttcagattaggagatttcatccataaatggaaaaaccaatttcagtgtttatgttttgagctctcgaatgatcataatcttttgctgcatcagataatgtgattcttgagatgttactggcctttgactgtttgttttcatgaaaactgttttcttttccttgtgtgtgttgtttatgagacttccttgatggtgttttaggctactggtagctcggttgatcacatgacttgctttggagatgcagtggtggagagggatttttatccggagatgattcagtgagaatgtcggtgttgatgccggaattatgattttctccagaggatgctgataggcttgtggcttcgtttagtggtggatggcaaatgagaatgtcacttggaaagaaattgcttcaggtatatgagtaatctgattccttaaagttttatcttttcattgattttgaactgaaagctaatgtgaattgtgtatggctcttatctaggagtacatggcagtgacaacttgaaagatgatcaattattcttcatgtctctcattctttctcaatttatggtaacttatctttgatcattcaatttacaacatctatgtttgattctataattctatttcttccacttttgcctgtaagtcttttttttttttttggtaagccaagggagacaatgtctcccaagattaattaatgaaaaataaaattacattcgcacttaacgtgaaaccgtagctccactagtgtaatccaacaaaataaagcgtaaagaatctggaaccaaactaagcaaatgaaaacctaatggtaacgaaaaggcatagttggctaacccgtcagcaagacggttagcttccctataaacgtgtgaaatacggactctccagtcccttgatatgaagccatggcacaatcgtaccaggaaagacagcggatgtacctcgtttatccctgtcttcaacaaacccacaacaatctctgagtccacctcaatctctagccgtgtgactcgtcgctcccaagcaatgtagaggccatagtacactccccatagctctgccaaaggtgctgaacaaactccaatgttcagagcaaaacctcctctccaagctccttcctcatctcgtagcacaccaccagcagacgctaaacccggattacctctggaagccccatccgtattaagtttccaccaaccttcctcgggtttcgacctgtaagtcttttaatcaaagacacaaacaacatttattcttgttttacaaagatacaaacacacttctaatttttattttttttccaaagaaccccatttgagagaaactaccattgtactatcattttcttctaaaaataaatacaagctctcttcttacaaattttcacaatttatattaaacaatgggagagagccccatgagggactctcaccattggagatgctctaagagagtcattggtgcatagagttaactctacaactatttccatcttattttggtttttgtaaatctattttcatcttgttatcggtttaatgtgaaacccgaatgttgtacgatttaggctttgtgtaaaaagaaattttcacggaagtggacgaaaaaaattttgctctcaccgtttgtcaaagtgagaactggttttcacggtttgtcttttcattcaattttggaccaaattaccctgagaaaacttaataatggcacaaaccaaaccgtgcagcagttcgtatcggttaagttgatggcataaaccaaaccctacagcagttcgtttcggtttagtttatgcggttcagttttgaaaaagacaaaaaaaaaactgaaacgaagaaaccgaagaaaaagaaaaagagaagagagtaacagagagattcgagagagaattagaaagcgaaacgaaattcagtatccattgcttcaaaattcgacataacttcgaattgttgggtagttgaattgagccactgaactcccacaaccggggaaagttactgtttctcccggcgaagccaagagaaagttactgtttattccggcgagatagcaactttagctatg

SEQ ID NO: 34278 - DNA, 3003 bp, Unknown; identical to SEQ ID NO: 34277
  misc_feature (1)..( 3003): 2750-1469P.txt file - cDNA_ID_3076379; gDNA_ID_2926205; Annot_ID_202148

SEQ ID NO: 34279 - DNA, 3000 bp, Unknown
  misc_feature (1)..( 3000): 2750-1469P.txt file - cDNA_ID_3076411; gDNA_ID_1620776; Annot_ID_167747
cacaagctgtggagatatgaaagaaaataaatttcgattctaaatataattgacatatctataataaaattctagcaataaaaagcacaatcagttaagttcataatgttgaaagctattataaattgtcactcttattgtatatatatactatattaatgacatgtgattgttgtagatgtgagtagtaagacatgtatttatgaaaataaacacacaattaaataaaaatatgtagaaatttttattagagagaaaactaaagtgtcatgttcgacacctaaacatgtttgtctaacatcttaaattaaattgtcctgtttgtttatacatatgaatttatgatctgaagatggaccgaattttttatttctttgatttattcagtttacatattagaaaagaaaattttcactattacatatcctttctttgtgcaaagactgatttttccattcatacgataagaggaattagagagaataagggttcatcacaaccaagacttaagacaacaaaatttaatacactgattagagcataatataaactgaatagataccttgacgataaatccaactttcggagacatgagcgataaggcacatagacaaaagcgagaaaatcgtaagtcgatactacatccacaagcaagtcgtaaataatcatagtcgattgacaatttgactttgaaaaggaatccaagacctcaattctcaccggcatgagacgtattacttcttctccaaaagatagtaacaactggaagaatggacggttccagaccggagaccacattgtaacagttttcttcatgaaggagggtaaggagcaaattgttctctttgtaaaggaggagggttgcagcagtatgctcttcacaacggaaagagttgcaagatggggacccataaggtcagtatcagagtcgagttcgaagtatacaatatggttcatacacttgaagaaagcattccaaaattttcaaaatattagaaggccaagtcagagactgaacatatctcgcttgatacgtatggaatagggagacgacgatatgttgcagattgcaaatataagccggtagacgagaggcaagagccacaaatcgggataatcgttttttcaattggtgaaacaagtttagagacgaaaagtagataaattttagcaaggattgtcaaaggataaaaatatcggcgaaatgatttctattttataataacatttttactttccattttattacggtaaaatatcttcaatctgtgtgaccagttagtttaaaaagtgaataatagtattatctaatatggtatgcatgtttgctttggattatgtatttcaaaaaaaattatcctcgtcaatgtttttcttgacctttttcggttcgatctgttgattccttaaagtttggctatagtgttgttgttgggcagtttttgttagtctcctccaccagaaatttttgaccaaataaatctaaatttggtctgattttacttcttttatactaaatccatgttgttttcactcgacaaattgatcatggatcctttagacggtttatctttgtctctttcgaagctccgtcaaaccaattcatgaaatatatattattagttttgaagtctaactatcatcaacggaggacaaaagatttgaagactacattttgaagattctatagtgatatcaatttttcaaatctttgaaaaatattgatgcatgaaagttgttataaatttaaaaattatataatcgtagctttcaattttttttttgctatttctcatatctgatttgtgtaactggttaaatttcttgggtttatgtttataatgttgttgatgttgtgtaaaatcctctctttctaataaatattaataaaaatagtacaatttaatatatatatatatatacatatatactaagacgaatgaagatatataattcaactacagataaaatatattgcagttcaaataataatcatatatataatagcagagttttctctcctctaaaagtgtccacgtcactacatctttttaatgtggagcccacatgtttttactctgtcttcacatttttttctatgcgtgagatagatttagtgatgtttatggggcacgatttagtgatgtttatggggcacgatttggtcaaaaagcccatgagccaaagaaccaaatagacttagtgaggtgtatcgggccaagatttagtcaaaagaaccaaataaaccagtatactccttctgtgtagtcaatggacgaactggcagctaggcgaggagatagatgagttgtgcacttgagggacgagctgacgagtaggtgaggaattggacgagctgactagctgacagctaggcgaggagatggtcgttgagtgatgtggagcttgaagacgagctgaagaacttaaagacgagctggagtatggggcacgatttggtcaaaaagcccatgagccaaagaaccaaatagacttagtgaggtgtatcgggccaagatttagtcaaaagaaccaaataaaccagtatactccttctgtgtagtcaatggacaaactggcagctaggcgaggagatagatgagttgtgcacttgagggacgagctgacgagtaggtgaggaattggacgagctgactagctgacagctaggcgaggagatggtcgttgagtgatgtggagcttgaagacgagctgaagaacttaaagacgagctggagctttccgtatttttcttccccagaagctcaaacatcaacagttattcactaaaaggtacttaaatacatggcttaattcctacaaaattccactacttgcaatttaattcatacttttaatatctcaaatcgaaactgtaactggagaaaagcaaaaacctcctatacatcttcctttaaactactataaaatcatcatctcccatcacccccaaacacaattatcactttccaccagaaaatattacacactctgaaaatg

SEQ ID NO: 34280 - DNA, 3000 bp, Unknown; identical to SEQ ID NO: 5275
  misc_feature (1)..( 3000): 2750-1469P.txt file - cDNA_ID_3076415; gDNA_ID_1620776; Annot_ID_167742

SEQ ID NO: 34281 - DNA, 3000 bp, Unknown; identical to SEQ ID NO: 5276
  misc_feature (1)..( 3000): 2750-1469P.txt file - cDNA_ID_3076419; gDNA_ID_1620776; Annot_ID_167741

SEQ ID NO: 34282 - DNA, 3003 bp, Unknown; identical to SEQ ID NO: 20711
  misc_feature (1)..( 3003): 2750-1469P.txt file - cDNA_ID_3076433; gDNA_ID_1620776; Annot_ID_167737

SEQ ID NO: 34283 - DNA, 3003 bp, Unknown
  misc_feature (1)..( 3003): 2750-1469P.txt file - cDNA_ID_3076437; gDNA_ID_1620776; Annot_ID_167734
tgttaccaaagctggttgacaatatagtgaaaaaaattaagaacttacttgttacatttcttttagatgtaattttacatctaaatagtaaatgttgcaaaaagttaccaagctaaatcattcgcctgactgatggatgatgatatattgactaattttaattcattgtaatcaacattaagataacaaataaactttattctttatgctaaaaatcaacaccaagtatgtagcatatgagtacatgtgaatagcatacttctatatctctgttttgttatatttttgaatagaaatgtgaatagcatactatatctctgggatattccgtaccatcgacaatgatttcttgccgccaataaaagaacacgagcaaatctacaaatctgcaaatggttcataaaccggtttgatttatgcatcagaccataaaacttcgctcatgtccggtttagctctcggttctcgctttgtattgtcatggaaggtcatcatcattcaattcacaaagcaaattttattgataaactcacactacaagtacaaatgcataccaaaagttgatacatttatatatacgctcataagcaaactattagattatttttttgacacaatacataataaaagcattaatacatttaagtaatggtttataaattccttttgggactggctgatcccgtaaatacaagctgaacaaggagtatctctagaattgctcaaaaaccatggatttttatgttatccttcttcacaagcccagcctgatgattcaaaacatttctaagatcaggatagatacaatgcttccatcttttcactacaaaaccaacttcaaaaccaataaccgatagaacgaaaaaatgatgattacctgaacaaggaacgtagatacgttcttcctctgatcaccttgaagctgaataacctacaccaaagatattaagtcatttagcaactaaaagcaatccaaaatgtatcttgagagctatggtagctttcttgatacctgtcctaattcagagtcctggacgacggtgccattgcagcagaattctttcttaaggtctttaagtatcttgctatagctatactctttcttaagcccctggacagttgtcaagctttttctaccattacgctgctgaacacgaatgtgcacgtattcctttgttcccgccccagagtcctcagcatttgcatcagcgaacggatctttttatcaccaaaaaaaacacaaagcataagaagatcatataacagaagaagatactccattccaaaaacaagaatgctgtggaatcatctaataatcatcatattctcaacaaatttaaccgccaaatttcagaacaatccttaccaaaggcagtggggacttgaacttcaagatcagacatgaaccttaagttgatacaagggacagtaaatcgacaaggcctgagaacaaaaacagaatgttagaattacgagtccaaaaatgatttcaagttacataacgtaaaaaaaagtgacactggttatcctagcaatgtcttattcagataatcaaagattcatataacaaataataaagaaaccattttctgcaaaagtctccattgcgtaaacatatcacaagattccaaaatcaaaaatcaaaacaaaaaatatagtatctgtatctaaaattcgataccattttctacagaataaataacatatctagttttggagtcaatttcttctgaaagaaaaaacaatcaaacattatcattttgcgaagaaacaaaacccagagtatatattttgaaccaaaaagagctgcattcagatcagaaaataaaatgacctacaaatctctaaataaaaactttttcgaacaagcaaatcaacaggaaacaatcattcagcagaaagagagaaagtatcacctgatcaagaagagattagggtttcgagtatttgattgaaggaagaacggaaagaaaaatggaaaccctaaattcggacaaaggcaagcttctgtctgaaagaagaagaagaggaaattacgagaggaagagctacaaaatcgaacaagttttaattcgaaccaatattcttctttttttatattttaaatcggcaaataatagtcggcgagtcggcacggcatcgattccctcccactcatctagttgcgtctttatctggaaatacgtattgggccttaacaaagcccaaatatttgttacggcgtaacaaagcccaactaaatggagccgatggggagatgctgaaatcgccaagcagagaagcccaaattacaatcagttgttcccgcccgatcacctctttttcagttgttcccgcccgatcaactctctggaattacttagcctcaaaatcctcacaacaactcttctcttgtagctacatctactttgctcttccctctctgttgtctcgcgtttcctctgctgtctcgtgctctctttttcgttctgttttgttctttctttagtaattttttcagatagttttaagtctcttctgaagaagaattagggttttagggtttagaaaaaattctctaaatatatttggttttagatctaatttaagattcattcacaaaatagaaaacgtttgtttcttcgtcatcttcttcttcaacgttggatctgttagttatgttttttcagggaccacatctaaacttgtctctaacaaaaagtccggaacttatcaacaagattgaatcttacctcaacggacactgcacatgtcctcatcaacaaacagagaactcatcaaagagatcaactcttcctaagagccctgagaaactaaaagctatgaatttcccaatctccacgatcaggattggcggatgggtcgtcgttgccaaaaaccctgatgacattgtggccaaattctattttgcaaagaagaaacttatatgggagtttctcttcggagaaccagagactaacacgctgaggctgaaacgtaagatcgagattcaatggaatgatg

SEQ ID NO: 34284 - DNA, 3003 bp, Unknown; identical to SEQ ID NO: 21354
  misc_feature (1)..( 3003): 2750-1469P.txt file - cDNA_ID_3076443; gDNA_ID_1620776; Annot_ID_167729

SEQ ID NO: 34285 - DNA, 3000 bp, Unknown; identical to SEQ ID NO: 5299
  misc_feature (1)..( 3000): 2750-1469P.txt file - cDNA_ID_3076484; gDNA_ID_1620832; Annot_ID_169707

SEQ ID NO: 34286 - DNA, 3000 bp, Unknown; identical to SEQ ID NO: 5299
  misc_feature (1)..( 3000): 2750-1469P.txt file - cDNA_ID_3076484; gDNA_ID_1620777; Annot_ID_167804

SEQ ID NO: 34287 - DNA, 3000 bp, Unknown
  misc_feature (1)..( 3000): 2750-1469P.txt file - cDNA_ID_3076492; gDNA_ID_1620832; Annot_ID_169702
gttgtgcaattattttactcgttcatttaatgttttagccatgggattagggtgttggagtgtggtggggatttcctcttcttcttgttgttgatctttgtgctaatcatacaaattttactttatatctttttctcttctttctctgtcagaaagaaaatggtgtagaaagcaataaacttttgtggtagagattctgattttgacgtttcagaggcttgttgcgtactgaatgttttttcaacttgttgcttttttctagtgaaaaaccaattgacagaaaaacctagtcataactttttaacaatatgtgtagttgatttttcatgagcttcttttgcttcacttctcgtttaacaataagtaagtataagtactagtcataactcataagtcgcttcactcttgtttatgggtaacaaccttattaggttaccagtttttctaagacttcaacttcttttggtcagatgattattaataaccaataagccataagagttattagctgtaattcctctttaagctcattcacagattctctggatcggaattaataagcgtgtttagataattttacgattaaatttctgttatatcttaataacacaccatataatttttctatctaattaaataggttaaaacaataaagttaaaattgtattttaaatttaatatagaagtctacaaaacgacattctttgtgaaataaaaatttaatcctgaattcgacatttattatgaagaacgtaactttggtctatttcaagtttcaatgatctgagaacaagagtagggagatttttgttgatcatcggaaatagtatcattgccaagtggccactcttatctgcatgttcttgttggagtcttgttggacttatatgtaagtaataaaccaaaactgactcaattttgaagcgatttaaaagtctaggttttatgcttatacatgaatgaaatgcttcaaataagtgactttctttgtggtttactgatattatctctttagaccacatattgtactacaactagcaaaaacattgtggccataacaaatcaaccgatcaggttagctagaaatactgatccttaggagttttttttttaatacaataaaatagaagaaaaactccagctgaaagagttagctgtaaagaaatgaaactccatagattggtagactttttttcagctttgcaggagttttccattatcgtggtcgatctcaaatgcaggttccacttgtactttggtaatattgtttattggggaaaaaagctgctgatatataaaaacatatcagcttatctttataaactaatcgagagttagcatagagtatcaactggaaaagttgaaaatagatcgatgcaggttttccataatggacgaatgtttatgattaataattttaaaatttgttcaaagtacaacttgcctttttgaatgatctcatctgttttttttttctttggttgtgtgctttatttaaccatctttttctttcacctgaatgaaatcataaactaataaagaaaaaagaagcttacaattgttagacaatattcacatgggatgcgatgttatctactagtttctcagttcaatcacatgcttggtttctttcatgttgatctgatttagtaatacaagttgatcacatagacttttgatttctcacttcttggttgttgtgatacggtaatgcaacttagcgaaagcccttctttggactagctaaaaaagcaacacattcttttcttctaatgcgtggttatcttgctacttagagtggatggtctcttattgacttttatagtcaacatttgtcttgttgcatgcaatatcatcaatgttacatgtttgcatatttgatctagaagataagaatactgcaacgagaagaataggaacatagtgcatgattagcttgaattagaggttcttttggtttttgttataaagtaaaaggtggaaaagtcacatgggactcccgtggattccgctaatgaccccaccaactttctctcctaagattttatttttgatttggttattaaaaaaaaaaggagacatagggttctctacacaccacaatcaaatcatctataagactgcgactatgcttcttctctatctttctcaactcttttgccatgccctctggttgcgttgttcccttggtgggtcgtattatgtctctctgaggcacgctactagcacgtgtctacttgcatgttaccttcttcagtgaaccctattttcaaagcagtcaatgcattgctgaaaatgtaaataataatcccaaccatacaaactatcgttttttgccattaaactgttaccctaactactcatatgtgtgtaatgtgaacgtaatggtctctataatatatgatcagttcatgttttatgcattttagtatatttttattggcctatttaacatctctatttccttcataattactgtggctgctgtagaaatcttttaacttttataatatgtttataaaactgactgaattgcgtgaattataaattgactgaaattaccttggctgttgtagaaatcttttaactttttttaatatatgtttataaactgactgaaattgcgtgtatatattatgtagtccagtattttgtgtgactgactaaatattttgactaagcacggttgcttggtccgactatatattctgtcacataggcaaaactattgtaaaatcaggtaatgttcttgaatcgtctttgggttgagttttggtgtcagagaagctgggtaagtgggtcagtagagtcgttggggcatatatataaatgtccaaatacattaaagaaagagagagagaaaaggaaattgagttttggggtatcgtggagaacataaatgagaggtgtagcgttatttccgggggttcacacaacctctaaatggtatttacacgtgtcatattgagattgggtaattagtaggcctaaggggggatg

SEQ ID NO: 34288 - DNA, 3000 bp, Unknown
  misc_feature (1)..( 3000): 2750-1469P.txt file - cDNA_ID_3076492; gDNA_ID_1620777; Annot_ID_167798
gttgtgcaattattttactcgttcatttaatgttttagccatgggattagggtgttggagtgtggtggggatttcctcttcttcttgttgttgatctttgtgctaatcatacaaattttactttatatctttttctcttctttctctgtcagaaagaaaatggtgtagaaagcaataaacttttgtggtagagattctgattttgacgtttcagaggcttgttgcgtactgaatgttttttcaacttgttgcttttttctagtgaaaaaccaattgacagaaaaacctagtcataactttttaacaatatgtgtagttgatttttcatgagcttcttttgcttcacttctcgtttaacaataagtaagtataagtactagtcataactcataagtcgcttcactcttgtttatgggtaacaaccttattaggttaccagtttttctaagacttcaacttcttttggtcagatgattattaataaccaataagccataagagttattagctgtaattcctctttaagctcattcacagattctctggatcggaattaataagcgtgtttagataattttacgattaaatttctgttatatcttaataacacaccatataatttttctatctaattaaataggttaaaacaataaagttaaaattgtattttaaatttaatatagaagtctacaaaacgacattctttgtgaaataaaaatttaatcctgaattcgacatttattatgaagaacgtaactttggtctatttcaagtttcaatgatctgagaacaagagtagggagatttttgttgatcatcggaaatagtatcattgccaagtggccactcttatctgcatgttcttgttggagtcttgttggacttatatgtaagtaataaaccaaaactgactcaattttgaagcgatttaaaagtctaggttttatgcttatacatgaatgaaatgcttcaaataagtgactttctttgtggtttactgatattatctctttagaccacatattgtactacaactagcaaaaacattgtggccataacaaatcaaccgatcaggttagctagaaatactgatccttaggagttttttttttaatacaataaaatagaagaaaaactccagctgaaagagttagctgtaaagaaatgaaactccatagattggtagactttttttcagctttgcaggagttttccattatcgtggtcgatctcaaatgcaggttccacttgtactttggtaatattgtttattgggggaaaaaagctgctgatatataaaaacatatcagcttatctttataaactaatcgagagttagcatagagtatcaactggaaaagttgaaaatagatcgatgcaggttttccataatggacgaatgtttatgattaataattttaaaatttgttcaaagtacaacttgcctttttgaatgatctcatctgttttttttttctttggttgtgtgctttatttaaccatctttttctttcacctgaatgaaatcataaactaataaagaaaaaagaagcttacaattgttagacaatattcacatgggatgcgatgttatctactagtttctcagttcaatcacatgcttggtttctttcatgttgatctgatttagtaatacaagttgatcacatagacttttgatttctcacttcttggttgttgtgatacggtaatgcaacttagcgaaagcccttctttggactagctaaaaaagcaacacattcttttcttctaatgcgtggttatcttgctacttagagtggatggtctcttattgacttttatagtcaacatttgtcttgttgcatgcaatatcatcaatgttacatgtttgcatatttgatctagaagataagaatactgcaacgagaagaataggaacatagtgcatgattagcttgaattagaggttcttttggtttttgttataaagtaaaaggtggaaaagtcacatggactcccgtggattccgctaatgaccccaccaactttctctcctaagattttatttttgatttggttattaaaaaaaaaaggagacatagggttctctacacaccacaatcaaatcatctataagactgcgactatgcttcttctctatctttctcaactcttttgccatgccctctggttgcgttgttcccttggtgggtcgtattatgtctctctgaggcacgctactagcacgtgtctacttgcatgttaccttcttcagtgaaccctattttcaaagcagtcaatgcattgctgaaaatgtaaataataatcccaaccatacaaactatcgttttttgccattaaactgttaccctaactactcatatgtgtgtaatgtgaacgtaatggtctctataatatatgatcagttcatgttttatgcattttagtatatttttattggcctatttaacatctctatttccttcataattactgtggctgctgtagaaatcttttaacttttataatatgtttataaaactgactgaattgcgtgaattataaattgactgaaattaccttggctgttgtagaaatcttttaactttttttaatatatgtttataaactgactgaaattgcgtgtatatattatgtagtccagtattttgtgtgactgactaaatattttgactaagcacggttgcttggtccgactatatattctgtcacataggcaaaactattgtaaaatcaggtaatgttcttgaatcgtctttgggttgagttttggtgtcagagaagctgggtaagtgggtcagtagagtcgttggggcatatatataaatgtccaaatacattaaagaaagagagagagaaaaggaaattgagttttggggtatcgtggagaacataaatgagaggtgtagcgttatttccgggggttcacacaacctctaaatggtatttacacgtgtcatattgagattgggtaattagtaggcctaaggggggatg

SEQ ID NO: 34289 - DNA, 3000 bp, Unknown
  misc_feature (1)..( 3000): 2750-1469P.txt file - cDNA_ID_3076507; gDNA_ID_1620777; Annot_ID_167783
tacaacttcctaatgttatagtcttgtttgagaatatatatatgtccgccaaaaacagttgatgattattttaataaacctcatctctactttctcttcttagttctttacatgagtcctaagttgttctttggattccccagtttgctgtgaaaaagagggttagtttttgctgctgttatttcactgatgaagacagaacatttaaggtcagattgatgaatgaacaaggagaatttgagtagagattggtaccgtgtaattgaagaaagggataatagtgaaataaaaatggaaagtaacaagaaatctaaactgtaaaagagactcacattttctgatccttttggtatgaaatgtggaatgcgtctacgcatgagaagacatgtccaagacacatacataaagagagacacacacacaaacgcctctatccacattttattttccgatcgaatctttgtttatgtatcacctaagctgataagaaagcttatgtgttaattttagtgttgtgtaatctctcctaaactccaatctctgataaatttctcatgtctcaacagcctgaagcgccttcctctgtttcctccaagtccaaaggttattcatgaatcaatttgaacatggctccaatctgatattatttacttttaaggattctgtaacacatcaactatacatttagtaagataagaacaacaaataggttgaaatgttagttaataatgtagttttcttgttctttttataagttgaaattaagaaagggtctatgcatggaaacatatttttggggttatattgttctgtaggaagataaacagttgaggaaggaaagactgcattggagaaacatgtgtccttctttgaccgaaacggtgacggcattgtttatccatgagaaacctaccaaggtaacatacataattaagtcataaaatatgaacaagattttgatgtgttgcttattcttatctttaacttaaacaaacataattaaatcgttgatgtatacccaaaaagggatttagagcactcgggacagggcgtttcatgtcggcttttgttgctgtcttcttcaacatgggactcagccagaaaactcgtccggtactaactaatactacttctctttttttgtttctccactcttggttttgcatgcgatcaaggataccataagttaagaaattcaacggctaaaccggaatatactaataaaagaagaaggaaatatgaatgaatattttgattttgtttctagggttgattatgcaaacaatctatataggttcaactattcggatatatcttaccattgtttttgaaaccatttgtatgcacggtagtgacaaccgacgtctacgacaaagacggaaggtttcttaatttccttgacatcttttgttaaaagttaaaacctaattacaaaatctaactttacaaaagtgtaattacttctatctcctaaattttacagatttgtggaatcaaaattcgaggagatattcaacaagcatgctcgcacacataaagatgctctcactgcaaaggaaattaaacaaatgcttaagactaacagagaaccttacgatttcatcggatggttcgttgtttataaattaaacaaattaaattataatcacaacgtaacgtatcattcagattttcattgtaaaaaaatatacatattgcacgatatgcttatacctaattatatcacaggctttcagattttatagaatggaaaatattacatacgttagctcaagacaatggtttgttgacggaagatgcagtaagaggcgtctacgatggtagccttttccaacaactggagaaaaaaagatcatcttcttcatctcgtggcaagaaacaaaaactaccttaaatgcgtgaatcttcttatattactatgtggagatcaaatgacttgtggtttatataatttggagatcaaataaattttgtaatgaataaatttgtataatttggatatcaaatcatatttaaatcattatattgacaaaaatatgcgatcaacaacaacaacaaaaaatcattcaaacacttatgaaaaagtacacttcatttagattaaaatacatggttgtataagcccgttttatcatctaacgataatttaaattctaaaatttctaaactagagaaacaaaatgttatcatttttagctatatatatatatatatatatatatagctaagaataaatgacataaagaggatttaagtagatagtaccgtgtaagccaagaaaggggttataatgtcaattaaatttataagaggggaaaaaatcagtaagagtctcacactttgtgatcttgttgttataacaaggaatgcgtctacgcatgtcaatacatgtccaagacacataaatacaaacacacacacaaaaacctctatcgactttatcttggatcgaatctttggtttatgtataagtataactaacacaacacctaacaatagatataaaaaataagtaaccaagaaaataagtaacggcttcttcgatcatttatatgtttatcctaaactaataagaaagcttgtgataatttcagtgttctcactctcatctccaatctgtgatatatttctcatgtctcatcagacagtagcgctagcctctaaggctaagtctcctaaacccaaaagtaaagtgttcacgacccatttagcatgcccacatgtatcatttgagcatggctccaatttttcaaattaatttagaaaatttaaatatgcatataacttggttgatatatatacatataagaataacaaagtatgcataagatttacgtataggttgaaaaggtccttatatattttttcttttaaattcttaacatttttggaatgtttttttgtttttgtttttgtgagtcgaaaaagggtctatgcatggaaacatatttgtgggattatgttgtttatgtaggaggaaagttagataaggaaaaaatg

SEQ ID NO: 34290 - DNA, 3003 bp, Unknown
  misc_feature (1)..( 3003): 2750-1469P.txt file - cDNA_ID_3076511; gDNA_ID_1620777; Annot_ID_167781
gcgggaaatttattttggaatattttaggcaaaaaatattaatatttcattttgtaaacctaaaacaatttccaaataagagtaaaatggtcgttaaaaatttaaagagggtagaaataaaaatggataaaataaaagagtatagttgaaaaggggcatcataaaaaaggcattagaaataatttttcatgttttaaatgacaataatttaaaagttaactaaaagagtctataatgggtaataacaaacgtataacactagtgaaaataggacttgtcaatccatgaattaaatattttcatggatacggtcgtagggaaataaatctttccgtcagtcctaaaaagcctaaattattggatagacaaaaatctgaaaatcttaaatcacacgtaaatcaaacgtatttacccccacatggaacttaatccaatctattaaattcaggtggcgaccgttcattggttcttgtctctagaatcccaaaggactcgtttccgagtataaaaatacgttcctcaattcaaagtacaaaccaaaaacagaaccgaaacagaaaatggcgggaaaatcctttatgactccggcgattatgctcgccatgcttctccttatttcaccggagacttacgccggtcacgactaccgcgacgctctccgcaagagcatcctcttcttcgaaggtcaacgctccggcaaacttccaccagatcaacgccttaagtggcgccgtgactccgccttacgcgacggttcttccgccggcgtggatttaacgggagggtactacgacgctggagacaacgtaaaattcggattcccgatggcgttcacgacgacaatgatgtcatggagcgtcatagatttcggtaaaacaatgggaccggagcttgaaaacgccgtgaaagctatcaaatggggaacggattatctcatgaaagcgactcagattcccgacgtcgtctttgtccaagtcggagacgcttactccgatcataattgttgggaacgccccgaggacatggacacactacgaaccgtttataaaatcgataaagaccattctggttctgaagtcgccggagaaaccgccgccgcactagcagccgcatcaatcgtgtttgaaaaacgcgatccagtatactccaaaatgctcctggaccgagcaacaagggtacttttctttaaagtttctttaatttcgtctttttgaaatgatagggaaaaaaaatcgtgattttgtcaaaaaagtgttaacaattggttatatactttgcttgtgtgataaatattctcttcattagtttctaataatgtttgtttccgtactttcgtgacccacatgcattagtttagacctaatatgaagtatggaactactttgtttttgttagaaacgtatgaaccatttcacattacttaatgtaaagaacttttgacttgtgtatattttcgacatctacgaaaataaactaagtttatggaaaatgtgaatggacataggtgtttgcgttcgcccaaaagtaccgaggagcgtacagtgatagtctttatcaagcagtgtgtcctttttactgcgatttcaacggttacgaggtaattatacaaattttaccacagtttgatatatctttcataaacatttgttgatgaaaatgttgcgtgtaggatgagttgctatggggagcggcttggctacataaagcgtcgaagaaacgagtgtatagagagttcattgtgaagaaccaagttattctaagagctggagatacgatccacgaatttggttgggataataaacatgccgggattaatgtcttagtctccaaaatggtattgatgggaaaagcagagtattttcagagttttaagcaaaacgctgatgagtttatctgttctttattgcctggaatttctcaccctcaagtccaatactcacaaggaggattattagtgaagagtggaggaagtaatatgcaacatgtaacatctttgtcttttttgttactaacatactctaattacctaagccacgcaaataaggtggtgccatgtggcgaatttacagcttctcctgctcttctccgtcaagtcgccaagcgtcaggtaactaaactaaccaacattcctctgttttagcataatagagagattcattaacgtaagtgtttggtggcgtacgttaacataggtggactacatactaggagataatccaatgaaaatgtcgtacatggttgggtatggttcgaggtttccacagaagattcatcatcgtggcagctcggttccttcagttgtggaccatcctgatcgtatagggtgcaaagacggatctcgttatttcttcagcaataatcctaatcctaatttgctaattggcgccgtcgttggtgggcctaatatcaccgacgattttcctgattcgagaccttactttcagctgactgagcccactacttatatcaacgcacctcttttgggcctacttggttatttctcggcccattattgatttcacacctcgaactcgaacgaagcatgaaagtctatttttgttgtgaaacatttttagttgattgttaccgattagtagattcactagattctctaaatctacgaacaaataattgtataaattaatcgagtacacaataatcaatttttaatcatatgggagttaggaaaaacaaagagtaataatgagagaaagggggagacaagagtaattaatattttgatgaccaaactaatcaaaaatcaggaatttgtcttttggactttggtcggctgctttacgcttaacacaaaagaacgctattttgtctcctccacgcaattacctcttctcactctcagacattttgtcaaacagatggtgctcgtttctgaatcagcttaagaactaacaaggagacagacactaagcttggtttttctctccgattagacggaggaaaaagtgaaaacgaggggcttagacgagtgatgtgatagagatg

SEQ ID NO: 34291 - DNA, 3000 bp, Unknown
  misc_feature (1)..( 3000): 2750-1469P.txt file - cDNA_ID_3076511; gDNA_ID_1620748; Annot_ID_166700
ggaaatttattttggaatattttaggcaaaaaatattaatatttcattttgtaaacctaaaacaatttccaaataagagtaaaatggtcgttaaaaatttaaagagggtagaaataaaaatggataaaataaaagagtatagttgaaaaggggcatcataaaaaaggcattagaaataatttttcatgttttaaatgacaataatttaaaagttaactaaaagagtctataatgggtaataacaaacgtataacactagtgaaaataggacttgtcaatccatgaattaaatattttcatggatacggtcgtagggaaataaatctttccgtcagtcctaaaaagcctaaattattggatagacaaaaatctgaaaatcttaaatcacacgtaaatcaaacgtatttacccccacatggaacttaatccaatctattaaattcaggtggcgaccgttcattggttcttgtctctagaatcccaaaggactcgtttccgagtataaaaatacgttcctcaattcaaagtacaaaccaaaaacagaaccgaaacagaaaatggcgggaaaatcctttatgactccggcgattatgctcgccatgcttctccttatttcaccggagacttacgccggtcacgactaccgcgacgctctccgcaagagcatcctcttcttcgaaggtcaacgctccggcaaacttccaccagatcaacgccttaagtggcgccgtgactccgccttacgcgacggttcttccgccggcgtggatttaacgggagggtactacgacgctggagacaacgtaaaattcggattcccgatggcgttcacgacgacaatgatgtcatggagcgtcatagatttcggtaaaacaatgggaccggagcttgaaaacgccgtgaaagctatcaaatggggaacggattatctcatgaaagcgactcagattcccgacgtcgtctttgtccaagtcggagacgcttactccgatcataattgttgggaacgccccgaggacatggacacactacgaaccgtttataaaatcgataaagaccattctggttctgaagtcgccggagaaaccgccgccgcactagcagccgcatcaatcgtgtttgaaaaacgcgatccagtatactccaaaatgctcctggaccgagcaacaagggtacttttctttaaagtttctttaatttcgtctttttgaaatgatagggaaaaaaaatcgtgattttgtcaaaaaagtgttaacaattggttatatactttgcttgtgtgataaatattctcttcattagtttctaataatgtttgtttccgtactttcgtgacccacatgcattagtttagacctaatatgaagtatggaactactttgtttttgttagaaacgtatgaaccatttcacattacttaatgtaaagaacttttgacttgtgtatattttcgacatctacgaaaataaactaagtttatggaaaatgtgaatggacataggtgtttgcgttcgcccaaaagtaccgaggagcgtacagtgatagtctttatcaagcagtgtgtcctttttactgcgatttcaacggttacgaggtaattatacaaattttaccacagtttgatatatctttcataaacatttgttgatgaaaatgttgcgtgtaggatgagttgctatggggagcggcttggctacataaagcgtcgaagaaacgagtgtatagagagttcattgtgaagaaccaagttattctaagagctggagatacgatccacgaatttggttgggataataaacatgccgggattaatgtcttagtctccaaaatggtattgatgggaaaagcagagtattttcagagttttaagcaaaacgctgatgagtttatctgttctttattgcctggaatttctcaccctcaagtccaatactcacaaggaggattattagtgaagagtggaggaagtaatatgcaacatgtaacatctttgtcttttttgttactaacatactctaattacctaagccacgcaaataaggtggtgccatgtggcgaatttacagcttctcctgctcttctccgtcaagtcgccaagcgtcaggtaactaaactaaccaacattcctctgttttagcataatagagagattcattaacgtaagtgtttggtggcgtacgttaacataggtggactacatactaggagataatccaatgaaaatgtcgtacatggttgggtatggttcgaggtttccacagaagattcatcatcgtggcagctcggttccttcagttgtggaccatcctgatcgtatagggtgcaaagacggatctcgttatttcttcagcaataatcctaatcctaatttgctaattggcgccgtcgttggtgggcctaatatcaccgacgattttcctgattcgagaccttactttcagctgactgagcccactacttatatcaacgcacctcttttgggcctacttggttatttctcggcccattattgatttcacacctcgaactcgaacgaagcatgaaagtctatttttgttgtgaaacatttttagttgattgttaccgattagtagattcactagattctctaaatctacgaacaaataattgtataaattaatcgagtacacaataatcaatttttaatcatatgggagttaggaaaaacaaagagtaataatgagagaaagggggagacaagagtaattaatattttgatgaccaaactaatcaaaaatcaggaatttgtcttttggactttggtcggctgctttacgcttaacacaaaagaacgctattttgtctcctccacgcaattacctcttctcactctcagacattttgtcaaacagatggtgctcgtttctgaatcagcttaagaactaacaaggagacagacactaagcttggtttttctctccgattagacggaggaaaaagtgaaaacgaggggcttagacgagtgatgtgatagagatg

SEQ ID NO: 34292 - DNA, 3000 bp, Unknown; identical to SEQ ID NO: 5310
  misc_feature (1)..( 3000): 2750-1469P.txt file - cDNA_ID_3076533; gDNA_ID_2926146; Annot_ID_197728

SEQ ID NO: 34293 - DNA, 3003 bp, Unknown
  misc_feature (1)..( 3003): 2750-1469P.txt file - cDNA_ID_3076533; gDNA_ID_1620845; Annot_ID_170185
aacaaacagaacatcttgaagatctaaagaagagcctaactgaacactgccttgttttgtagcggttgtaaaacgtccatcaggaagtttaatcaaaacaggaggcatatcacaaacattacggagaaatgcaagagaaccagtcatatgatttgtggctccagaatcaattatccaagattcaagaaaatacttaccagactgatgatcatttaaggtagatttccgttcctcaagaatcgtttgtaaaattttccattgtgaatcattcagcccactaagtcctatgcgatcatctgatgtcaatggagaagtgagcgatgaattcgtaacaacattggcagccattccagaagaagcgacatgattaatagaagatccacgaccatgactctgttttcctttgaacgaacttaaaccaccacgtgaagaagatgcagtgtttttaagacgcaatttttcttcgagccaaggaggatacccgattaatttgaaacattgttcggcgagatgaccaacacggccacaattactacagactctgttttctgaagaatctcgaggtcgtgaagtagtttggaccgcgaagctaacaccgtcaaccctctcgttatgtaagcgactcaaggatttggattcttcgtcttgtgtcaaagcattgtaagcttcctcgagagaaggtagtggcactcgagagagaagagccgacttgacagctccgtacacagattcatcaagtcccataagaaactgatgcaatttgtcttcttcacgttcttttctgacgtcgtccatggttttagcttgttggtaatccgccaagctacaccacagttgagagagacagccgtagtaagtttcaatggccactcctttttgacgacaggttgctaactctgttttgagtcgctgaacatgttgtccattcttgacaccaaagcgtttctgaatgtgtgtccagagctcatgagaatcgtcgagatgagacatagatgtggaaacagtttcatcgatggtgagcttcatccatgaaaccacaagagcattgttggcagtccaatcttcgaaatcgggatctgtctcaactggttgtggaatagatccatcagcaaacccaaatttctttctagcttttaacgccaaacgaagatttgtggcccattcgtcgtagttgggtccacgaagcaacggtttggagatgagagttccgggattatcaccggatgtgagatcatatggcgagattgtacgccttgtttcagtcctagctggtgtggtggagctagcgagagccaattcagtactcatgatgaacggagagtttgatgcaagtattaagtagagaagttagaaggaataagaaagcgatctcttatagcggaaggagagatcacagaatcgatcacaaaaaccttttagtagttaggtattgtgctctgataccatgtcaagaatcaatcgaggttgtgaaaagaagattcttattgattacggcaagaggcaatgcctttatatacacgataagtttagacctagttaatctatacaatataaatgggctaaggccacacagcccaacatatattgctcataaacaaacttttcaattgaggcaagtctcaacatgttttgatcaaatcgacgcttttctaaaccactttgttttctctttttgcatcgtgaaccttccttgatttggaccaaacttggaatataagagataacatattgtttacagtttccgtctacaagattcagtttttctaagtatccatcctctccgacgatgctaataaatgttttgagacaattagagtcggggtcaaggtttctaccgaaacccatgaagactttcttctcttcgtctacgaagaaactatgtgatatctttatcttaggtctcgtatcaattctaaataacttgctccacgacaccgtttcggcatcaatcttagtcgtaatccatatctccaactcagataacgctgaaataaagctgcaagcttctcttctttaacacaagataaagtcacatctacagcgctgcacggtagagggagaagcggcccgaatctctctcttgtaaaatcaaaacagataatgtgatctttgtgaccctgtgacctcctttctttagcacaccagtaagtgtttcccttaatagaaacgccactggaagaacaatgtacaccccagtgtggagtgacatcaagagttgtctataaacccgagtcaaaatcatagatttcataccaaaaagattgtgtttcgggtgtattgtagaaataatctagaaacctcaggaacttaaaggtacgacaagattccttatcttcgtatccaagagcataactaaacctatcaaatccattcggaggttgagaatatcggaggttgatccaccttgtatgcccccaatacggattccaaaccaaaaccctagtaacgtcgtctttcaagatgcataacaacaaaccctcaaagtggaaaatattagatatactcacttgattgtgaatgaaaagttgacctttaacctctatagatggatcaaagtcgacgacaccgctcattaaacaaagtttgtgaggcatcatcatgatcatcatagtctctccatctcttgttggtgttgtcactttaccaatgtgcatcttcgtaaaaccctcacttttggataaattgttccaagttttgcaagttaatctcaccgctttcatagatttcaaaggaaccctagaaatgatctcctcgatcaaatcccttggaagattgtagatcatcgtcgtcattgtttcaactttcacaacgaatgatttcttgcagcttagggaaaggaaaaaggtatacacgacgacaaattataaccctaaataaatttgggccactagtgggctttcagaatctaattgggcttaagcagacccaatttgtatctggcgcgaggttttagtttctgcggaggaggagatgatcgacgattcgtctcttacggcggagatg

SEQ ID NO: 34294 - DNA, 3000 bp, Unknown; identical to SEQ ID NO: 5310
  misc_feature (1)..( 3000): 2750-1469P.txt file - cDNA_ID_3076533; gDNA_ID_1620778; Annot_ID_167840

SEQ ID NO: 34295 - DNA, 3000 bp, Unknown; identical to SEQ ID NO: 28514
  misc_feature (1)..( 3000): 2750-1469P.txt file - cDNA_ID_3076537; gDNA_ID_1620778; Annot_ID_167832

SEQ ID NO: 34296 - DNA, 3000 bp, Unknown
  misc_feature (1)..( 3000): 2750-1469P.txt file - cDNA_ID_3076542; gDNA_ID_2926145; Annot_ID_197699
tccgtcacagatatcagaaagttccgtttcgattttgcttctgtagtcacggatcaacgaaacgtggtcatcgttaccgcgagactcctccttttgttcgatcgatgaaatgattctccacgaagcacgacgagctccgatgacgtttttgtaagcgacggagaggagattacgttcttcgacggtgagttcgtctttgtcaacagctttcgcgactttctccatgaattcaaccatttcttcgtaacgctctgcttgttcggcgagtttcgccatgtatacgaattcatctcttgctgaggaagctcctggtgtcgccattgttgtttagatcggagaagaagatgatgaacaaagtgaggaagaagaagaagaaatgattctcagatctgagagagtttttttttttttttatcggctccgtggatttttgtttttgtttataatgaatgagtggggagcgatgattacggattgtgagaagaaaggagagccgttggattgaaagctggcaaaaacacggattcgtaacgaaaaaaggcgctggcttttcagatactttttaggtcaagtttgaattttcaatgattggaaaagggtatttctggaaattacttatttaatgggcttttttcctgcgaaacgggtttattgaatgggctttaaagcctattttacggattaactcatttgcgcgtgggtgaattaattattgaatggcccgaataggcccaataaatataacgcttgtattttggtatacttactgatttcatttttaatcggatatccgatatgaaatatgaaaaatagaaaatttaaaacccaaagatggcaatatttcattaagatttctttagctgttaatctttagtatttaaatatttaatttaatgaacgtaatttcataaaatttacaaacaaatacgtcaatcatcgtaaatctagtgagccgacatcgttaatttacaaatattattataaacatttaattatctctttttaaaaaaaaattaagaggaccaactgttataataagatattattataaacatctaattattttttttattttttttatttaagaagaccaactgttctgttttggatactcataattactatatttctaaggctataagtcctcatcactttagtaaaaataaattttgtggattggtttcatcccctctattaggaacatggacaacatccatttgcatgtcaagaaggctttgcatgtctatgtaagtaagttttatatttatttgaagatctcggttttttttttcttttttgtgagatcataattataatattcgtgtatttactaaaatttaatttctctatgaaaaaaactatttgctgaaaatagtatgcacaaaacgtacacacatatcgttgttaaacaagcaaacatgtagagtatcgattaaacgacatatgtatatacacaattttcctgaagttaggattttatcaagatttctttcaagtttgatcttgcaaggtagagagaaagcctcataatttggagtcacactaaagacaatgataggtctttgagtcagagataatggagttttaggttgaataactaatgctctaacccctcatattggagtttcagctaggaaccaaaacattcaaaaggaatcaaacacatggagaatacacaaacggtgtttaggatggatataatagagattacaaccttatcgagattcgctttaggatgcataaaatagtaggaggcaagaagtcaagagactttcatgggcatcgatgtagaaaaagttctctgccacagaggaaaaacaattttaaggtcctagaatctacatttcattaaggatatatagtagaaccgcgaatgtggttaaaattaaccgttggagtgaagaattggataggcttttgcttttcaaacatgaaatcaacaaagtcctttgtagttgggcatataagatagattcatctcagaacttcctggctccatcccaaacaagatgttgtaggacttattccaacgtgttcgttgtttatcatctagaagcgtaaacatgagaaaagagtaagcatagattataaacaaaatcacaaagtttctagattccacataacgctaggaactcatcaatagagaagcagcaactaaaaaaaaagctcaccttttaatttccatgtttctttccaaaaacgatcagtgaaattacgtatagctttaatttttccccaaagcaaggattgaatcttgcgctaacaacaaaaatgttcaaattttaataattatggaacaaataatcaaaatattcataatttaataggtcttgcgcaaaactatctatttttacccacaataatagcatgtatatgggtgatactcatatggtatcataaggaatttttaagtattatttataatgtttgagattttttatgatactcctactaaatatgtttgcactagatattaacccgcggtataccgcgggtaagtttatattttagttaaactaaaaatctttttttgtaaagatgattaataaatttatgatattattttatttgattttaaatatataatacactgcgagttgtatatgttttgttgatattttttatattctttaatgttgatattctatgttttgttgtatatgttgtgttgttctttttagtcgcatatggggggtggtggcgacggagagagcaaaaatgtttctttggttagtcgggaatcaagctctaatgacggatgctgagcgatttagaaggcatctgtgtataacagatgtttgccaagtctgtaaggggggaagtgagacgattattcacatccttcgggattgtcccgcaatggcaggactttgggatcgtatcattccccagcggcggaggagatccttctttgcacagtcgttgatcgaatggtagcatgataacctaggtgatgaccgggaaatatatgagagtgtatggtctacggttttcacgatg

SEQ ID NO: 34297 - DNA, 3000 bp, Unknown; identical to SEQ ID NO: 34296
  misc_feature (1)..( 3000): 2750-1469P.txt file - cDNA_ID_3076542; gDNA_ID_1620778; Annot_ID_167823

SEQ ID NO: 34298 - DNA, 3000 bp, Unknown; identical to SEQ ID NO: 5319
  misc_feature (1)..( 3000): 2750-1469P.txt file - cDNA_ID_3076589; gDNA_ID_1620779; Annot_ID_167855

SEQ ID NO: 34299 - DNA, 895 bp, Unknown
  misc_feature (1)..( 895): 2750-1469P.txt file - cDNA_ID_3076593; gDNA_ID_1620779; Annot_ID_167854
gaattccacaacagacctgaaagaggctgcaatagttgtcataagaatcaatcctctgcttcaacgtcggagacaacctcgcatacaaatgtcgaaaccacatctcacggtacagaagacagaacacatggtcgttgtctacgtaaggagcaatcgcttccacacttggccacggcgtgtccttgaacagacgctccgatatgctctggaacgatgtctcacacatctggtggatctcgtacacgttcttatcccttatgtgtctgtacatgtgtgacacgaacgacttcaccgaatccggcaccatatttgggtcgtacccactctccctctcccccggaccttcctcatactcattgctgctcgccattctcgccggatcaattcttagcggccgcaacaatgttagctcttaactcactaccaccgcctagggtttccttattaccaccggttctatcatccggtttcgtttccttattaccaccggttctatcatccggttatgtttttttataaagtcattttaataaaactttctatggttcggaaaaaaaaaacttcacataatcatcgctattctctctctctctctctctctctctctctctcgctctcatatttgcaggtaaagcttcgttgattcgtcctctttatgttcaattatagtttcgcatccctcctatgtctttctttctagatcttaaagcagagtcattgcttaaccctaattatcactgttcttgtataaaacacttttcacctaatcattgagattgttacgggatctgataattgcgtctgtgaattacaagaaattagggtttatttcttcttgattttagattgatctttttgcagttgacaattcgttctctttgggaaattagagatg

SEQ ID NO: 34300 - DNA, 1123 bp, Unknown; identical to SEQ ID NO: 5342
  misc_feature (1)..( 1123): 2750-1469P.txt file - cDNA_ID_3076607; gDNA_ID_1620780; Annot_ID_167919

SEQ ID NO: 34301 - DNA, 3000 bp, Unknown; identical to SEQ ID NO: 5327
  misc_feature (1)..( 3000): 2750-1469P.txt file - cDNA_ID_3076619; gDNA_ID_1620780; Annot_ID_167914

SEQ ID NO: 34302 - DNA, 3000 bp, Unknown; identical to SEQ ID NO: 5328
  misc_feature (1)..( 3000): 2750-1469P.txt file - cDNA_ID_3076623; gDNA_ID_1620780; Annot_ID_167913

SEQ ID NO: 34303 - DNA, 3000 bp, Unknown; identical to SEQ ID NO: 5330
  misc_feature (1)..( 3000): 2750-1469P.txt file - cDNA_ID_3076627; gDNA_ID_1620780; Annot_ID_167909

SEQ ID NO: 34304 - DNA, 3003 bp, Unknown; identical to SEQ ID NO: 20721
  misc_feature (1)..( 3003): 2750-1469P.txt file - cDNA_ID_3076631; gDNA_ID_1620780; Annot_ID_167907

SEQ ID NO: 34305 - DNA, 3000 bp, Unknown; identical to SEQ ID NO: 20724
  misc_feature (1)..( 3000): 2750-1469P.txt file - cDNA_ID_3076642; gDNA_ID_1620780; Annot_ID_167897

SEQ ID NO: 34306 - DNA, 3000 bp, Unknown
  misc_feature (1)..( 3000): 2750-1469P.txt file - cDNA_ID_3076654; gDNA_ID_1620780; Annot_ID_167892
aaaaggaccttcagctcaccaattgcttctaaagttttacgccacaagcctccgcagaagaatcgaggcctttctcccttcatgtttgacttgcccaaacacgtttcctgctactctctctaagcttgttttctctaacatctcagtggctacaaaagaatccgcagccatgtttggtgacgatgataatcccgcatattccaacaaagttgttcaatgggcagagagggaagttgaatatttggtgcggttggttaaagaaaacgcttctccttccgaaacagcttctgcattgcgggcagccagtatatgtcttcaagattgtcttaactattgcaaagtgttggaaccacaaggcttatttctgtctaagctatttttggtgctgttccgaccttatgttgaagaagtgttggagttgaattttagacgggctcgaagggttatctttgacttgaatgaaactgatgagggcttggaatcaccctctgactttgtgacaatattatctgaattcgctatcgcttcagatactatgatgactgattgtagcattcgattcatgcaaattgtgcaagtaagttgattttgaacactgatcttactattttctttgattctgttggcataaatttatagaagctttatttgttctttcaggacatacttgagcagttaacacacctagttgtgttacactttggtgagagtgtactaacgaggatattgcaactatatgataaatacatcgactttctgatcaaagccttgcctggccattcagatgaggatggtctacctgagctccaagataataccgtactcgctagagctgagacagattctgagcagcttgcgcttcttggagctgcgtttacaatacttgacgaacttttaccaagatcacttgttaaagtctggaaactccagattgaaaatggcggaggagaaggtgagaatagtgccgctctaaacagtagtgctgcaccggaactgaaagaatggaaacgccatatggttcaagcatttgacaaactcagaaactacttctgtctgcagtttgtcttgagcttcatctactctagggaaggactaacgcgattagacgcactcatttatttaaccgaaacaccagatgacttgcatctgccgtctttaccgtttcaggtctcgccctcttctttgatctagttttatagttcccagtttataagttttagcacacagaatcatctgtgtctgttcttatgcaggcattgttttctaagctacaacagttggccataattgctggggatgttctgcttggtaaagagaagctgcaaaagattctactagcgagattaacagagacggttataatctggctatcaaacgagcaggagttttggagtgcattcgaggacgagtcaaatccacttcagccatctggattgcaacaggtagaaacactctctttcaccactcttatatacctcagctattctctgatctcaggctcagcagtcaaagattgaaaatttgaaatgggaaacaattgaaacttgatgttgaagttcatttcttgagaagattggggttgaaagttgaagttttgttgtcacgtgttgcagttgatcctcgacatgaacttcacagtggagatagccaggtttgcaggttatccatttaaagtagttcagaaccatgcatcagtggtgatcaatcgagccatcaacatattctcggaaagaggcatcaacccacaaaggtaattgaaacaacactctttttgaattttcttccaactcggtctcaacataacgaattacctaaaaagtgtattattctctttcaccagctcactcccgaagacagagtggttcacagaagccgccaagtcagctatcaacaggctactcatggggtctgaggatgcttcagaaccggaagaatatgagtgtgaagaagaagaagaagacgatcatcacatcgtcctccctgagatggatgacgactcagattccgaagatacatcttcactctccacagtggactcgttcgagtcatttgcctctgcaagcatggctgacctagagagtccatctttcaccgattctgagtcttgaccactttctttgtagtttgtatcctgtagtcaagtctctcaaaactctcaagttaatatatataaagttaaccgaaatcatctgcaaattaaattactggtttagattggtttaagtcaattagtataggcccattgttagcccattagggatgaggcggttcttgagggtttgtcaagcataaaataattcagacaagccggtgaaaaagaaaagtcgtacgcgactctctctctctatcttttatttcctttgggagcaaggcggtctatcactttcagtcgctatatataatcttcctcatcgctccattttctcctacagtctctttctctctctccctgagaaaacaagggagactaatcggaatctcctgcgtatttgattcttccggcgattgtttccttctttatacgctttcgtatattcttgtcaggtaccaaactttttccccctctttggttgtgagcttctaatcatttgttttatcgttctctttgattcagcaatatcgaagccaaaatttgtgtgttggttggtgttggtcaccaaaatttcttagatatgataaaatagggcactttgattttacccccttttttagatcccaaagaaggaggaatagtttaggcgtcttgctatcaattttcgattcgtttgatttggctttagttaatttcaacatcgttgtagctgtgtaagattttattgttacgtagattggtttgctcgtattttcgtgtgtggtgaatttatctgggccatcaatgtttgacattgctagaatctgaatgtttctcatttgcttttctttttgtacagaagcaccattgctccaacagtgacgggtacaggatctagttctgtgtttgtggagtcaaggcagaatatg

SEQ ID NO: 34307 - DNA, 3 bp, Unknown
  misc_feature (1)..( 3): 2750-1469P.txt file - cDNA_ID_3076662; gDNA_ID_1620780; Annot_ID_167887
gaa

SEQ ID NO: 34308 - DNA, 3003 bp, Unknown
  misc_feature (1)..( 3003): 2750-1469P.txt file - cDNA_ID_3076684; gDNA_ID_1620781; Annot_ID_167956
gtgactgttgctttttgttgtgttcatatcattttggtaaaggtaattgcatggtgatgtttcgtctttccgtgattttgtttttgttcggtagatatgacgatccaaacagtgcacaatcttcattttcgatgcttcttggcaatgctcctcatcttgatcgccaggtcagattgctaattcagcgcagactattggctttatcttaagatgactagtagtaataagattggaggtattcaacagtatgctgtgtttggtaaagttactaaaggagatgaaacattgagtaagctagaagaagttcccactcgccgcgaggggatttttgttatggtatgttttcaagaaaaccagaatttcgttagcttagtcaatagttggatttcattcaactttggtcattcttttaccatttcttttgcagccgacggagcggatcacgattttgtcgacatactattacggtaaatatagtcaaatctcaacttgtttgttagctaaaacatttttgataacatcttctcctgacgtttgatgttgaaatgggacgacacctcaattatggttaactacagtccataaagagagatgtgactctagcctgaatttctttaaaatcaggtcattcatgttgtcctaggtgataagactcaggatctagcctttttgaaagatatggttatgttttggatcatagtaaaatttgatactgacaattaagaatctttattagtactcttaattaaacaagcagagatcccttaacatggaattcattgatttagttcttataatcttgtttctcagacactaaaatggagagctgtgaagaagagagatctgtcctgaaaagaaggcttcaagcatcttttgtggaggtcgaaagacaggtgattgaaatgtctatagataacgttttgatgagaaggctcgagacacatttatcgtaacatttatggtcccttgtgttttgacagagaatgaagtgcttcccgtgaatgaagttaacacataagaaactgttcaacaaaagccttaaaacgccagggaacacaaaggtaaatgtatgtctagtaaaaaaactcagaatgctagacagtttatgagtggtttatcagtgtgagagattgtagttaacagtgtaaacagtttgagacattgaatcatggattgtttccttcactgtctgcaaaaatctgatagtcaccgggacaaaatcccaggttctgagcaccaaatagtcaaatactgaactagtgaaataagcttggagcaaatagcaacaacacatgtgctctgcttttgtgctcttctctctccaaaaaaacaaagcatgtctctcaattcacacaattagtcttttcactttcgttgacttttgtctcttccgtcatcctcacttttgtcactttcctcttaattttacattttaatgtttgtttttgagtcttaaaatccaaacattactacctcttatgcattaaaggagatgggcttgttgtgtctgttgtttagggtttataaaagactcttaataaaattgagacctcaagttttttagttagaaacctatgggtttgtgtttgggaattgtagtggtgtgacaactttaggtgaccggtgacccacatactacttgtttagcccattggttgcaacttaacaaaaatttcatatccagagttttatacaaatttaatttgtctattacaaaacataatctgacacgtgattcacatacccactttatgaatcagaatcacatcgaattcgatttctttaccaatgcatttgcggtgtcgagttgcatgaatgtactggttttttgttcacatgatcagagaaactaaccacgtgagaacatagtattatcaagctttaggcttataacaatattgctcaaatagaaaatgaggcctaagacatgcatgcatatccaagatttgttatgaaattgttattgtctaatcaactcaactaggaatacatttataaaaattaaaaaataaaaaattatgtcggtacaaaacacacaatcttttttggccaacactgtttaaacaagatgccattgaaacaaaacaatgaaattaccaagttgctcaaaatgaaagaaccaagtagcacaaaagatagaaattttataacccgtaattctttattgtttacttacaatcccacaatatcataattttttatttatttaaacaaattgacattcatttataaaaattgttttgaaatttgatgagattcaaaattaacttacatgattaattcatcaaatagttgggattcttagtttgtcgaattctatagaattgacagcttatcaaaatttggttctggtggtatgtttaaaactctttttttttttttggtttttttttttttttgttgtttttttttttttgttgtgaactgtgatcatgtagtttatttatatttttgttgaatgaatacgttcgttaatagctctatagttcgataccgtttaattatgtttaattacgggaattggggttgaatcatcaaacttgaatcttttatctaactttggaatagtgatattatttttttaattgtacaatagatcaaatcaaccaaagttttgaatttttcgaatgtcagattttgtgaagaagtaaatttatatcatctacatggatatatttaaagtgtacattcaatttcttagtgtatggacatacattttaatatgtttttttaagaaacattttaatatatttagatgtcaaattagtgtaatttaatttaatggtcagttttctctattttgcccaaaccccgaataaaagacatttgttttggggattgaactgatttttctaaggaatattggtcaaagtcacaagataattactcgactgttttgttcaatgactttatccactttgtttccaagtgtttgaataactacaagttttctacgtttatatttgttttctaacgtattaatgtattggccaaatatttatg

SEQ ID NO: 34309 - DNA, 3000 bp, Unknown; identical to SEQ ID NO: 5358
  misc_feature (1)..( 3000): 2750-1469P.txt file - cDNA_ID_3076769; gDNA_ID_1620782; Annot_ID_167992

SEQ ID NO: 34310 - DNA, 3000 bp, Unknown
  misc_feature (1)..( 3000): 2750-1469P.txt file - cDNA_ID_3076781; gDNA_ID_1620782; Annot_ID_167977
agcagactaaacaactgacggatttgtccaccccgaccaccgtcaccattcaaaccctaagaattaaaagttagttaccttgtcatctcttaacaatgcaaggcacccagagtgctcattttctataagctgttttgcaaccactaccaacaattcattttgtactttctgcatgcatccaaaaacaagaattatcagtgtttacgtatatggttgtaaccaagtcaaaatgctcacaaaaaactcttatatatacctcaactagtttgggctcagtggtagaatgaaggtagttagtgactctttccttctccaatttaagacactcttcagcctttagcatgtaatcaggacaagaatcctcctggctccaccttgaggccttgcgagaatagtaagatgcagtatcttgaagcaagaagctttcaaaatcctcttcgtatattaccatctgtccaaccccattcccacaatagacatctattacgtttttcactagtgttctatcaatctgttcgccttcacgttctttatgaatctggcaaatacaaaatagtgttagaacaactaaaccagagatcgctactcaattagagattaataacatatacacttacaagtgctagtagcacatctttggcctcggactgtatctcttgataaactaggtcgtgaaaggatgtgaagccaacatcattcagtgttggaagacctctccgagcaacatagaaacggtcaagataaaagcagaagcgagataaccatctaaccagaattttatggttagcccatctcttaacaagctctctcagcatatattcaccatgcctctccctcatagacggcaaaacctaaccaaatatgtaaaaatattagttagaccctttgctcaagtcaaagaaacaaatatgtagttgttactcacagtttctttattgtaatgatcaaccactccacgatacttattataaagctcttgtgagtaatcattaggaggttgttggagacacatatcgtagataatcctgtgagaatccacagtggttagtataagttcgtgaaaaaacaagaaacatgattataacaaaacatacgtgtacagattgatatattgaccggggtcaaacggtggctcagacaaatcttctagaatcctttgtagctttgcaacaccagtcttcatgacagaccatccttcctccaataggattaactccttcatcattatgaccttgaacaagattctacagtaaagtaatactaagacatgagatatatcaaaataactacaacagaagaggttattatcattcaaaacacaaaactaaaactaatcagactaacaacgataacaagatattacgtagccatggcgatgaatccccaagagagaaaacaaagcgcaacacaataatcactgaaagcaaattggagaatcaacaaagtacagagaagccgacgtaaaccctaactcgtttaaaaacgagtatagaaacgtgacgctaaccctaactcgttgaaaatcttaaaccctaattttgtcacgtaccagaagatttagaagactatggaatccgatttcacagggattttggagagctttgggaacctaatagagaaacagaagatgtatatatagagttggtaacccgcggtgaaatttagttattatttttttcttttaagaaaatatatacacttttttttaatccttttttaatagtcaaagtagaagaaacataaaattaacatttttaaggaagtagaaatctggaaactataataataataataattattttattatacagaaagaaactggtgtagttgcctttcctagttcctatctctcatcgattgtgagactaaaattactcaaattttagagatgcaaagcatacaaagacttaaataatcagaaactaattctttgattttttaacgcatatgaaattctagaaacgaattaaattttaaaattagaagataaacatgactaaaaagatatagaataaaataggtagatgttttttttttggtaaaagattaaattttataccatttttgatttgtgacagaattataaagataacaaaaaaaatatcaaaacaatctacagaaaataaatataacataactacttaaatagctttggatcgcttctaattggaaaaagcatagttgcgaggtaaaacaccgattccgaactcgcaaaactcggaaatttgcgtggttgccacagtacctaagcactggaatccttatcttagttgtcatgagcaattctaatcgcgatcagtccacaaaacttcgaaaaacaagcctacagcttcttcgagaactaacgcaactataggtagatgttttgaatggttattatcggttgcaacataaattccgctgagatatagagtttctctatgagtctaggccagagattcatgtctctcaagtgtctctagaattttttcacatatccgaacttggccattcgttgatacatttagtaacaaagaaagctacttcattcgtagatacatttagtaacaaagaaagctactttaaaattcatcacatatttatgtcataactaagtaatacaaatattaaaattaaacaaaataattgtaagaaaactatagagataaaaaagatcttataatttattagatcagcaatttaaaaaaataaaatttcacatcgaattgcatgtattagaaattttagtcaactatataatttattttggtcacaatttctattcatgttaatattttgtaaaagaaaaaaaatagatcactatttggaaaagaagaaacggcgtttaaagtttttgatggatgacgtgtcgcagtttcagtcgttggattaagctgagtatagattacgtaaaggggtaacatagacccaaaaagatcttctaaggtcaaacaaaatcagagatctggtctgactaaaccagacgaagaaccaatttcaacctcctcgccggcaaaaatg

SEQ ID NO: 34311 - DNA, 3003 bp, Unknown
  misc_feature (1)..( 3003): 2750-1469P.txt file - cDNA_ID_3076789; gDNA_ID_2926107; Annot_ID_196648
cggtaacaaaagttacaagtgaaagaaatcagtaattttttatttattttagaagtgaatttggtttgagacaaacacgaacaataaacttataaatctacttaattaattttctgcttgctgatgagttctaaaaatttggtgctattaaagattaaacaaatgccgattgcagatctttcacgtggttaatcaatttataaatttttaaaacaaaacaatcgaagttcaattttatttttgtcgtaatcgaagttcaattgttggatacaggtctgacgcgatcgtgataagattttatatgctatttaaaagaaatcatgtggcctggccaaacacacaagtgttattagtaaaaaactatcttcagacttgtcttatataaatacatttatttgtatcacctattatgaattgttttttctccatatatatacgttgggttatatcttatttcaagtgggtagcttatactctctctgttcctttttgtttgattgtttagaaaaaacacacatattaagaaaatatattaaatgttgattataaatgtattatttttagtgttttacagttttctataactctaaaccaatgatagttaactatttttcttgaaaattacaattcaccaatactaaccaataaatattacatagaaaacttaaaaaattaatcttttagaaacaatttttttttctaaacaatcaaacaaaaaggaacagagggagtatttaattgcatcagttacaattttgagaaactctcttactaaaaataatataaacaattaataaataagtagagagaatgacaaaaataaaaaatagtttctctgcagagaaactttggagtaatgatggaaaaactatatgtataggtatgtgtttataattggacagaaactaaattatattaaatatatattttttttttttttgaaaaacttttaaagtatatgtaaatctattggtgagatggctaagtttctcttcttctattttttccttctggatattaagatctattatctcattattatatgtttaatccaagataatcacttacctgccggaattgattctcgttatatgtaaatcatcatgttaaacagttaaaaaaattgtgatatgatcaagtcctataaaagtttgaaatgatgatcaaacccaaacaaaattaagcttacaaaaagagaaaaaaataatatataagccttatgtttaacaaaatgtttagttgatataagtcgtttttaggatctgattggtgcacattttagctgaagaaaatgactcttaacgtcagctcaaaacataccaatcaagtaaaaagacaagagaaaataactatgctagctctactcttcatataactgtaaaaagaaagagatgttttcaccaatacaataggatgaaaatacttttcttttttgtttactccatttaaaagagttacttttactctatatttattatttataccaatgaaatcagacatttatatcagtttataagaggaaataaaactttaaagaaaagagagaaacatagcttttcgccaattttcactgtgtatctgtattcaaataattagagtaaaacagaaaaaaattatacccaatcttaacataattattttcagcctttatttttcagctaagatgatttaccaatcaatttttaggtgagatagttatgatgcctaataaattggaggtgcaaagttcaacaaaaattttacttttatgtttaattgaaaaagactgcttctcagtttaagaactatggcccatttatagatactgattaaaacgtggattgtaaaatgtgggcaatcaatattattttaaaaatgtggagccatagttattaactgtgattaaatttccccctcctccactttcacgcaaactaatatttaaaacagtcttaactgtgattcaagtaataagatttttcttttattattatttgacagtacttcctccgtatcattttaagtgatattttaggaaatgtttttagaatgtagagttgtagaggaaaaactagcagaaaaacaaaaatgcaatttatatatagtacagaaggttagtttaattgtgtttcgagttaaatctcttttttgatatggaaaattattctttaaattaaaatatttaacatttgactttggataggagaagattaaaagctgaaaagctggaacttcaacacttttgagaaaagtgagctacaatagtattaatcttaccatttactgataaataaatatatactttctgttcaattttaatagttttcaaatttattcttgttgcacataaacaacataggatatataatttttttagttaggaaatatatgcttttacgtttctatgaaaattctagatatgattataatttactcttaaaatatgaaatagaaaaatggagtggaatattattatttagaaagatatatatatatatatatatatatatatttgtttgtatgcagaatgttagaccaatataattagtggacatttctataaaaaaacaaaaaattgtggaatggatgggataaaaaaaaaagagagatcaaagataacattttaagatgtttttctttctttaattttcaacaattttaggcaatttagtagtagggggaaatgtatttctatgaaaatccaaatatatgctaatgtatgcaacaaggaaagatatagtaaccaaaactccacttcatattacaaacaataattatttttataaaagtattgacttgtcgtctgcaaacgtgattacgtgaaccttactggtaataatacaaaaatcacagctctaatttgccaacccaatccagatctctctagttctcaacttctcatataattattcattaatatatttattttgagattttggttgattttttgatatataaatattggacttgccattttctattacaaccatcaaatctcaataaagcaaaacgaacaagaaaatg

SEQ ID NO: 34312 - DNA, 3003 bp, Unknown; identical to SEQ ID NO: 34311
  misc_feature (1)..( 3003): 2750-1469P.txt file - cDNA_ID_3076789; gDNA_ID_2926107; Annot_ID_138553

SEQ ID NO: 34313 - DNA, 3003 bp, Unknown
  misc_feature (1)..( 3003): 2750-1469P.txt file - cDNA_ID_3076789; gDNA_ID_1620808; Annot_ID_168931
aaagttacaagtgaaagaaatcagtaattttttatttattttagaagtgaatttggtttgagacaaacacgaacaataaacttataaatctacttaattaattttctgcttagctgaatgagtttctaaaaaaatttggttgcttattaaagattaaacaaaatgccgattgcagatctttcacgtggttaatcaatttataaatttttaaaacaaaacaatcgaagttcaattttatttttgtcgtaatcgaagttcaattgttggatacaggtctgacgcgatcgtgataagattttatatgctatttaaaagaaatcatgtggcctggccaaacacacaagtgttattagtaaaaaactatcttcagacttgttttatataaatacatttatttgtatcacctattatgaattgttttttctccatatatatacgttgggttatatcttatttcaagtgggtagcttatactctctctgttcctttttgtttgattgtttagaaaaaacacacatattaagaaaatatattaaatgttgattataaatgtattatttttagtgttttacagttttctataactctaaaccaatgatagttaactatttttcttgaaaattacaattcaccaatactaaccaataaatattacatagaaaacttaaaaaattaatcttttagaaacaatttttttttctaaacaatcaaacaaaaaggaacagagggagtatttaattgcatcagttacaattttgagaaactctcttactaaaaataatataaacaattaataaataagtagagagaatgacaaaaataaaaaatagtttctctgcagagaaactttggagtaatgatggaaaaactatatgtataggtatgtgtttataattggacagaaactaaattatattaaatatatattttttttttttttgaaaaacttttaaagtatatgtaaatctattggtgagatggctaagtttctcttcttctattttttccttctggatattaagatctattatctcattattatatgtttaatccaagataatcacttacctgccggaattgattctcgttatatgtaaatcatcatgttaaacagttaaaaaaattgtgatatgatcaagtcctataaaagtttgaaatgatgatcaaacccaaacaaaattaagcttacaaaaagagaaaaaaataatatataagccttatgtttaacaaaatgtttagttgatataagtcgtttttaggatctgattggtgcacattttagctgaagaaaatgactcttaacgtcagctcaaaacataccaatcaagtaaaaagacaagagaaaataactatgctagctctactcttcatataactgtaaaaagaaagagatgttttcaccaatacaataggatgaaaatacttttcttttttgtttactccatttaaaagagttacttttactctatatttattatttataccaatgaaatcagacatttatatcagtttataagaggaaataaaactttaaagaaaagagagaaacatagcttttcgccaattttcactgtgtatctgtattcaaataattagagtaaaacaaaaaaaaattatacccaatcttaacataattattttcagcctttatttttcagctaagatgatttaccaatcaatttttaggtgagatagttatgatgcctaataaattggaggtgcaaagttcaacaaaaattttacttttatgtttaattgaaaaagactgcttctcagtttaagaactatggcccatttatagatactgattaaaacgtggattgtaaaatgtgggcaatcaatattattttaaaaatgtggagccatagttattaactgtgattaaatttccccctcctccactttcacgcaaactaatatttaaaacagtcttaactgtgattcaagtaataagatttttcttttattattatttgacagtacttcctccgtatcattttaagtgatattttaggaaatgtttttagaatgtagagttgtagaggaaaaactagcagaaaaacaaaaatgcaatttatatatagtacagaaggttagtttaattgtgtttcgagttaaatctcttttttgatatggaaaattattctttaaattaaaatatttaacatttgactttggataggagaagattaaaagctgaaaagctggaacttcaacacttttgagaaaagtgagctacaatagtattaatcttaccatttactgataaataaatatatactttctgttcaattttaatagttttcaaatttattcttgttgcacataaacaacataggatatataatttttttagttaggaaatatatgcttttacgtttctatgaaaattctagatatgattataatttactcttaaaatatgaaatagaaaaatggagtggaatattattatttagaaagatatatatatatatatatatatatatatttgtttgtatgcagaatgttagaccaatataattagtggacatttctataaaaaaacaaaaaattgtggaatggatgggataaaaaaaaaagagagatcaaagataacattttaagatgtttttctttctttaattttcaacaattttaggcaatttagtagtagggggaaatgtatttctatgaaaatccaaatatatgctaatgtatgcaacaaggaaagatatagtaaccaaaactccacttcatattacaaacaataattatttttataaaagtattgacttgtcgtctgcaaacgtgattacgtgaaccttactggtaataatacaaaaatcacagctctaatttgccaacccaatccagatctctctagttctcaacttctcatataattattcattaatatatttattttgagattttggttgattttttgatatataaatattggacttgccattttctattacaaccatcaaatctcaataaagcaaaacgaacaagaaaatg

SEQ ID NO: 34314 - DNA, 3003 bp, Unknown; identical to SEQ ID NO: 20729
  misc_feature (1)..( 3003): 2750-1469P.txt file - cDNA_ID_3076789; gDNA_ID_1620783; Annot_ID_168050

SEQ ID NO: 34315 - DNA, 3000 bp, Unknown; identical to SEQ ID NO: 5371
  misc_feature (1)..( 3000): 2750-1469P.txt file - cDNA_ID_3076797; gDNA_ID_1620783; Annot_ID_168045

SEQ ID NO: 34316 - DNA, 3000 bp, Unknown; identical to SEQ ID NO: 5375
  misc_feature (1)..( 3000): 2750-1469P.txt file - cDNA_ID_3076811; gDNA_ID_1620783; Annot_ID_168029

SEQ ID NO: 34317 - DNA, 3003 bp, Unknown; identical to SEQ ID NO: 20736
  misc_feature (1)..( 3003): 2750-1469P.txt file - cDNA_ID_3076827; gDNA_ID_1620784; Annot_ID_168084

SEQ ID NO: 34318 - DNA, 3003 bp, Unknown; identical to SEQ ID NO: 20739
  misc_feature (1)..( 3003): 2750-1469P.txt file - cDNA_ID_3076846; gDNA_ID_1620784; Annot_ID_168075

SEQ ID NO: 34319 - DNA, 3000 bp, Unknown
  misc_feature (1)..( 3000): 2750-1469P.txt file - cDNA_ID_3076855; gDNA_ID_1620784; Annot_ID_168057
tttttttagataagtaaaatttttgcaatctttatcttgattagtatttaaaatcaattaatttatgttttaagtgtaaactaaaataaggtagaaaaaagagataaaaacaataatgtgtgatacacttaaccatgattggtactttggatccactaatttatgttttaagaaaatgatattccattataatgtttcccggaaacaaaccgtgatttgcggatgttacaacgtcaattagttcaacatggctttacttaaggcaaaagactacaaattcaaatagtgagactatacagataataatattattaaaaattaagtggattgtttttcaaatcattaacatggtacaaaaattatttaaatatatgtatatttgaaataatcacaatttttcacaaaacacaactcattgctaaccagctcatatgctaaaaaagacaactcatttctccactcttttgacaaaaacagagcaccaaacattaaacccttcaaaaacacaaatctcaccatcacacgtaaaaaaagaaaatatgtctatgcttcttcttcttcttcttcttgtcccattcattactccatcttcgcaatcttccattcgaaacctcctcgaagctcgcggtttaccaggtggtttgtttccagacaacgtggagagttatagtctagatgataagacaggagagctcgaagttcagctacaaaatccttgtttcgctcggttcgaaaacagagtatattttgatcgtgtgattaaagcaaatttaagctatggtgggcttgttggacttgaaggtttaacacaagaagagctttttctttggttacctgttaaaggcattgcagtgaatgatccttcttctggacttgttctcttcgatatcggtgttgctcataaacaaatctctcgttctctctttgaagatcctcctgtttgttatcctcctggtgagtcaaagtttgttcctcaaaacgttttagtgtttaatgccaagtgttttatttattggtaacatatatatgatcttgaacagaatatttttgtagtaataattgtatgtttttatttgtaggatctataatggagaagttagaaaaaagcaagatggatattcagctcaagagatgaatgagtttttttttttttggggttgtgtaagattcaaaactcaaacttgtctctttgaaacttgaacaaaaaatgtgtttttttctttcttcttttacctttttgttcggggttgtttgggaaaccgtggaaagtgtcgggagatatgtgtaaaatctggaaagaagggaggaaaattttggaactttgtataaattatggggtccataaagtaatcaattttgtcacttgtcaattatttttcttttctttatatagagggaatatagagtactttagatatttgtttaacttttgctttaatttttgaggaatgatgttttcgtttaatcattatcctctagcataatcattgacatagaattattctttgaatggaagctcaaagctgcatttgttaccaaacaggcaatcacagctgttaacctaaacacaactgacggattataaaattctagcactgaaatacctatttaaaactttcactcatttttacacaagaagtttaaaaaaaaaaaaaatcaggtagatatttcgggtaaaataaatactcccatttgtaccaaaataaatgatgtttaacttttttacacaaagatcagaagttattatatttttttccgaaataaaaacgtaatttatttatttatacatattcaataaatgataaaataaaatataaatagtcataaggaaaaaatataaaaattttgcatagaaaaaaaagaacacgggtcaatttcaaaccaccaattattctgatatcacagatgtcaatacgcgtcagagtgtgatatatgttagttatatgcgattttagtaacatttttggaattttcagtgttgaatatcacatgtatatcgttgatcaaattattttagtaaacatgttttcaccagttttatttgaatttatagtcatttcaccaattgattctagaatatatttaaaattcttaaatgatataaaggtagttgaaattagataacctaacattttttatgttaaccaaactttttaattaaaaataatatatttataggcacaacctattgtaaattttttaatttacatagttttaagtaaacgagataaaagaatcagttggtgatcttcaaatcggataaagtgttatgagtgtataggagattttgatacaaattgaattctttttggagtcatatattttgtctatgctcaccacagcatcggaagatcttccatcacaaaacagttcacatttgtggtggacacgagagatgaagaatctgtctcaaggtttaatcactgtggtattatatagtaaaaattttatgatgatattaaatcatgattttggctatgttaaaatttgaggtttttggttctaaggattttttttgctagatttatgttaatatctaaagtttaagaaatttgataataattatagttacgtgacataattcaaatttatgatgaactacatttactatatatagccctcgagataataatgttatacatttatttagtagatatattattagataattcaaaacttaaattacattattttgtttatatatttcatattatgttaaagtttaattgataaatgatatttttacgaaaaatttgtataatactaaagataaattttaaaaacatcaatttcgttttatttttattaatagtacataaagaaaaataaataaattaaattaatttgtgactattttggtatatgatcaatgctcgtctttttaagtagtaatcgtgtctgttacaggtgaatgaacccaacaaaaatcttcgacgagcatcttctgctttcttcatctctgaatgatcaatttctagaatcagatcggatatttcgatg

SEQ ID NO: 34320 - DNA, 3003 bp, Unknown
  misc_feature (1)..( 3003): 2750-1469P.txt file - cDNA_ID_3076862; gDNA_ID_1620784; Annot_ID_168061
gcatgaatctcattgttcgtgatcaagttttactccaacatccgaaagtgttcgtatacttgcattgtgaaaagcggtatatttcaaaactagtcgttgattcaactatatatgttgccaccatgaatatactaaacagaaaatggaagaaagctgaataagattggggactataaaatttagcatatgtgtccgataataataaaatccaaatatcgaccgacaagagcttagaggagtgtcggtgtacatatcgatgggatcgaccagaccgttagagaaaacaaccgatgggctgacaaagattcttcggatttaacttatgttgtcatacggtggctgtgacacattcttttgacgttcatttcataacttttattttatcgatatcaacctaaacgaaacaagtgttttcataaataaataaaaagttagtcacgttgcaataatgaattattatttttttcatttttggcggagtggactggtgggcttaagcaaattgatcaaatttgttttgacactttcttagtttatattaaaattaattttaattgcacgatgaaaacttactagtcagtcgcatggatctgacctaactgtctctgtatttcagtgcttcaaagctcttttaagttttaagtcaaaatgcattgtgtcgcatagagagaccattaagaaaaaaattcaattagttcttaattaatattttaataataattagataaattggggcctttatagtcttcatttgtcctcaatagccattatccaataaaatattaccagtttcatttgatatttttgtgtcatatttttaccatttaagacttttcacaattcgaatagccatgaacaataaaaatctacgagtttcatttgatatttttttttttttgccgaatacatttaagactttcacttctactaaccatgaacaatggtctcccaattacaaaatatatttttgaatcattggactaccataaatgattagtgtcttttttgtattacatgtaacgtaaaaataccattcttcaagcattcataacaattttttttttgtcaagatacataacgtaaatttgaatttcgtaataacgatactagcacaatttagcttagaatatgtccaatttttttttttattttgaaaggagatagatatataaatattatatacatggatatcggtgaaattatgtttattatctatgcctatcgtttgataaaacttgtatattttatggacggtgacacagcccggttcactatgcctcgagccgtataatgatcataaagaacagaactggttactattatcaggttcaacaaatccattttttgatattttgtgtggctatcagtctatcacataaaatggaaaaagaattaagagaaagaagaaaaacaaaacaatgacttgtaattaaagtgcaataattgattgacttatcaaatttattagaagaataaaatatttacggaatttagaaaaagctagttgaaaagaataaggaccgtttggtataaagagattgtgaaaaaagtcacaaacacaataggtccagaaacggtgacgtgacacacagatcgaaactcagcatcgatcgacgatcgtcatcatataccatttatccctttagcctcaagccacaagaacaaatcttattttatagtactatttttaaccgaaagaatccgatcgacaatgaaataaatatcgaactcatatcaagtgctaactctaggttttgccattaattttgcgttttccaatcgagctaaaaacaattgatcgtctattaaaaaaataaaaattcctatgatcgctttttcgatctaaaactaatttttagtaatagtaatacctgttaaagtataaatatccctcccaagtactgaaaactcaaacctgaacgagctagcctaggactcaacttttatctcgaaagaatctttgaatattacttttgaaaataagtgagtctaatccttgaagatatatgttttaaagttttttttagcaaatgcgattgagaaaacatatattttaacttcaagataatcattactgtatgaaagtatggataattaattagaagaaacgttgttcaaaaattggttagtcgtttataattaccaaaataataaaacaattattaatacgcttgcatagactaattagtttttttttttcctaagcttactaaagtgatctgataaaaatcatgtatggaagcatgaaagtaataaaaaaatatcaagtttcaaaattttagtctttcatatttatgtacatttatatatatacgcatgcgtagactataatcagtcattttcgtgttttgtctatacaattactaaaaactgatttaatcaaaatcgtgatatgttttctatttctgaccacttaatataaacgatcgatttgtagaatttgatggcaaccaatcaaaggttaccgttagatataatgtctatatataaatagtatccccttttggcatcttgcataatagtaccaaacacctatctaatctcaaattaaatatttaaatatttataaaatgaggatcattatcacttcttcgaaaagctaagcagcaaagaaacaaatctcacaaagacagttgttcttataataatagaagaaaattgagggattaggaacactattattacaacatctttctgtcaaataaaatatttagcttaaggaaaaaatttaaaatcaagattatttaattaaaaaaatcacataggaatgttatgatgatataagtttttgtcttcaaatgtcaactaaattccggtaatttccacacacttgtccgtacttgcctatataaacatacacaccctcataaacatatatcaaaattttacacttatgctcttcatatcacatacaacaaactcatatatataaaaactttaaccttcgtatagcaacgatctagtagaaagcttatactaaaactttctgattctcttaatatg

SEQ ID NO: 34321 - DNA, 3000 bp, Unknown; identical to SEQ ID NO: 5405
  misc_feature (1)..( 3000): 2750-1469P.txt file - cDNA_ID_3076862; gDNA_ID_1620785; Annot_ID_168098

SEQ ID NO: 34322 - DNA, 3000 bp, Unknown; identical to SEQ ID NO: 5398
  misc_feature (1)..( 3000): 2750-1469P.txt file - cDNA_ID_3076886; gDNA_ID_1620785; Annot_ID_168108

SEQ ID NO: 34323 - DNA, 3000 bp, Unknown; identical to SEQ ID NO: 5403
  misc_feature (1)..( 3000): 2750-1469P.txt file - cDNA_ID_3076890; gDNA_ID_1620785; Annot_ID_168104

SEQ ID NO: 34324 - DNA, 3003 bp, Unknown; identical to SEQ ID NO: 20746
  misc_feature (1)..( 3003): 2750-1469P.txt file - cDNA_ID_3076894; gDNA_ID_1620785; Annot_ID_168103

SEQ ID NO: 34325 - DNA, 3003 bp, Unknown
  misc_feature (1)..( 3003): 2750-1469P.txt file - cDNA_ID_3076908; gDNA_ID_1620793; Annot_ID_50482
gaattggtctgcttttcagtgaatttcaaagatattctaatgattgttaacaaaaggcttttcgattgagtgtggttttataaactgctaaggagaattttggtatcaaagttagatacccctacacggctagtgatgaagaagacaacactaagaaaaccctgtgaattgtgaaaaagatttgttacctgcattattgttccatcactatctcacaacataaaatgtgtaagaataataacaaaacgtcttgcgtctccaatctccaaagctaaccaaaaaaaacaatcagaagaagaggaggaaagaggagtagagacgccaatagatctcacggactctcacctattgttaaaataacgccaataatttgttagtacgagatctagtaatagtagttttatttaaatacaaaaccctgtgaaagagatttgttaacttcaaaattgtacttttatttaaatactaaactgcagtaatagtggaaagactgaacaagagatcaaagtaagaatcagagcttaaacgagattatgagaaatatgagaacatgagacctgcacgattgaatgatgatgagacatgaaagggtttcggttcctttttttttacataccttaaatgttgtctactttttttttttttttcaccaaattcttatattaaaattaaaaagatacatgaagattagttttcatcggacaaacccgaataacaaacccgaataacaagtttgaaaattgaaaagttgaccaaacataactcaaacatagagacactagctgaagtaagtttgataggagaccatgagacgtttcgaaactaactaacacaagcatgcccatgagagaaatcgtaaacaacacaaaaacctcgactggtaagaaaatagtcaccgtaactagtgacattaaaacgaaattcaaaccatcaaacgtggttctaggttggaaacaacgtggatttgccttagacgcagacatagagacgtcggagaagtattcggtaaacaagcttcgctgacgatgggtgagatccaaatcaaaaaatgtggtactgaatcgggagtgaaatgggcctacaggagaagtatccggcgtaagcagagggaacccggaaaagtattcggtgaactgttgagagatgaaacgggaaaaggcaaaaggttggcaaagggagagacaaatgtatcccaagacgatgaaggcagatgatgagcgttgcacaatattaaggcagaccaaaataatatgcgtacaacccaataatcttaacgagcctttacgaaatctagaagttcccaagatgggacaagcccaatttaaagtcttcttccaaaaatgtgaagtgaggatttgacctaatccaagcgaggccaagaacaagaggcggcgacagttgacggaggtgacaaggtcatcgaccacaaagattaagagagggcaaagatcactagaaagaggagacgaggagacaacaaccatcagcttcacacataagagtcgattctcgtggctggggaaggagaggagaacagattcaacaacgaagtagccgctggttcttccaataggaggtggagcatgtcgggccggtgggccaaagatcttcagaaaagagatgccaccagatctgcactcgacgagatgcaacaacgagatggaaaatgatgagaggcggaaagacgggatacaaacttgaaaatttcgggacaaaacgcgtttggattcttcgggagatgagcagagaatcaaaaagaagacaacgtccgacgccgacgagccatagctacaccagcgtcgaaagacagaagtttttgaagtgtttcgagaatagcgtctgggagagtttcaacttttatggttaatggtctttttttttattatacctcttttataaggttttttaaagatttcttttttaataagtttttttttggttttaaaaggttttaaaagttaccataaagatgactaggggtccaaacctccataagcccgcatatacatcaaggagcatttttgaaaaagatatttttataaatattttatggtaaaagacgtttttgaaaaaagtaccgtgaaaaggcatttctcaaaatattacaaacttataatcattaaataatttcttttagtattttagtaaattttattcattgacttttaataaatccatgccaccacatcaatgtgtttgctttttttgatcgattgataaagaagactcggaaaaaactctttttttttggattttccatttgcataatttttagattatccaattaatatacaaattatctgccatttggaattatacttatattaataactatcgtccaattttaaatttcatttgctctacaaacttgaaaaaaaaaacttgaatatataaccctaaaagtagagttcaaatgtgagcatccacattagttatttttttcagtgtctattgatgattatttttaaatatcaaagaataaaaaagcaaaagaaagaaatatagatgtctttaaaatgaaaattatgtttttctagaactatttgagacatctatttttgaaatgtctttacttttaatattattttatgtgaaaacatctgaaaagttgttagaatgagaatggtctaatattttcaactgcacgcttatgtaattgaaacgtcaccacagcgccaaatgctctataaataattaaatatgaaatcgtcacaacacaaagccacaacacaaagccacaaaacaatctctatcttatccatctaattttctttggtcatcactatcttatccatctctccctctctaattcatcaggacagagcataagaattgaaggtaatcctacggatctcggcttctatgatgttgcaatattgtagaagaaactctttaaattctcgaatactttaattttaactatatgtgttcttaaactaagaatcaaagtaagtgatcaaattcaaaattgtactcttttttttctgtgtaggtagcaaaatg

SEQ ID NO: 34326 - DNA, 3003 bp, Unknown
  misc_feature (1)..( 3003): 2750-1469P.txt file - cDNA_ID_3076908; gDNA_ID_1620786; Annot_ID_168156
tagcaaatgtgagaagattttcaaggcaatggatgcattttttgatcaatctataaagcatcatctagaagatgagagtattaaggatgatatcattgacttgctcctcaagatggaaaggggagagattgaacttggggagtttcaacttactcgagacaacaccaaaggaattcttttcgtaagtaatatgaacctctcactttgtaatatactttcattcttcacatgttgcataaattttaaaaatatgtactctttgattattacagaatattcttaacgctggaatagacacttctgcacaagttatgacatgggtgatgacatatttgatttcaaacccaagagttatgaagaaagcgcaagccgaggtgagagaagttataaaaaacaaagacgatatcattgaggaagatatagaacgactcgaatatctgaaaatggtagttaaagaaacgtttagggtattaccgctcgttccacttctaattccaagagaggcttcaaaagatgtaaagattggaggttatgacattccaaagaaaacatggatccatgtcaacatatgggctattcataggaatccaaacgtttggaaagatccagaagctttcatccccgagaggtttatggataaccagattgattataagggtttgaactttgagtttttgccgtttggtagcggaaggagaatgtgccctggtatagggatgggtatggctttggtacacttgactcttatcaatcttctttaccgatttgattggaagcttccggaaggaatggaggtagaagatgttgatcttgaagaatcatatggacttgtctgtcctaagaaagttccacttcagcttatcccggtccttacccaatggagttgattttatattttcatagttctaaatgtaacccttaagaagtatcctaaagttcttatccttatcactagatgagtatccacgctatgttgcgtttgtttttaatattcgtttttctaaatttcatatttatggaattatgtgtagacattagattattaaagacttatgttgagaaagttaactacaatgctaccatatgaaatgaacattaaaaaatagctgaaagaagtaatgtaaaacggttttttgaagtgttatgtgtctttacatttagcatgatgtacgtatcttatgttttttttggattgaggagaggcattatcatagttcgattatgcaatgtagcattgggagattttcaaaactgccgatatagaagccactacttcattttactgtttcgtgcaaaaacaagtacattcccagatgtcgtttacactctagctactgtatgatatcttgataatcatcaattgtcgatttacaaatgagcaatataatatgcacgagacacaacaatggttgatgactaaacttcagagaactttgaatccacttgtagttgtagagtatatttgcatattcaggaacttatatatatatatatatatatatatatatatatatatatatatgtataaactaaggaaatactacataaatatattttctttttgagtttaactacatgaataagtaaaatatttacaaaacatacctggagttattctacaatggccagtaaaaaacattaaaaaaaaacttacacaaatccaatatatttatagaaatatcttattcataaaatatcataaaaagaatagcttaaaagatactaatagaaaaacatttcaaactttaagtttatgaagttttttatttataattagttagtgtttctaaataaaaaaaatgttgaaaaaacataaactttcatatttggaacgaaacaaacataaaatttaaaatgccatgtcaaaagcaattgtttttattgttttaaatttgaaaattcatgttgttttggatattattttttcatttctaaatcattcaaggagtgtatttgattattttggtggattttagaattggtctgcttttcagtgaatttcaaagatattctaatgattgttaacaaaaggcttttcgattgagtgtggttttataaactgctaaggagaattttggtatcaaagttagatacccctacacggctagtgatgaagaagacaacactaagaaaaccctgtgaattgtgaaaaagatttgttacctgcattattgttccatcactatctcacaacataaaatgtgtaagaataataacaaaacgtcttgcgtctccaatctccaaagctaaccaaaaaaaacaatcagaagaagaggaggaaagaggagtagagacgccaatagatctcacggactctcacctattgttaaaataacgccaataatttgttagtacgagatctagtaatagtagttttatttaaatacaaaaccctgtgaaagagatttgttaacttcaaaattgtacttttatttaaatactaaactgcagtaatagtggaaagactgaacaagagatcaaagtaagaatcagagcttaaacgagattatgagaaatatgagaacatgagacctgcacgattgaatgatgatgagacatgaaagggtttcggttcctttttttttacataccttaaatgttgtctactttttttttttttttcaccaaattcttatattaaaattaaaaagatacatgaagattagttttcatcggacaaacccgaataacaaacccgaataacaagtttgaaaattgaaaagttgaccaaacataactcaaacatagagacactagctgaagtaagtttgataggagaccatgagacgtttcgaaactaactaacacaagcatgcccatgagagaaatcgtaaacaacacaaaaacctcgactggtaagaaaatagtcaccgtaactagtgacattaaaacgaaattcaaaccatcaaacgtggttctaggttggaaacaacgtggatttgccttagacgcagacatagagacgtcggagaagtattcggtaaacaagcttcgctgacgatg

SEQ ID NO: 34327 - DNA, 2835 bp, Unknown; identical to SEQ ID NO: 5489
  misc_feature (1)..( 2835): 2750-1469P.txt file - cDNA_ID_3076908; gDNA_ID_1620793; Annot_ID_168365

SEQ ID NO: 34328 - DNA, 3000 bp, Unknown
  misc_feature (1)..( 3000): 2750-1469P.txt file - cDNA_ID_3076916; gDNA_ID_1620786; Annot_ID_168151
cattctcattacgatctcttgatctataacaatgtcgcattttcaatacagttacacaattagttatctctaattgtcatgattagcttataatcgagaacaaatcgtagtggtgatttgaagttttggtttatggtttatgtagggagatgaattgaaagtgaaagtaaacaagttgacatctataaagactcagcttccatattcgtattactctcttcctttttgtcgtcctaagaagattgtggacagtactgagaatcttggtgaagttcttcgtggtgaccgaatcgaaaatgctccttattcggtttgtctctgttttgatacatttatgtatttctctttacttgactgctaacttgtggagtttggaataatgtagtttaaaatgcgtgaggcgcaaatgtgtaatgttctcggtcgtgttatgcttgatgcaaagtctgccaaagcgtttaaagagaagattgatgatgagtatcgagttaacatgtaggacattgacttttgtttaatagtagtgctctctctgttactgttctcatggtgtgcttgtgtatgtgtgtgtgttaggatccttgataatcttcctctagtggttccgatcgaaagaattgatccgggtcagggttctccttctgttgtgtatcagctaggatatcatgttggtcttaaaggccagtatgaaggggtaagtaggcttggattcttcactatttgcgttgcatgtgatagcatgattttctaaaccgttatttgcatttacagagcaaagagcaaaagtattttatgcacaatcacttggcattcactgtccggtatcatagagatatgcaaaccgatgctgcaaggattgtgggatttgaggtcaaaccatacaggtgcaatttttgttaacagattggactcttgggatctcctctattttgcagaactaaatattttatacttgatttgtagtgtcaagcatgaatacgagggacaatggagtgagaagacccgtttgactacctgtgatccccacactaagcgactggttgttagctcagctacccctcaagaagtcgaaaataagaaagaaattatcttcacatatgatgttgactttcaggcaagttcttgtttgactaatcagtttatcaccagatagttttgtcttagtgagatactattgtgttcctgttctcactgttttgatttttgcgctgatgtcttcaggaaagtgaagtgaagtgggcgtctagatgggatgcttatcttttgatgagcgacaatcaaattcactggttttctattgtcaactctcttatgatcgtcctcttcctctctggtatggtagcgatgattatgctaaggaccctttaccgtgacatttcacggtacaacgagcttgagactcaagaggaagctcaagaagagactgggtggaaactcgtccatggtgatgttttcaggcctccagccaattcagatcttctctgcgtctatgttggcacaggtgtccagtgtttaggcatggtacttgtcactatgatcttcgccatgctcggatttttatcaccttccaaccgtggaggtcttatgacagccatgctcctcctctgggtcttcatgggactctttgccggttacgcctcttcacgtctctacaaaatgttcaaaggaacagaatggaagagaattgccttcagaacagccttcttgttccctgcagtcgtctcagccatcttctttgtcctaaacgctctcatctggggacaaaaatcatccggagctgttccctttggaacaatgtttgctctgatcttcctctggtttggaatctcggtccctcttgtctttgtcggcgcttacctcggattcaagaagccaccgctcgatgaccccgtgaaaaccaacaaaatcccacgtcaaatcccggagcaagcttggtacatgaacccaattttctcaatcctcattggaggaatcttaccgttcggtgcagtcttcatcgagctcttcttcatcctcacatccatctggctcaaccagttctactacatcttcggtttcctcttcctcgtctttgtgatccttatggtcacctgcgccgagatcaccattgttctctgctacttccagctttgcagtgaagactatctctggtggtggaggtcttacctcacctcaggctcttctgcggtctatctcttcctctacgcagccttctatttcttcacaaagctccagatcactaagctcgtctcagctatgctctactttggatacatgctcatcgcctcttacgcgtttttcgtgctgaccggaacaatcgggttctacgcttgtctctggttcacaagactcatctattcctcggtaaagatcgattgattcagaaaaacattcaagagaagtacgaaagaaagaaggaaggtaatatagttaatgattttcacaagtttgtttttgctcaataggggtctcttcttgtttcgctctggttttggtttacaagtaacaaaagaaaaggttttatatgtaaaccttttctttttttagagtgtattctgtttgattttcccaaatgtcactttggattatcttccttaattgacaattatgtgattctttcatttctatttatatttttatactctcttgtaaactttactttagcattttcttgattacatcaaattctaagcactctcttcccgttaattgcgttttgcggacatcaataaattctgtctctgaccgttattaagaaaatgaaattactgtatatctaatttcttggaacctgagtctcaatggtaaggacttgacacgtttaaaataacaaccgttgggaccaacagagagtagctgcaaaacaacattcacttccaacggctagtttctcttcttcccctatataaagacccaatcaatcacaaaagagcccaaataagcaacataaaatctttctctttatctctatatagctcatacacaaacttcattctaatg

SEQ ID NO: 34329 - DNA, 3003 bp, Unknown
  misc_feature (1)..( 3003): 2750-1469P.txt file - cDNA_ID_3076918; gDNA_ID_1620786; Annot_ID_168150
catccaagaacatcccactttgttacttacagcgagagccagacatttcgacggagaggtgtcataagactactcaagtccaatacaaataaaaattcaaaacagaattgccataacgagccaagtttacaatttttaaattacaatgactagtaagacaacaatgtttacctaccaaatcaacagtttgatctaaagtaaacagagaaacaaagaaagtatattccaacaaaaaaaagttcctggtgtttctatcctcgtaacattttgaatagaataagctttctctcttttctttgaacaaccaaatcgatcaacacatggatcccaaaaacaaccaaacaaaaaccatatacgtggactgcgttatggagcttaatgttgttgatagatttacaaaaccaaccattcggttcttttccttgatgattcaggacattcctgtagtccctaggattgaacctgaagcagtttcagagttaagatggaacagattccaccagttcttgtaattttttcagaccaacggtggctatgagttccatcgagacaaaaacttcattagattttgctttctcttcttcctcttcctcttctttgagaccgcctgtgagtttaagcttctctgcctcggattctgcttcttgcgcttcctcaagtagaagattagcttcttcaaggtcgctcagttccagagcagctgatctctcagcttttgcagttccactgtcaatccgcaacctctggaatctactaatagccaattctttttctttcgacaaaatcaacttctctatctcttgtagcctcttgatggtttcttcaatctcatgctctgctttttcgagctcagcgttagcttttcctgtttccatctgtgtcttatccttttctaaatttaaagacttggcttctgcagctattcttccagcttctttaaaatttctcgttgatgcagccactttcttctctgcttcaagctccggcatccttttctctatgaacataattttatccatgaaagatgtaatgttctgttggatgatcgactttttagaagatcgctccttaagtaactctcgggtactggaaacctcctcttgtagcttctgtacttcctcagaaagcttctcttcgatatttacaagcttagctctctcttctctagttttagacacatatgacatcaaacctttccgcaatttaataacttcctcatattcacaagcttcatccgctgaaacacgggcaagatcacgaagtttggctcctctctccttctcagatgtcatgaactcgtccacgtctttcttcttccttgataaatcttcagtttccttgtcaacctcagtgagaccagcttgcacatcgtttaacattttatccatacttgtttgcaattccttgaagccagtcaccacattgttaattctttcctcaactgcctctatttgcgaatcgttctcgtcaatctccttctcctttgccttcaccaaagcaagcagctcctcaagttcatttgccaaatgttctttcttcttctgcagtatctccttctctttcatatcttgttcaacagatccctcaagaataccattcaacgacaaccgaacgttatcaacaacaacagattctatatccaattcgacttttctaacctcaacatcttcagaacatgaatgccatttctccatttcatctgaataaaaagcttctgctttctccagaatcgatccagcatcattctcagcatccgtgccaaaactacgaagcagacaggcagattcttcttcagctgcaatctgagaaagaagaacctcttccattttcgactcaatagcatcgcaatcagattccgcttggcgaagcaatgccaacaatgctagcctatctctttccttagcagcgaggctttcgctaatcctctcagccgcatcgaaatcctctgtctcgatcgcttcctcaagctgcttctcgagctcttcgtgcgtcgtagaagctaatctgagattctcagatgcttgccttttcttcctaatcgcattcttacgagcagaagtaaccgaagcagccaaatcacgagaacgatttagcttcgcttcgatctgagccttaactaactccaaccttgagctaccattaccaacaaccacagtaacaacaggagagtctaaagattgattaccggaatcaaacacttgcgcgacggaatcagatatttgactaactgaatctgatacttgactaacggaatcggattgttgactaacggcatcatcttcgtcttcgtcgagattgttggtttcgtgcctaccgtatccaattcttaatccagccgctctcttcttcctccgtgacacctgacgtccataattcttcgccggagattgatgagtagtgataactgcctccatcggctcaggttggtgttgaaccggagtcacaatcgttaagtctgaaaacagattctcgtccaaagcctccgtaatatctggctgagaagtagccgtgatcagtgtcgcctccgtcacatctggttgagaaggagccgtgatcagtgtcgcctccgccgccttggtttcttcagattgaggcggtgagcttaccttgctgtcaccggagaactgagacgccggtgtaaaaagctccatcccttcgaacagggaatccatatcgtcgccaccatccatcgccgccgatctgatcaatcaccgatctgatctacatttgagtttgaaaccttttaataattcataaaaataaattcactagtttaatgggccttaaatgtttgacttgtcttgggcctattaacggcccatatttgataatgctgacgtcactctttcccgattgtgttagcgcctcttcatctccataaagataaaaatttcaacacttgtcggcgactcagagaatctaaccggaaacctaatctctttacctctgagtctatctacgccggatttttcaattttcaaattctcgattcgattgaagatg

SEQ ID NO: 34330 - DNA, 3003 bp, Unknown
  misc_feature (1)..( 3003): 2750-1469P.txt file - cDNA_ID_3076928; gDNA_ID_1620843; Annot_ID_170107
cggctgcatttctcgagactatctcaccggactgcattgtcaggtactaacttagttttgggtggaatcatattgaaagtgactttatggatggaattattcggaccgttgtagaattagggctaaatacctctatgacggattcaagggataataaatgttaaggaaagtgatttgcactacatgattttccaaacctatgagattcatatgagatgagagatgcgagaaataatggagagatgtgttgagtcatatattttatttcatctgttaagaaaaattgaaaaaagttttaaaaaaaactaaaactttatgttctatttctaaaatcaaaaaaattgaaccgttatccggcatcacgggtcaaagaaaagtttttatggacgtgaaaacactgactaacacaaaacaatcgtaggttgtgttggggtacaatgggttttaccactagtagctaattactacccatgttggttctcttgattcgaaatgttttttcctgttgtggatctgttgggctctttgcggctttgcctattagatttagacgtttcggctttgtaaaattttctttcttatgcaaccaatagcaaatcttttaagaaaaaaaaaaaaaaaaaaacccgtaattaatatcgtaagtttgactttatttgcttatatgccagcgtcaaatccgattgagcacgtataacaatatccaaacaaaaactaataccattatttatacatacatgttgcatcacgatgaaataaacaccttaatggcagtttaaaagtttgtgtgtatcaccagatctgttaccaacacgtaaatctattacgagatctattacgacttacaagagagaaacaaattgtttaataattcaagttggattgctttcaagtagttaaagtgagttgtggaaataaaagaggattgtttaatggttcctcggtaggaggcaacacataaatatatatcacgagtgagagaaactggatttttttatgttcaaagaaagaaatggaaatgataatcatctctctctgcctagcaacaatcctagcccttcttctcctaaaacaatttctgaatcgaacgtacactgccaaagtcaacctaccaccgtctccgtggcgagttccggtaatcggaaacctccatcagctaagcctccaccctcaccgctcccttcgttcccttagccaccgctacggtccactcatgctccttcattttggccgtgtcccggtcctcgtagtctcttcctctgacgtagctcatgacctcatgaaaacacacgaccttaaggttgcgaaccgcccgcaattaaaagtggtggagaaaattttcaacggtgggcgagaaatggttttctccccttacggagaatattggaggcagattaaggtattattttttttgttttgaaaagtcatttattttttatacaataatactttcctatatatatatatattttttttttcgaaatttaggaagggttattggtttatagatttatctatatatacattttttcagccattttagcaaataaatcctaaaatttgacttatttacaactcaatgctattagcattaaatctttttctaaaataattatattttttaaaattcttaatttaaattgtcaatcacattatcaatcaaatttaatccaaacaaacttcacatcaatcccttaaaattagcataaacgtattttgttaacaatattttaaaacaaagttttttgtttaaataaatattgttcttactaaatgttttttgtttaaataaataaatcatgtatttgaacttatttacaaagtcatgctactgaaattaattatttaggaatgaaaatatttaattaaagatttaaatcgtctaaattctttgcttttagagttattatgtcattacctaaaaaataaaaaatattataatttttaaatgttataatttatatatttcaactttataaaactttattaatatttaaacttataaaaagtttaatatatcaaaaaaatttaacatcattatataatatatagagttgtttttttacgtcatattttacggttcgaaattttaaaaatgaacatatattaaccacttggcgaaaaatatgtgggttcaacgtcccgcatcgattaaaatatttagacaatgattcataaacatatcataaataagattaacattaataaaataaatagttttttttgtggacgggtttggcgggacgggtttgacaagacgttacttaataacaattgtaaactataaagtaaaaatattttatagataaatacaatttgcaagtttttatatatactaactttaaaaaatgaattgtccctgcggtgtaccgcgggttaaaatctagtaaggaattgaaaatccaaacaaaaatcatttgttatttaatcattgattttaaaattctaattaaaaccatgtgttattgattcgatgatttataaatactagttaaaatcctttgttattcgtgtagtcatttgtttttggatttgggaatccaaattatgttttaaatggaattgaatggatttgaaagagaaaaatagaaggattcaaatccatgagtaaacacatgttatttcaaaatcaatatatcttgatttcataattaatagagattttcaaattctatatagatttacaaatcaataaaccaataacaccttagtttctgtttagctctcttgatttgctatatgtgcctacaacataaatatgaaagttcagatttgatttagtttacatgagcttgatagttacttggtgaagaaaaagaaaaatatctatttaatatttgagtcatgtgatctatataaattgaaactagaatatgattaattaactgatgaaaatatcaactctgtcttgtgaggaagagtgtatgcatcgtcaatctactcaataaaaaaaaggtacaatcctttgaaaaggtaagagaagaggagataagtgaaatgatg

SEQ ID NO: 34331 - DNA, 3000 bp, Unknown; identical to SEQ ID NO: 5409
  misc_feature (1)..( 3000): 2750-1469P.txt file - cDNA_ID_3076928; gDNA_ID_1620786; Annot_ID_168138

SEQ ID NO: 34332 - DNA, 3000 bp, Unknown; identical to SEQ ID NO: 5428
  misc_feature (1)..( 3000): 2750-1469P.txt file - cDNA_ID_3076986; gDNA_ID_1620788; Annot_ID_168212

SEQ ID NO: 34333 - DNA, 2104 bp, Unknown
  misc_feature (1)..( 2104): 2750-1469P.txt file - cDNA_ID_3077011; gDNA_ID_1620788; Annot_ID_168191
gaattcaggaagctgctatatagtatttttaaaatcctaaatcagcaatgaatttagcaacttttatatttttagatctgggttgttaacatagaatagaaactgcagagcaaaagctaaatataaattctaatcgttttctatattttgtttgtaaggaaacattttggtgtcaagaaagtactcgttactttggaacaaagaaaacaatacccataaatataagataaggtttgagaatgtgagaatcgaggtggaatacaacagaagaagcacaatctcacgtggaacttaggcgtgaagatcctcttcctagaaatagtaagccaccaatttagaatctttctcactttcttattgtttataaaaaaaatgtcttcaaaaagtctttttggttttagcttttttcagcacatttagtccctttttcttgaaatcttagtatgcattgattaatctatatatggttttaaaataacagtttcagtttcattgaactatattcaggtcaatatctagtgtagttacaattgattagaaaagtgcatgcataattttgttttaaaaacttataattcaatgaacacatataatgtacattcatttcgaccaaagtaataaactcactaaaccaactgaaatgttaatgagcttaggcttactactttgttcttaacttaaatatcgaaacccattagcattatgggccttaataagattcatggcccaatgatctttttgcttcatcttctgctttcttctacgacaacctaactcatccacttcttctcctttcacaactcttcttctcttctttacccctataaattttacatattagtttatttttaatgtaaatttgattgaatttgaaaaaatacttggttaaaattagggtttgacccctataaatttgttctaacttccaaatgacccctttagttgatataactttttaatttatcgtccatcataaatttttttgtttatttgaccgctataaaacttgtttgtagatccgccactggtatatacatacattttaatggagctgtgagaatacttttgaggttcaactctcgttacaataccttttgtgaccgatatggtatcaccacctgtatttgcgcataacataactataataactcattttctttaagtgaatcatggttgctattcttttctcaataccacatatgtcaaagcttttttcttgccagctaatttgtactcagtgcgaaaaaaatttagcattgttcaagacgtaccacgaggataacctaaagcgtagacagtttcaccgataaaaggtatgcctccgagctccaaaggatttatatcctcccaaaactcttcactatcaatacctaagatagctaagtcacatccatacctaaacgctttaacttcagctttgtatttagtgggtgaaccatgttttctcacttgcaggtataagtgatcacccacaacatgagcgtttgtaagaatcctcctcccggagattgcaaatcctaacatagatattccaaagccgaacaataccatacgattttttaaaatttggaagtctaataaagaaatcacacgagagagagagaaagagagatgtttatgaataccagagcttgagtattctttctcagttgtttgccaaggttgaacaacatttggctctctagaaaaggagaagatcttcaccaccgcgtctcgagccacatcaacatcgctcacagaagaacaacaacgagatatcaaagaagcattaaaagacgaacgacgacgaagaagggaaggagaatagaaaaatcgatgaatcggagtgctcgtggagttgctgaacctagccacaatatgatgaacagaccggaacaacatgttcttgttaagtactatgtttactcgtattaacgatacataaatatatcatttacttgatactcatattttcgatccataataattacactacaaatctttttaaagattttaatggaaattgttaacattttaatataaggcttttatataatcaaatgaaactatagattctggtagcacataattaatctgttaagctctctcttttttttttactatg

SEQ ID NO: 34334 - DNA, 3003 bp, Unknown; identical to SEQ ID NO: 20755
  misc_feature (1)..( 3003): 2750-1469P.txt file - cDNA_ID_3077043; gDNA_ID_1620790; Annot_ID_168256

SEQ ID NO: 34335 - DNA, 3000 bp, Unknown; identical to SEQ ID NO: 5447
  misc_feature (1)..( 3000): 2750-1469P.txt file - cDNA_ID_3077049; gDNA_ID_1620790; Annot_ID_168246

SEQ ID NO: 34336 - DNA, 3003 bp, Unknown; identical to SEQ ID NO: 16902
  misc_feature (1)..( 3003): 2750-1469P.txt file - cDNA_ID_3077053; gDNA_ID_1620790; Annot_ID_168241

SEQ ID NO: 34337 - DNA, 3003 bp, Unknown
  misc_feature (1)..( 3003): 2750-1469P.txt file - cDNA_ID_3077073; gDNA_ID_1620791; Annot_ID_168310
aaattgatattgtttatttttgtgatactatgtaagtgctgcaatcaaccatttttcttgtattgtatgaaaatgatttgcctaaaatcatatatcagctaatcaaagagatagatgcatatgtgctaattaattaaacaatacatatgaaattatacctcttatataaaaccatcgacaaagagttgtgatgaatgatgatttctgtatattaatgatttttggtgaaacatataaatgattttataaatatgaatggtttgcaatacaatatgcttttatgaattatagtcgtgataaataaagtaaaagcatatctgagacactaacatatacgatatagtctagaatgtggtaaaagtttttattatccttagcttaacatggccatgcatattattgtgagatgaccacctcatgcgtatgaggtagatagatgaagaattggtaaaaatctatgaattgattttacatgactaacttgaacttgggtgcaacactaatctagatcttggtccaatatacgttctactaaatgagaaacaaaacattaaaacatttgaaacacataatttacaagcaagaggaaaataaaatgttggtaacctaaaccacccaaccttgtgtcaacgactcaacgtacacaaatacaattcctcttggctttaatctattatattacacattcctaagacaataataaatattttctttaaaacggaaacagaccgaccaaataaacgaaataataaatctcatacaatgcgatccatttgctatggcctcttgtgacgtatttgaagttcatttaacacagacggtagaaatttattgtcttcttcatggcttacctaatactattttaaaatagatatctttcattgcttaacaaatttataccattcttcttttattcggcacaaatctatgttttgctatcatttgctttgttcggatacaaatgtaaaagagatagttatgtagtaaactaaatgtagtaaacttttaaataagaaaattatgaaataaactcaaatcagcattttcttgatactttctaatagtcttaaatatacacaagaacaaaacataagtatataaccataaattgaagttagctaaagagaacataaatctaaagatggtaaaggaataatatttcttgatttggcctgcgaatatattgagaaaaaagtttccaacaagttaaatgtatcttatataaagcattaagaatggtatatattaatttaaatataacctagaaaaactatgcaaaagatttgtttgggtttgaagattatccacttaaatttggcaattaaattcaagaaactattggtaaattatatatgccaaaaactaaactggcaaaaaatattgaaatctccggagataaccgaaaaacctaagttttatcgattaaatctaatcatattctctagattttctctgaaattaaaaattattctgatgtctataaaaaatcacaaattccatataaaatttcctgtaatcatatatttttggtttggttaaaatttttttttttccaaaacttgaaataaaactttgtataataatactatgcaatagatttgttcgggttagaagattatccatctaaatttagcaactaaattcaaaaaacaattgataacataatatatctctgtaaactatatatgccaacataaaaaatatttttttctgcaaaataaactggcaaaaattattgaaatcttcgaaaatgaccgaaaaaccgaagttttatcgattaaatcttgtcatattctctagatcttctctctgaaataaaaattgttttgatgtctataaaaaatcacaaattccatataaaatttctacagtattcaattttttttttgttttggtaaataaaaaaacttggttctaaaactggaaataaaacttgaaataaaactttgtataatactacaatgagaagcattgggaaataatatagcggaaaaaacaagagtggggggatgaaatgaggtagctgaggaacaagtacggcgcctcctaacaaaaagggatcgaaaaaaaacaatggaggtgtggagtgtggcggaggcagagaccacgtgctctctcttctcttcttctccttcatcttcttcctctcttcatcatctcccattattaactcttctgaccccactttccttctcctcttctaactccaacctaccctcttctctcttccctctcttaaaaccctttctctctccctcattctcttccatgtcctcctctctgttattctttagctaaacacccacaattctggccttctctgatgcctctttaagccaatttgtatctctgcttccttacaaggtttaaagttttctgcttttgctgattttgttatttgggtgttttaaagttttgatttttatggtttagcaatcggaatttggacttgtttttgtgattttttacttgttgttggagttgggttttgttgagtttttgttatttgggtgttttaaagttttgatttttatggtttagcaatgagaattttgcacttgtttttgtgattttaacttgttgttgaagttgggttttgttgagttttcgacttcaatattgtagaattttagtgggtttggggagtttataatcattagttctgagatctctcagatttctaaaggaactcattattattgggtaatgatgctttcttacttgcaagatctttgcttatgattgcgttttgctttttctatactctttttttcttcatgtgattacgcaaaagcattgctgtcatctttgttaattccaccttgtaatctgaagcatctttgtttgttagattaagcaaccagattaggaattgttttaatattcctgttatgttctttcaagtcattttggtagatagcatcagtttctttgtaaagtgattcagtatgtgtttatggctgttttgtagatatatctgaagcttaaagggcagtgacaatg

SEQ ID NO: 34338 - DNA, 3000 bp, Unknown; identical to SEQ ID NO: 5465
  misc_feature (1)..( 3000): 2750-1469P.txt file - cDNA_ID_3077087; gDNA_ID_1620791; Annot_ID_168303

SEQ ID NO: 34339 - DNA, 2359 bp, Unknown; identical to SEQ ID NO: 14249
  misc_feature (1)..( 2359): 2750-1469P.txt file - cDNA_ID_3077109; gDNA_ID_2684093; Annot_ID_190035

SEQ ID NO: 34340 - DNA, 3000 bp, Unknown; identical to SEQ ID NO: 5462
  misc_feature (1)..( 3000): 2750-1469P.txt file - cDNA_ID_3077109; gDNA_ID_1620791; Annot_ID_168287

SEQ ID NO: 34341 - DNA, 3000 bp, Unknown; identical to SEQ ID NO: 5470
  misc_feature (1)..( 3000): 2750-1469P.txt file - cDNA_ID_3077139; gDNA_ID_1620792; Annot_ID_168342

SEQ ID NO: 34342 - DNA, 3003 bp, Unknown
  misc_feature (1)..( 3003): 2750-1469P.txt file - cDNA_ID_3077164; gDNA_ID_1620792; Annot_ID_168320
ttagccattttgacacccctacatattgtatacaagtctaacttacaataataattgtagagtctattttctacagcgagtttgctaacacaatactattatcaaataccttcgattatgaaaaaaaaacattacttataataatattaaaacgtaaagttttaaaattaaactattcttgatatttttgcaatatagtttttcttctttggatttattatatgttacgtaatcgttgaagctttttttttttgaatggtgacaaaaatatcaattttcaatcaaccaaaaatgaaaatatcaatttccattataactttcaaaaagttttgagttccacagtacctatttatatacattcttcgtaaatgtcaaaacaaatcattgtagtcacacttcaacgtctttcactgaattataatcgatttgtggctatgtaaaacaatattaaaacagctgactaaaccgaaaataaaaccttacctattttgtgtatacttttttaaacaaaaaaaataatttgaaaactatgactaagggtccgaatagtgactgcgttttgtggtgtgggagaagtgtggtgcggttcaaatagtaacgaaaatacatatatatatatatatatatatatatatagaaattttgatactgttacaatactgttgcagtgcggttttgtgtacggtctatatcaccatttatagcctaatttaagtgataaaaaaccagaaaagatggcggctaaaaagctagaaaaagagtgactgtaaaaaaatttattttcacatatagattttagcaagaagactgcgacccaaatctaaacaggctgacacataattgtgttgaagtcacgctccctcacagctgggaacattatcattcatcaccaccatgtgcatttatgtgctcatcatcaatttttacattttatatcgtcaagtaaacattattaataagaaaataatgaattatctagttaattatacaaaaatacagtaagttgttttgttcaaagtcagcaaagtcgaacccatatttggctgcggaaacttcatgcgtttttgtcgcaattgccacataacgttggaagattatttcatagtcaatggacgaagttggaagttaatttgtaaaattttaccaagagcaacgaaaactataatatgtcggtaaaggcaatgatttgtaatgacaacttccacatatattgcatagtcatatattaggttacatcaaattttgtaatgactatggaactatggcgtgactaatccgttgttggacacgtacaaatgaacaaaatttggaggatagtcatatatgatataaaaaaaaaagattgttgccaatatgatacatttcactggatttatagattgtgacatccttttaccgacttatgaactacatatttttgtattttgttgtatcagtatgttaggggtcctacgttgacaacaaaatattttcatacgtctaacaaagcaaaaaatgtatttataatatgtaaacacgtcgatggttcgccgacctttcaaaccgaaagaagttgatagcactattatgaagaccgattaattaagtttgaatcggaatttgaattctaaaaagccggtttatttaaatgattaaaatgcaacctacgtcgtacttagttgattatagtttaatatgtttatggtagtcacaaaaattgtctaattagtcgcatttttatgaattcttttttctttccttgttggacaagggatgcttaactattattattcgtagggttttatgttcagagacaatgtttccaaacgattcatctacatttgacagtagaaaatcaaaatatcacaacaaaacgtgtgctttttgctttgtagctagactgtgaattagcattttcttaagttttattaattttaaaactgtgaaaggaagctaaaagtctaaaaccatatgccaccaaaatgatcctattataacttactgaatttaaacatgcattataaaccataattttgtaattgatctaaaaataaaataataattattcctctttgaagttgttacgttttggttttggtttctttatgttaaatttgatttgcttctcgaagtttgaagacaacttttacctctaaaatgactcttaaattctatgttttttgttgaaaaatatagtttgattccaattaaagtttagatatattgcgatgtattttaaatctagttatgattgatattaattttttgaatctagttatggttgatattattttactaagtacattattatcatttctttttacaaactgtattccgacacttaattttcacggtatgttttataagagaaaatatccgcaaaacatattacagagtagaataaatcctttctcctttatatttatattatttaatacttaactctatcaaaatatcctcaacatttataaatatgaaaaacaaaatcagtagtcagtgaacataaaaaaaattatcgaaaattttacgatgagtaaagatcctctctttatttctcaagtaaagcaataatcagaaaaagctaaattgagttatcaaaagcagtttatctaacaaatgttaattaactttttctggtttaatattattgttcactaaccatgcataatcgtataacaacaaaaataatctcattggtaccattacatcaaataataaatagcgggaagataaacatagaaaaagtgataaaacaatctgcttcaagaaaaagataccccagtggacgactagggtcaatgaaaatgaaaacagagacaaatggcaattcgtaattattcacatttatttcagggtactttcgtaaatccccaacctgaccgtttctcgaatctgattacgtggcagtcatcacaaatgcccacaaaagcacttcgctgaaactcaatctcagtcgttagatcagaatccaattcttttcaatacggcaagttgagatccccaaacccatcatgtgtaaccatg

SEQ ID NO: 34343 - DNA, 3003 bp, Unknown; identical to SEQ ID NO: 34342
  misc_feature (1)..( 3003): 2750-1469P.txt file - cDNA_ID_3077180; gDNA_ID_1620793; Annot_ID_168391

SEQ ID NO: 34344 - DNA, 3000 bp, Unknown; identical to SEQ ID NO: 5467
  misc_feature (1)..( 3000): 2750-1469P.txt file - cDNA_ID_3077184; gDNA_ID_1620792; Annot_ID_168315

SEQ ID NO: 34345 - DNA, 3000 bp, Unknown; identical to SEQ ID NO: 5467
  misc_feature (1)..( 3000): 2750-1469P.txt file - cDNA_ID_3077184; gDNA_ID_1620793; Annot_ID_168388

SEQ ID NO: 34346 - DNA, 3000 bp, Unknown; identical to SEQ ID NO: 5480
  misc_feature (1)..( 3000): 2750-1469P.txt file - cDNA_ID_3077188; gDNA_ID_1620793; Annot_ID_168387

SEQ ID NO: 34347 - DNA, 3003 bp, Unknown
  misc_feature (1)..( 3003): 2750-1469P.txt file - cDNA_ID_3077200; gDNA_ID_1620793; Annot_ID_168380
catcaggacctggtgaactttcagcattaatggaaaagacagcattatagatttcttgttctgtaattttctgagtgagatcatgattcatatcttgtgtaactttcgtttgaaaaccttccaagactgaatccatatttgcaggataagaagaggtgaacagatcctcaaaaaactgttctgctatttttcctttttccttattgagagtgtgctcaataccattttcatccaccagaaaactcaagcagtttttaattctattagcttttacagaggcctgaaaaaacttagaattcttatccccaccagccatccatttatccctacttttcaatctccagaaagattcctcctctctaaaggcaatacccaactgattttgaataacagaaatcttgttccaacacggaaattggtaactcttttcttcatccaattcaaaccttaatctcttaattcgattctcagcattataatccttcccttttttccaatgactaatagatttcctacagtcaaccagtcgatgcatagaagaagaattatgagaagaaatattacctatccatgctttgtgaataacgtcttggtattgagggtcttcagcaaatcttttatcaaatctaaaagttcctcggaaaagctcctgatcattgacaaatttcaccaaaaccggtctgtgatctgatccaagcttctccaaaaaccattgatgtgaattaggaaacaaagaaaaccactgtgaatttccaaaacagcgatctaatttacattgaatccattctccatttcttttccctccccaagtgaaactattcccagttctgcccagttcatgcatatcacaggttgataacatattcttgaagtcctgaaaggaggattctactctagatgggccacctatcttctccttattagacaagatatcattaaaatcccctatcagactccaagctgccattcgattcacaccaatgttactgattttatccagaagcaagtgtctgagattctgccttggattaccataaacacaagagataaaccatctcttacatccttgagatatttccaaatccagcaaatttttgtcttcataaagaaactctatatgaagatgttgtttccaaaatattgataatccaccactctttccttccggttcaatagtatgaaagtaatcataacccaaccacctaaaaactttcaaaataaacaggtcagaattcatggtctccatgaggaacaagatgtcagggaaatattcctttttcatttctctcaagtgccgaattgtccaagggttcctcagtccttggcaattccaactaaggatgccttattgatactgcggtggttcttgaggaaccaccgtaatgagagactttactgtactatcagatctttccgagtctgcaattttcttattccttttgatagcagaagcaaactcaatattaagactaacctctttctcttttataccagcgaaagaatcttgcctcttgtgaactaaaggagcttttctttttcttggattcttctgcttaatacttaatccagatgaaccagactcattaaacccaaagaggaatcctttagatgtaggatagtccagattaccagaaggatgactagatctttttggatcaccagtctcatggtttggaatatcatttacctccggcaatattgaatattcttggtgagtggagatagacgataactttgtaggaacaatcatctctcctggtttcagtaagcatttctttccaaaaagaaaacctgagtctacactcctatgatcttcctctgaatctctagtgtttcctacagtagcaaaggggcaaacacttttctcatgagtgagacgttgacaaaggaaacatcttttccgaatcctttcaaaatcaaaagacactgatatcatttcacccgatgggagcagaacttccttaaagttacgcaaaggatttcgaacatcaaggagcacctgaaccctaatatagtcttgtgcttgagatttttccaaatctagttccacagtcatcactttcccaacacaacctacgatttctttgatagtatcttctgtgtagtagtttatcgggatatttctgagtcgaatccaaactggaagaaacaagagtgaatcaacagaaggtttttccacccaacgctccatcaagacacatcactcatcctgagtccatactccagtttttaagatttcaattaaatcatcttctgatttgaaaaagaattgaaatctctcttgggataaagcaacacctcttacccttgaatacaatctccaaattctaggcatgtctaatatccaattagacatcctttggtgagacggattcaaaaacctgcccactatactgcagttatttctttcaatggagcaaaactgtgcttgattagacaatatcagagggctatcatcgttaattgacatttcttttatcgcttgatctaaatccatggtcatctccactactagaagaagaaagtactttcctgatacaaaaacttgatgaaacagctatgccgacagaaaacggggatatcttcggttcttggctcctctcaattatcaaaggaatgatgttgagggagaagttcttatgcccaaagcaaacgggacggcttaattaacggcaagggagaagttcttcaatagagctactatgaaagagaagagagaaaacctcttgttttttaccgagggaaatctaaacaagtcaaaatttgaataagactaaagtattaattgcttctgtcccacttaattctcccacatcttcacacgtactaatatattatacatatatatcaactaaataaaaatatcacaaataaagaactaaaacaaataaaaacgaactttaataaaatcccatatcttgtttctctctctctctcaaagttagtatctcagtacctttacgctttgtttgtctctatcttcttcctgatattcagagaatg

SEQ ID NO: 34348 - DNA, 3000 bp, Unknown; identical to SEQ ID NO: 5486
  misc_feature (1)..( 3000): 2750-1469P.txt file - cDNA_ID_3077207; gDNA_ID_1620793; Annot_ID_168376

SEQ ID NO: 34349 - DNA, 3003 bp, Unknown
  misc_feature (1)..( 3003): 2750-1469P.txt file - cDNA_ID_3077249; gDNA_ID_2926140; Annot_ID_197449
agtaatcaagatgtatttattaactactagagaaaatatttgggctacgcccgggtaattttgataattgatatagtattttaaagttagataacatagtttttgtttaataacatttcttattttttatatgctaagaaatagttttgttctatcctgtgttttcttagatcatatggaataatttcaactcttatgagattggtatatagtttgatacctagcatcgtaggtaggcgactatcatattattttatatagtaatattaagcacattttcgtaactttgtggaatagtttagcaaaagaatattgatcagtatggttttctacgtgaaagattcataatctcaaactgttaagttccagcagaagtggtgtatatgccatcatgctttgatgataagaattagaaggtacgtggtgaagttatacgtccgtttaatatatgcattttttgttaaaagttatgtctgtttaattatgattggtaactatagcttaagatttgaagtttactaaaatctgtgaatgacagcaaaaatttgtaaattattattgaatgatcatttagtgtaaatattttgctggatggccctctctcttctccggacaacatttttatatctatttaaaacttaatttttaagaaagagctcaatattagaaggacacagttgggcaaaaatttagagtcatagcacaaaactactaatacaatggcaaagagaaagtgaagatagggctagaaagtgaaaatattgctggccttattgatgcttatctaaactcatatattttctttgttttcttttccattcctttaattttacctcattacctcatatatttgaactatatattgtgttttccattttaaaaagtagaagacatgggaagagaagaagatagaagttagatagctggatcttcgagttttctttcacctgatttggtatctaggaaaatgttgttctcaagaagatggaagattgtaacagtttggtgagaagcctggaatttggatgatgtagatgattcacctctcgataatcacatattctacatgtagaatggccaaaagatgattatattaactattaagaaaacatattgaccttaacgtatgtagatatatctctaagaaattatgtaaatcatgagaagtaacacttactttgtcgaagtcgtcggagaaacttaaaaccaattataatcttttttcttggaatctctttctttttttctggtaatagaccaagatgtaggttcgcttcaaggaaaaaatcatctttaaaggttcgcttcaaggacgtctttttcacaccataccctctacttattttgtcttctcctcgtcttgtataaactccacactcatctttgatactattgatttggataccctagtttacaggaaaagttgattgtaaaaggaatactaactttgacgcgcaaacacaaaccaaaatatcttcattatagaataatggaacaaacttgattgcaaaagtttattgaaaaatagaatctatcattacaaatttgtttacagaaggatacgaagagatcagttagatttggttacgactcttcgattttggtatgccacatgacttttgttgagaataagaaaattatggtagaaaaataagaaaattatggtagaaataacgattttttatgtgtccaaatgaaatgaatcaagtctctatttatagagtttaaaaagttataaactttatataaatatatgttttaaaaaattttgtttggtatgcaataaatgattgtaaatagataaaagaaaataaaaatctcccaaaatctcaatatccaataaaaatatagcaagtgtcaacatcttaataatctctttttttcaaggaaaaaaaagttttggacaatacactctcattttcttgagtttgaaacacacattccactcacttattgacacgtggcatacacatgcccaaaatttatcttttcaacatgttgaatagtttcaaccaagttgaatccacgtaagattttttaattattcggcaggtgcaatgtggagattcaactattgaataaataattcaacacgggcattgtggatagtcttacactatgaacaatggtcttttcattaaacaccctccacattatcttctttctcttccacatcctttcctttttctttcacagaataattcaatacccactcaaattttatactctacaatggtattttataagagaatttatctctaataattcaaagaaaaataaaatatcagaaatttcagtaacaaataaaagcataacacatgtcccatctacatttaattcgcctccacaatttctatctctaactatttaataacaagtggcaatgaggggtccatttttaacaataaaacattattgaatccgttcaacaccatttaatggacgtaagagttatttctttatacaatatctcattgtaagcattcagttattgaattaattttctcaatatatcattgtagatagtcttataagtatgcagacttggcagattgagggagatttttataaggctgatgtggatagcttgagaggcctcaatgagcttcttttattagtatgagattttatctatgtaaagtttgagcttcatatccaataatttgccatctaattttgacatattttgaaattttaatccttaagtttacaaactaaacttgatatcagttcttgcattagttttgtatttatatttcaaaaacagattgaaaacttaaaatttaacgtacgttatttattaatttatcaagatgttaagaaattttcattaatttatgaagttaattttataataatttaattaagttacgttggatattcagtcacctataaatagtttacatatcttcatgtctagataaccaaataaaaatatattttattacattcttctcatacaggaaaaataagtcagtaatctccaagcataagaaaaatatg

SEQ ID NO: 34350 - DNA, 2902 bp, Unknown
  misc_feature (1)..( 2902): 2750-1469P.txt file - cDNA_ID_3077249; gDNA_ID_2926141; Annot_ID_197455
tttgtttaataacatttcttattttttatatgctaagaaatagttttgttctatcctgtgttttcttagatcatatggaataatttcaactcttatgagattggtatatagtttgatacctagcatcgtaggtaggcgactatcatattattttatatagtaatattaagcacattttcgtaactttgtggaatagtttagcaaaagaatattgatcagtatggttttctacgtgaaagattcataatctcaaactgttaagttccagcagaagtggtgtatatgccatcatgctttgatgataagaattagaaggtacgtggtgaagttatacgtccgtttaatatatgcattttttgttaaaagttatgtctgtttaattatgattggtaactatagcttaagatttgaagtttactaaaatctgtgaatgacagcaaaaatttgtaaattattattgaatgatcatttagtgtaaatattttgctggatggccctctctcttctccggacaacatttttatatctatttaaaacttaatttttaagaaagagctcaatattagaaggacacagttgggcaaaaatttagagtcatagcacaaaactactaatacaatggcaaagagaaagtgaagatagggctagaaagtgaaaatattgctggccttattgatgcttatctaaactcatatattttctttgttttcttttccattcctttaattttacctcattacctcatatatttgaactatatattgtgttttccattttaaaaagtagaagacatgggaagagaagaagatagaagttagatagctggatcttcgagttttctttcacctgatttggtatctaggaaaatgttgttctcaagaagatggaagattgtaacagtttggtgagaagcctggaatttggatgatgtagatgattcacctctcgataatcacatattctacatgtagaatggccaaaagatgattatattaactattaagaaaacatattgaccttaacgtatgtagatatatctctaagaaattatgtaaatcatgagaagtaacacttactttgtcgaagtcgtcggagaaacttaaaaccaattataatcttttttcttggaatctctttctttttttctggtaatagaccaagatgtaggttcgcttcaaggaaaaaatcatctttaaaggttcgcttcaaggacgtctttttcacaccataccctctacttattttgtcttctcctcgtcttgtataaactccacactcatctttgatactattgatttggataccctagtttacaggaaaagttgattgtaaaaggaatactaactttgacgcgcaaacacaaaccaaaatatcttcattatagaataatggaacaaacttgattgcaaaagtttattgaaaaatagaatctatcattacaaatttgtttacagaaggatacgaagagatcagttagatttggttacgactcttcgattttggtatgccacatgacttttgttgagaataagaaaattatggtagaaaaataagaaaattatggtagaaataacgattttttatgtgtccaaatgaaatgaatcaagtctctatttatagagtttaaaaagttataaactttatataaatatatgttttaaaaaattttgtttggtatgcaataaatgattgtaaatagataaaagaaaataaaaatctcccaaaatctcaatatccaataaaaatatagcaagtgtcaacatcttaataatctctttttttcaaggaaaaaaaagttttggacaatacactctcattttcttgagtttgaaacacacattccactcacttattgacacgtggcatacacatgcccaaaatttatcttttcaacatgttgaatagtttcaaccaagttgaatccacgtaagattttttaattattcggcaggtgcaatgtggagattcaactattgaataaataattcaacacgggcattgtggatagtcttacactatgaacaatggtcttttcattaaacaccctccacattatcttctttctcttccacatcctttcctttttctttcacagaataattcaatacccactcaaattttatactctacaatggtattttataagagaatttatctctaataattcaaagaaaaataaaatatcagaaatttcagtaacaaataaaagcataacacatgtcccatctacatttaattcgcctccacaatttctatctctaactatttaataacaagtggcaatgaggggtccatttttaacaataaaacattattgaatccgttcaacaccatttaatggacgtaagagttatttctttatacaatatctcattgtaagcattcagttattgaattaattttctcaatatatcattgtagatagtcttataagtatgcagacttggcagattgagggagatttttataaggctgatgtggatagcttgagaggcctcaatgagcttcttttattagtatgagattttatctatgtaaagtttgagcttcatatccaataatttgccatctaattttgacatattttgaaattttaatccttaagtttacaaactaaacttgatatcagttcttgcattagttttgtatttatatttcaaaaacagattgaaaacttaaaatttaacgtacgttatttattaatttatcaagatgttaagaaattttcattaatttatgaagttaattttataataatttaattaagttacgttggatattcagtcacctataaatagtttacatatcttcatgtctagataaccaaataaaaatatattttattacattcttctcatacaggaaaaataagtcagtaatctccaagcataagaaaaatatg

SEQ ID NO: 34351 - DNA, 3003 bp, Unknown; identical to SEQ ID NO: 34349
  misc_feature (1)..( 3003): 2750-1469P.txt file - cDNA_ID_3077249; gDNA_ID_1620794; Annot_ID_168417

SEQ ID NO: 34352 - DNA, 3000 bp, Unknown
  misc_feature (1)..( 3000): 2750-1469P.txt file - cDNA_ID_3077260; gDNA_ID_1620794; Annot_ID_168411
tacgagacatgccaaacggattgaacccatcagtacacaacccgagataaacgttacgaggttcttccgcaaaccggggatgtaactcttggaaatatctccactctgccgcatctgaaggatgattcatttctccctcctttgattgatgctcagcatgccatcgcattgctgcagctgtcttgtggctctgatacattctttttaaccggtctccaataggtagataccacatacgactatatggtactttggttcgtcgacggtcatctttaggcttccatctttgtgcgccacaaaatcgacaatgatcttcttgttcgtcttctttccagaaaagcatacaattgttcgaacaaacatcaatcgtatgatatggaagtcctaaattgcgcatcaacttttcggtttggtaatgtgaactggtagcctggtttccttctggtaaaaattctgtaaacatttcgcaaacggaatccaccaacttttcactcatattataatccgccttgttctacatgagtcgagatgctaaggataactgcgactggccttcacgacaacaatcgtacaatggagtatttgcaccttctaacaagtcgtaaaatttctttgaatggttacgaaccggttcttcgacattttgataactactatcctgatgataactatcctgatgatagttatcatcaaaccccacgttaaaattaaatgcatcgttcaccatatccacatatggattttctacaacattacccacttcttcatgattctcactaaaatacgtcatatccgtgtaactagttcctatatccatattcaatcttctccatgcttataccaaacataataatcaggcataaatccttgactaaacaaaggactactaactcttctacccgagatgatgtgtttttcattcttgcatacactacaaggacaatgaaatttacctcgactactctgtactataggctgactattagcgaatgtcatgaactcctctactcttgcaacgtattcggttgactaatttcccgttacttcatcaaatctcttgtacatccaatctcgatagaaaccgccaccaccgccattattgaagtttcccgccattataccataaactaaacttatatttttttcttcgaaatcgttttttatttcttttgatgttgttttgatttgttggtgaatgagaatgaagagtgtcgtggattatatagaggattttttacaactattttacgactaaacactgtagacgctcagaaattaggtgtacctacccagcaacgcgaaaaacattttccaatggtattatacgacaactatgcgactattggacgacaaagtgaaaatagtcgtagtatcgtcgcctgttttgcgactaatgtttaaagtcggatatgtagtcgtcaatatacgactactttacgactacttatttttttcagtaatgtcgtcgtcaaatagtcgtacttggacgactatttaccgactaaagcttgtagtcgctaaaatacgactatggaacgaccaatttgtctattgtcgtaacgtcgtcgtccatcagtcgtaatatagtcgcaaaaaaggacgaatacattgttagtcgccttgcgtagtcgtcgtttgcctattttcttgtagtgattgactcattctctccatacatgagccaagctttgtaccccggcataaacccatccccatataaatgcatccaaacttaagataccagaataactcttaaaattagttatgtagaacacggacaatacatttgttttgatttgatggttactggttggtttgtcgcaaatgccatgaattgtttaagaccttctgtatattctggcgttagcaactccgtcaccggatcacgcatgggctggtccatccatgatcaaaaataattaaacggattcgaagaaaccatttctctctggttctattttgttgcttggacgattttgtcaatgagggtagaaaaaataaagatgagaattatcaatttttccgacgagtttttgacggatgtcagacgagttttcgactgattttcgttggagatttgatgatttttttataaataactatacgcacggctatttgaccggacggctacttaaccgagtgtattttgttggaattttgtcggaaaggtacaacatattctgacgaatattagaggtgtcaaaacggatatattttggtcggaaatccgtcgaaatatttggtcggagtttcgttggaaatcactgacgaattgtcgaccattttgaatccataggaaagtttcgacggtgttttgacgggaaacatgtcgtcagaaatccgtcggaatatcattacgaagccgtcgaaaatttctgactatttatttaacgtcggaaaatttgtcaaaaaagtctttcagcacaaagaagagctatacaatggattttgactcggttcctctcaacaagacaaataaggcttttgtgcgtcgatcccttagctcctaattcagattttttttctagattctctttatttctaatcaatttacttattaattcgttcttttgtttatctccctatgtttttttagtttttgaaggttaaaatcctgccaactttagtattatactatatatttcttccttgtatttcacctttggataatttcatgaattattcagacgaaaaaaaaaaaaaaaaacaatattcgttctttgtttgggaaagaggcccaataagggcccaactatttctcacctatcgaaaacaaaaaattctgaaaattgttcgtcgtcggtacgacggagagaaaacgtcttccaaagacgaattgaggcggtggaagaagaaaaaaaaaaatcaaaatccaatttgatcttcaaagtagtgaagaaagaagagaagcaatcgaaattctctgacgatgttgttacaaccccaaagatcctcttatcgattatcgtaattcgtagaaaacgaagcagagagaaaatg

SEQ ID NO: 34353 - DNA, 3003 bp, Unknown
  misc_feature (1)..( 3003): 2750-1469P.txt file - cDNA_ID_3077307; gDNA_ID_1620795; Annot_ID_168445
catctttctcttgatcatcaaaccaatgtactaaacacatggacatcagatgatccaagttctatgttaggtggaaaacgttcaaactgaattggtggaatggtttgattctcttgaaagatgattagggaaagatttaaaggaatccataaccttgtttggtttggttgttaaaaagataagagaaagatttttcagcttgaagttatgtgatttaaactgtgtttttcagcttgaagttatgttgttaaatagatgcggttttagaagcttcaagttagggtagggtgttaagttaaagctctttgatattgatcacagagagcaataaatcacatagagcttttacttacacttaacctaccaagcattcaataaaatagaccataactatgataatacttttacccaatgtaaaccactccaaaatacactagttaacatgcatttatcacagttaaaaaacagttagcttttattgcttagaccaattcagagaaattttgagcgcaataactaagagagagcttttaaaagcttcaagttagtattaggtgttagaatttttttttttttttttttttttttgatcaaaggtgttagaattttatttaaccatagagaacaaatactttcttctaagcatttaaaatattaatgtaatgctatctcaactcaaaaatatattgcatttaaacagagaaacaaataaactaatcaaaagcagacaacaaataatcaaaaccggacatcaaataatcaaaagcagacatcaactaatcaaaagcagacatcaaataatcacatatcaaaagcaaaatcaacaaatcaaactcagacaacaactactagatgaattaaagaaggctcagttctaccttcgtgttatcaagaaatagtgcaatctgtagagcgtggtaagggccaggacagacaggatatcagaaatgtacttctgcaaacatagcaaatgtaatttttaagccataccaatataagaattgttaataacttgaaatcaatgatgacataccttgagattagaatcagccattgtttcatgaaacgctttaagagttacatactggggacgcagaaactttagtggtttgggaactgaagtcattgaacttgttaaagctcggatttcctgcctacaaaaccaaaaaaaaattaaaaactccaacaagggtagaacacaaggagcagaaaagaaagaaaaactttataaattatgagcttcaaagacagtaatctgaaaacccgaagctaatcaagtcaagaattacctcatactctcaagagcagccttctgcaagtccggattaggatcctgaaccatctcaacatagagcttaaggttctgctttagttccaaatcctcttaagactacaatcacaacccaatgtaagtcgagtcattagtcctgtgaacatatataaaaaaaaaaactctcctcacagcacaagttagcaactttttaatccggctatactaatgacgaacaaaacattcactttgaacatgcttattgttttgtttttgtatatctccttatgctttgtaaaaccacgtacaatactgtaattgatatgttctcgtaataagaaaagaatacgaacccacttagtcttcataattagattcatcatatcgaatcaaagatgaaaagatttattacaaaaataaaccaaattaaaaccgataaataagtttttttctactatagacacaacattccaattgccatggtgattgaacaaccataggaaaaaacgattatcatcttcatttcttctctctttgttcttttccatcctctctttgttcatttccatcttcatcattctaacttcctctttgtaacgcccgtgaaccggaaaatcagttagagtttgtttttaaatcatccggtttaattgattgggttaattggaaaccttagagtatgcctataaaagaagtaaactcgaaattagggctttggttagccacttttcgttttataaaggagaaaaagagagaaaaggagaacgagcagaatcgttagggtttgggagaaatcagtttcgtcatatcaaatcgtggtaaaaggtaacgaaatttggcagagttattcccaagtcctttatcgttattctccaatttacagaattggatttggattcaaattggttgagttattcgcagtttcgtgagacacgttttctcagacgcgaattaggaccagcggagattgaaactgagatcgtggtctcgtctgttttccgatcggcacgagattttgtggtcagctttgtgacgtctgcagctaggatttcaccggagagattgaatagttaacggttagtttgtatttgagggtttcgtctttgagactgcttgtttctggtttttcctgtccagtttgcttcaaggttgcttttggttgtggactttttgtaggacgtttctggactgtttcagacgcaaggagagtctctcctgggtttaattgctattagaatcaatttgttaaggtgagtgcgtgaccatgagcttatctgagcgatagggttgtgtgatttgttttgtgtgatgatatgtaggtgtggtgaatgtgttttggatgaattgttcaatgactggtttgtttgtattgtattcgtgattatacctttttatttgcttgtgtgtatagctcgtagatgggaggatcgcctcactaagtatttatgataatacttacgcatctcattgtgttgttgatacaggtaaagataaagtgtgatcgtggaatcatggcaaggaagagaggatgatctaggaactcgtttgttttatttttggtgtttttggttattggaacccggttaggattgttagttattcttggttttgttggtcgaattatttatttattcattaaatagtatttttgacttgtggtttaattgttattctattggttggtttaattagatatttatggaaatatttaattattttttttaaaaaaaatg

SEQ ID NO: 34354 - DNA, 3000 bp, Unknown
  misc_feature (1)..( 3000): 2750-1469P.txt file - cDNA_ID_3077329; gDNA_ID_2926142; Annot_ID_197534
aagaatttaccatctaatcaaaaacttaaacttatttaactattaaaattcatatgtcaccaaaacaaaattatgtatcagtttggattgatagaattagaatttagattttataattaaataaaattatatatcagtttaggtttattaaagtgtggttagaaattaaattttataataaaataaatttatttatttattagataacaggttttgattgataaaataaaatagggtgaacaaaatagttaattgtgacaatttagataaaaacccgaaacataaaacctacacgaacacagatgatgattatagatagacacatgcacgcacgtgggctgaagcaggaggaacagtaataggtgtagtcagtcatttttttcacttcattgcactgccaaatcttttgatcactgttaatcgttgaataaaaacatccaacgcataagtcaatcccctactctcacttccactgcctctctttctttctttctttttttttcgttttccactcattaaccattacttactgactcgtagttctattttggccatttattaccgtcagttcttgtaacctggccaatttgcaaatatgtactttatttctagatttgattagcttatcatctccttttattttcttaacatttgaccattgattgaaaatgattgataagtagctatgttgtatttagagattagtttaattagtgtatctcttgagtgttttattgcaggtttagataacctcatacaagtcgttacatagttatgagtaaatgagtttattaataaatttagagaacaatctatgcctaccggtgaatttttatataataaattgaatgttttattttattgttataattgactttctaatctaaaagatagaattctatgaaattgtacacacttttgaaaacaattttttttttaatagaaaattataagaaattagatccatatggttatgggtattataatatttttatttatatatatatatatatatatatatatatatattcttcttgcatgaccatattaatgagaatattgggatcagagacttatttatagtgtgtttttagtctattgcacttgtgttttggaatattatgatatttaattcaaagatgtacccttaatgaatgatcttttatgatgtcaatgtttcagcatcttatactgaaacagaaaataagaggaggtcttaaaggaaaagaaaacatttcgaatgcaaaaatttaacctttaacattttcgattttttttaatgaaattctaataatattggttctaagcagctgattttatttttttaatagtaagaaataatatatgtatacatatatatttaaatatttactatcaaaatttccggcatagcaagtcataatttgtaagaaatcttacattttgttgtttacaaactctcacaagtcacaatgtaagtttcggtctagtgcagtgatgaggtaaacaaaaaaaaaaatctatcgatgagccaactttttgatctagagccctaggatttgacgatttatatataaataaaaccctaggattttcgtttctttttgtataaaaatgaattcataggcactctatacgtctcatgaatcatgaaatataaatcgagattaaatagaaaattgaatgttgaccgtggaacagaacaagtgttgaaagaagtgtgtttgcagcatggtcttatcatagagccaatagttggaaattagcagaatatcgtataatatccactatcctgtaaagcatttttataattccttttttttttctcggtttctaatgtaatcttctatccgataacaaatattcggatagtgtgatctctccactaatatacatacgaaattacgaaaactaaaattataatttcatcgatttgattaaactccaaaaacatccaagtcttgcatcaaatatgtacatttctatcatattgtttataattctttttttgttatccgtaagttttaggcagaaacccgtacagtgaaaccgaggaccagaacaagataaacgtagtcccctctcctaagtatagaattataatgtgacacatgatcacaatttgttgaacgaactctatgttcaaccactagactacaaattcttgggtttatatcgtattagaagtatatataaatcatacatattttttttaaaacttttttcttgactattcttttaagaaaaaaaaacatttcattactagaaaatagtacaaaatatatcattcaacctagcaagaaaccatagcctgaagtagccgcgaagacctagttgcttaaacactgagtggttcatcttaattcgaatattataaaccacattttaattaagtaaattacttagtcttgttctaatgtataaaatagcctatgagaggaaaacagaagagagaagcctttgccttatctcttgtcccttctctcttacctttattttaattttcaaatatttctttttgctcccaaagcaaacgacgtcttgtcaatccactcaagccacccaacttcttcattattgttaatctctctctctctctctttctctcttcttctctctttctcttttttttttttttattttcttctcttccatgtcacttccttgacgaattctatatacctagttcgttttttcttcctcaaatatatctttttcaatttatttggtttttctttgggtgcaacttcacctcacaaaattttctctctttttttatattaatttgagttaggcctttttgatttcatagatgagtcgtctagtcgtctggatttgatgtggttatagtcttacagagacctttgattgaaataagaacaaaagcaagaatacatacatcctcttcatcttacacccatccttttttatttttctagggttttatttttttttaatttattttttttctttgatttttatattctctctctctctcaaatctttactcatctgggtatg

SEQ ID NO: 34355 - DNA, 3000 bp, Unknown; identical to SEQ ID NO: 34354
  misc_feature (1)..( 3000): 2750-1469P.txt file - cDNA_ID_3077329; gDNA_ID_2926142; Annot_ID_138999

SEQ ID NO: 34356 - DNA, 3003 bp, Unknown
  misc_feature (1)..( 3003): 2750-1469P.txt file - cDNA_ID_3077329; gDNA_ID_1620795; Annot_ID_50496
aataagaatttaccatctaatcaaaaacttaaacttatttaactattaaaattcatatgtcaccaaaacaaaattatgtatcagtttggattgatagaattagaatttagattttataattaaataaaattatatatcagtttaggtttattaaagtgtggttagaaattaaattttataataaaataaatttatttatttattagataacaggttttgattgataaaataaaatagggtgaacaaaatagttaattgtgacaatttagataaaaacccgaaacataaaacctacacgaacacagatgatgattatagatagacacatgcacgcacgtgggctgaagcaggaggaacagtaataggtgtagtcagtcatttttttcacttcattgcactgccaaatcttttgatcactgttaatcgttgaataaaaacatccaacgcataagtcaatcccctactctcacttccactgcctctctttctttctttctttttttttcgttttccactcattaaccattacttactgactcgtagttctattttggccatttattaccgtcagttcttgtaacctggccaatttgcaaatatgtactttatttctagatttgattagcttatcatctccttttattttcttaacatttgaccattgattgaaaatgattgataagtagctatgttgtatttagagattagtttaattagtgtatctcttgagtgttttattgcaggtttagataacctcatacaagtcgttacatagttatgagtaaatgagtttattaataaatttagagaacaatctatgcctaccggtgaatttttatataataaattgaatgttttattttattgttataattgactttctaatctaaaagatagaattctatgaaattgtacacacttttgaaaacaattttttttttaatagaaaattataagaaattagatccatatggttatgggtattataatatttttatttatatatatatatatatatatatatatatatattcttcttgcatgaccatattaatgagaatattgggatcagagacttatttatagtgtgtttttagtctattgcacttgtgttttggaatattatgatatttaattcaaagatgtacccttaatgaatgatcttttatgatgtcaatgtttcagcatcttatactgaaacagaaaataagaggaggtcttaaaggaaaagaaaacatttcgaatgcaaaaatttaacctttaacattttcgattttttttaatgaaattctaataatattggttctaagcagctgattttatttttttaatagtaagaaataatatatgtatacatatatatttaaatatttactatcaaaatttccggcatagcaagtcataatttgtaagaaatcttacattttgttgtttacaaactctcacaagtcacaatgtaagtttcggtctagtgcagtgatgaggtaaacaaaaaaaaaaatctatcgatgagccaactttttgatctagagccctaggatttgacgatttatatataaataaaaccctaggattttcgtttctttttgtataaaaatgaattcataggcactctatacgtctcatgaatcatgaaatataaatcgagattaaatagaaaattgaatgttgaccgtggaacagaacaagtgttgaaagaagtgtgtttgcagcatggtcttatcatagagccaatagttggaaattagcagaatatcgtataatatccactatcctgtaaagcatttttataattccttttttttttctcggtttctaatgtaatcttctatccgataacaaatattcggatagtgtgatctctccactaatatacatacgaaattacgaaaactaaaattataatttcatcgatttgattaaactccaaaaacatccaagtcttgcatcaaatatgtacatttctatcatattgtttataattctttttttgttatccgtaagttttaggcagaaacccgtacagtgaaaccgaggaccagaacaagataaacgtagtcccctctcctaagtatagaattataatgtgacacatgatcacaatttgttgaacgaactctatgttcaaccactagactacaaattcttgggtttatatcgtattagaagtatatataaatcatacatattttttttaaaacttttttcttgactattcttttaagaaaaaaaaacatttcattactagaaaatagtacaaaatatatcattcaacctagcaagaaaccatagcctgaagtagccgcgaagacctagttgcttaaacactgagtggttcatcttaattcgaatattataaaccacattttaattaagtaaattacttagtcttgttctaatgtataaaatagcctatgagaggaaaacagaagagagaagcctttgccttatctcttgtcccttctctcttacctttattttaattttcaaatatttctttttgctcccaaagcaaacgacgtcttgtcaatccactcaagccacccaacttcttcattattgttaatctctctctctctctctttctctcttcttctctctttctcttttttttttttttattttcttctcttccatgtcacttccttgacgaattctatatacctagttcgttttttcttcctcaaatatatctttttcaatttatttggtttttctttgggtgcaacttcacctcacaaaattttctctctttttttatattaatttgagttaggcctttttgatttcatagatgagtcgtctagtcgtctggatttgatgtggttatagtcttacagagacctttgattgaaataagaacaaaagcaagaatacatacatcctcttcatcttacacccatccttttttatttttctagggttttatttttttttaatttattttttttctttgatttttatattctctctctctctcaaatctttactcatctgggtatg

SEQ ID NO: 34357 - DNA, 3003 bp, Unknown
  misc_feature (1)..( 3003): 2750-1469P.txt file - cDNA_ID_3077329; gDNA_ID_1620795; Annot_ID_168435
ctccttttgtagcgcgcatctctcgggggacttgtattttctgtctggcccaatgcttctctctctctctacctctctcacatgcaaatcagcaatgacaacagtctaaagtctttcctttctttttctttttttgtcaacaagtgaaacactaaaccaaacgtcttttcttcttctgttttcttataatatgttttgtattttcggtgtgtgattagtgatctttggatggtataagaagtctgtgctttgtagtttttatgaatcgggtaagagagagataccaaagtggaaaaaatagacagttaaaccattgtatggctatttaaatttaacttggtaatttgttagtttttgaggcaaaaaaaaagattccgcttgtagtgcgtagggtagttgatgatcaggatcttaggacataaactcgcataagttctaggttaggtttgattgaaaacaaaacagattacttggacttttaagttttgttccatgtgtttcatctgaagtaataagtttgcacaaattattaccaaatagtctgcccatgtccgaattagttgggtttaacttggaacaataatgccaataaaaagacgataaaaaaggtaatggaccaataaataaattaaaaatagttaaaaaaattgagttatttgtcttaataaaaattaaatatcagaactattttctattcttaattcaactttataaaaacttttttaaaagaaaaaaaatctatacaaagttttcctgcaaatatagaaaacattttctaaaataaattgttgtatgttttgaaaagacaaagaattttagcagtattttgagtattatacctattttgttttttggactagagtattatactaaaatcaataagttggatacttgattttgtttttcttttttcctttttgatggttttgtttcatatttctatcttgtgtttcatataataaggacatctattttaatttttacaatttatcacatttactaataatgttcttaagaaaccaacaattattgaaccactattttgttactgtgcagtcatttattttctttttctcttacttaattgtctattctttaccacctaaacacttattgccaacccactaaaagataataaaaatttgttttcttagttatcttatgcgtattttgagtctaattagtcaatacatgttctatctgtaagaaatgggctatatagagtagtattaaaaaaaaaactaaatcatttttagggtgattaaagatacatttatatttcgtattttatctttaaaatatcagtttgtaagatctaggaaaaattgataatgacaataaatatgcatgtttttatataaaatagcaaagataaaatttatgttggtaatgtttaacatttgtcaaaagaactgtaaatactttcaaaataacgatttttttattggaaaaattgaacctttatacctcagaaaaaacaaaaacaatataattccacatatgaaatattgctccctatataactgtgggcaacaataatatatgaatttaattttttaaattaatacataatttttactgtagatgatttatgttaattaaaggagatggttggttggtggtcttttcaaaaatggaataatcacagtttctaactgttaataagaatgcaataaagttctaaaagatactaattcaacaataacatcaactagatatgttttatctaggttgtcaatttcttttgttcagtttaataatcattttatataaacaaaatcacaatatccttatgaatgtaaaatctttaaaatagtcttaggttttcaactttctaccatcactgtaatttaaattcaagttttcataattcaaaaaaataagttatgaaaacaatgattattttcctaaaattatatttagcgtgaaaatcgccaaaatgtcaatacataaaaattaaaaaaaaactgaaattcaatttctacatatatttacttataagtagatctatcgatctgtttaggtacttaataataaaaaatattttggttcaccgctaaaaataaactaaaatgttcacctccttttattcatgctaataagaatttaccatctaatcaaaaacttaaacttatttaactattaaaattcatatgtcaccaaaacaaaattatgtatcagtttggattgatagaattagaatttagattttataattaaataaaattatatatcagtttaggtttattaaagtgtggttagaaattaaattttataataaaataaatttatttatttattagataacaggttttgattgataaaataaaatagggtgaacaaaatagttaattgtgacaatttagataaaaacccgaaacataaaacctacacgaacacagatgatgattatagatagacacatgcacgcacgtgggctgaagcaggaggaacagtaataggtgtagtcagtcatttttttcacttcattgcactgccaaatcttttgatcactgttaatcgttgaataaaaacatccaacgcataagtcaatcccctactctcacttccactgcctctctttctttctttctttttttttcgttttccactcattaaccattacttactgactcgtagttctattttggccatttattaccgtcagttcttgtaacctggccaatttgcaaatatgtactttatttctagatttgattagcttatcatctccttttattttcttaacatttgaccattgattgaaaatgattgataagtagctatgttgtatttagagattagtttaattagtgtatctcttgagtgttttattgcaggtttagataacctcatacaagtcgttacatagttatgagtaaatgagtttattaataaatttagagaacaatctatgcctaccggtgaatttttatataataaattgaatgttttattttattgttataattgactttctaatctaaaagatagaattctatg

SEQ ID NO: 34358 - DNA, 3003 bp, Unknown; identical to SEQ ID NO: 34356
  misc_feature (1)..( 3003): 2750-1469P.txt file - cDNA_ID_3077329; gDNA_ID_1620795; Annot_ID_168436

SEQ ID NO: 34359 - DNA, 3003 bp, Unknown
  misc_feature (1)..( 3003): 2750-1469P.txt file - cDNA_ID_3077341; gDNA_ID_1620796; Annot_ID_168501
tatatttaaagatgcacatgagcacataacaagatgtgatcgatgccagcgagttgggaacatttctaggagaaatgagatgcctcagaacccaatccttgaaatagaggtttttgatgtatggggaatcgactttatgggacctttcgagccagcttcatatgaaaacaagtacatcttggtagctgtggattatgtgtcaaaatgggtggaagcaatagctagcccaacaaatgactccaaggcgattttaaaactttttaaaaccatcattttcccaagatttggtattccaagggtagtgataagcgatgggggctcacattttatcaacaaggtttttgagaaccttttgaggaagaatggggttaagcacaatgtagctactccttatcaccccagactagtggacaagtcgaggttagtaacaagcagaacaaagctatcctacttaaagttgtggggatatcaaggcgagattggccaactaagctcgatgacaccctttgggcctataggacagcatttaaaactccaatagggagaaccccttttcagcttctttacggtaagtgctgtcatctccctgttgaagtagaatatagagccatgtgggcaactaagcttctaaatcttgacatagggacaacacaaaaaaagaggtctctagatcttcatgagcttgaagagataaggttagaatcatatgagagctccaagatctaccaagaaaggaccaaagcttttcatgacaagaagattctgcataaagattttaaagctggtgatcaagtgttactattcaactcaaggttcaagctttttccggggaaactcaaatcaagatggtcaggccctttcactattaaagaggtacttccctttagtgcagttgaaatagtttcaagagagggttatgagtttaaagtgaatgggcaaagattcaagaagtacctagtggacagcatcattcccgaaggtgataagtgtgtattttgcaagttttgagcatccatttgtcatcactttagcatcatatcatcactgttttataccatttctcatcatttatcatcactttacatgtttaggatagatttgcatgcatgttgcatatttgtgttgatttcaggtgatttgaagctgttgatgagctatctggaagaagcggacctgatcatgacaaaaccactcgacccagaggtcgagtaggagcttcaagatctcaagagaccactcgacccccaggtcgagtagaagacatcacaacttcacctcaccactcgaccacgaggtcgagcgtcttcatctctatcacctgaccatcactcgatcgcatcactcgacccctaggtcgagtgtcttcactttcattgccagaccactactcgacctcaccactctacctggaagtcgagtatctcctgaccagcactcgatcgcatcactcgaccccgaggtcgagtgtcttcaccttcattgccagaccactactcgacctcaccactctacctggaagtcgagtatcaccatcaccaccactcgactgcatactcgatgacaagcttcagagccttcttcattccacactcaaccagacactcgagcacaaggaagaaaagaagactcaagctattcactcgacctcccactcaaccacatgggtcgagtacagttcttaatccgtcccaatattgcgtcgttttaagtattagggtttcgggatattcagtattcagtatttagtttctgttcttgatttcgtttactgttgttcattctgttatcatcctgctgttacactgttgttatcatgttttcaacttgttcaacgtttatgctttctgttatcatgtctgagtagtgaataggtttctgaggatgggttagagtagtgtagaattctcagtatgctaggtgattgattattggttgatagatcccttttggattagttgttcttaatgtctattgctttctgatcaactggaatttgagcccagacatttccgcgcccaaaaggtgttcgatgaaatgtctgaaccactaattccatagattcgtggccctgtaccaaggtattggttgcagggaacgttttggctttaacttgttgattcgtaatgcctgttaggttagctctcgtcaatggtgattgagtctgggactaggttaacttgagagtctctgttgcggtggcacttagatttggttaatgaacttgttgtctagggttaatttattgagcatgtcaatcacctgtaaactgaggaaacaaaactactcaattaccccatcctcgtgaattctttatgtgattgatttctttgttacgctactgttgtttactgcatcttgtcatctgttgcttagtttctacaattctttcctgttactcgacctgatactcgaccacccagttgtctagcaacagactgtgcagtcgagtatctgttttattttctgactgttactcgacctgtcactcgacctcacccagtgctctacaaagagctgtgttggtcgagtgttttactgtttctgcttgaatttctgttttctgcatgttcacttagaactgctagaacacaccacaacctgttattgcttggcttgacttagtgacttctgatcacatcttgattgttagcatcacacccatttggattgacaacctaaaatactacaacgatatgattagtgttttaggataattgactaaaaacctattatcaatttggcgtcgttgccaattgggtgtttgtttgttatatttgagatttcagacttgcttagatcaagttctttttcaattttcaaatcggttgctaattgtgtgtttttcttgttatcttcttgatccaggtacacctctgctgtatgcgaactcgatcaacaggcaatcagaacctccttttcaacgacaacatcaaccgcatagctcgcgaactcagaaaaaggagaaccttagtcaaccttgtacatcagcaaccactcgaaatg

SEQ ID NO: 34360 - DNA, 3003 bp, Unknown
  misc_feature (1)..( 3003): 2750-1469P.txt file - cDNA_ID_3077349; gDNA_ID_1620796; Annot_ID_168497
taattaaggtttcgtgtttccggttgattttcattgtagatctaattagggtttctcgttttcgtttgattttcattgtagatctaattagggtttcgtgttttcggttgattttcgtcgtagatctaattagactttgatttacaaatcgatttactaatgtttttttttattgtaagatgtcttttactcggaacgattattcaaggtttcgatctcaaggtagtgaaggaaacgcctcggcgattcagaataatcgccatatacattaccacagacgccaatcaatctgaaccatcaagcagatggtgcttctcctccacctgtcaatcaatccccccgcggttctacctatcacactactttgctagctgcccgactcaatgacttgacaataaaagagttacttgctaatcctgacgtgtaggtttgcctagattatgaagaaacagagtgtctgaagtacaacaggcgtgcctgaagcagtacagatcataacagagaaagtgggaaagtagcagttgcttttgccagcgtggcatgttgattggagtgaagaaaaggcgtatcagtttagacaaaggagacgaagtcgttagacataggacgtgggcctagttgtcaagataatgatgaggagctacacttggacctactggataaagtgaagcatcctgccttttccgtgaaatgatataagagaagtttcggtctcttattagggttagccactttacttgtgaaaagtggaagagaagaaaagttaagtagaacttgttcttgtgggtttcattggtgagtgaacaaagagagcacacggctgttgctgtgtttgtgaggtgggtagttttagtatctgataggagcaaatcaggttgttgatgttgcgtaacactgtccaaacttatctctgattgatcagtttgaaagttgttctaataaagtgtgtttattggagttgtgttctttgtctagtcaaagtacttagggatcttttacttcagattagaccctaaccggcctccgggaactctcgggtaagccactaggctctgatctcttcttgtctctgttcagttttgtctgtctgatggtgttttgatttgtaggtttgacgatgactcttcagttgcaactactgtccggagcatttttgaaagagatttcaaagaacctcatgcaaattggacacagacatcagaagcagtgatcgatcgatggtttgaaacctttggtgtaagtcaaataagttgtgttttgtttggtacaacaattgatcttgtctatttctaatgtgtcttatctttgttttgtagcaagtgtataactgggactctacaattatataatacatttcattgtattgattttgtaaacacacaaccacctcatcgatagcattcagagagggattccaaaaagagtcaacaaatctccttgtggcactacaatttatataaaatgatattattttaaatatcaaaacatatgaaagataaaaaatatacattaaatttttaagttcaaggcttgttaaaaacatcataaatttgtatttcaccaacactccttacataaccgagtatgcctgtaaaaaaaaagaaattttaacagaagttgaagaaaaaaaattgctctcaccgtttgtcaaagtgagaaatggtttccacagtttgtcttttcaatcaatttcggacaaaaataccctgggaaaatttcttaatggcatcaaccaaaccgtacagcagttggtatcggtttagttgatgcggttcagttttgaaaacgacaaaaaaaaacgaaacaaaaaaaccgaagaagaagaaaaagagaagagagaaacagaaagatttgagagagaattaaaaagctgttcgaaattcagtatccactccttcatatttcgacatcacttcgaattgttgggtagttgaattgaaccactaaactccaaaatccggcgaagagaaagttgtagttttttctggcgaagtaaggaacctccggcgagatagcaactttcgctatggctgggaataaagcaaacgacgaagtcccgacgaagcagcatacccaagatagtggtccagagaaggagaagcgggtattaagagtttccccgcggagaaaacgctcttcgacaaaggcaacggaggaactgggttagtatctctaatttaccgtttgttgtctttgagtgtatcagaatcgtaaagcttgtttgattaaagggttagaactagtcagaatttagcatatctttaggatggaattttgagttataatctggataatttttgtgtacgtacactaattcatattgcttaactgtatatcacttttaattgcaagcagtccaagtgttgctccgactgaagatcttatagttgaagagttaccaccaagactctttgctctatactggtacccttccaagacgaagatgaacgcgtactctaaaccggagtacatttatgacatagcaaatgcactaaaagggaaaaaagagatgcagtttcttctcgattctccatttagggacctttttaaaatacctgcaaacaaggcttccttctctggtaagcttgtccttggactaatatgccgtcagttagtgacaaagaaggtgaatgagatgtggatggtattcggcggtcatccaatcagatttggattaagagaatttagtatcgtaactgggctggaatgtgggaagtatccctagaagaaagccgtggaggctgttataagagtgaaacatgagtgtaatagtgtttggactactctgtttactgagaggttttgggcgaaaccgagtccaacaattgctgatttggtgagctggctgtaggaggagtaaagcatggaggggtggaagcaactggctctctctcttataattctggtagatggtgtgatgatgtcccacaataaccccaacaggctaactttgaagactgttgagatgacgaagaacgtgcagttcttctgcaaatacccatg

SEQ ID NO: 34361 - DNA, 3003 bp, Unknown
  misc_feature (1)..( 3003): 2750-1469P.txt file - cDNA_ID_3077403; gDNA_ID_1620797; Annot_ID_168518
acatttcttcattgtacaatgctgttttgttcaccaaacatgttgagagaacatcatgacatggatattgtaattgtgaaagaaaaccaccagagttcaatcaaatgtttcttcttgtacttacctagtaaccatgtctacctcgtcaagcacattgattcagtttgtaatactaaatctatcctcttgcgttatggaatcagctttccttgacctcaaagcagttaccatgtccgacaaagcgcctgccattttccccaatgctgctggatcaaatatggctcggtctcaaagaggtctttgaatccggttcactcttcctttttctatccaccaaatgtgtgtttgcttgcgctacaattggtgatgatacattgtctgttgccaatgactcttctgaaccctcaaagttaattgattacttactgttgaagttaagcatatcatcttttttaatttgatttaatatttttcttcataggcatagtggcccatatttaacctcacataatcaaagtttttaaaattattattaaaaatccaaattgaaaactttaatgctaaatctacataataataggaaaaacaagttgaatgtttggaatcgcttacgactaatgctggatccaaaatccggttagttttcatatcattatgtaaatttaatatccaaacaaataaaaacattaaagaaaagttttttaaattctgaaaaaaagaaaaacaaaatcaaaatcttaaaaagtatttttaaaaatccgaatgaaaaacttgaatgctagatctacataataatatgaaaacaagttgaatgtttggaattgctaacggctaatgctggatccaaaatccggttaatttttctatcattttttttttggtaggctattttctatcattatataaagttagcatcctaataaaataaaaaacaaatataaaagattaaaatccgaaaaaacaaaatcaaaattttaaaaacaatttttaaaaatctcaattaataatttgaatgctaaatctatataataatagaaaaacaggtcgaatgtttggaatcgctaatgacgaatgctggatccaaaatccagttaattttttttttatcattatataaagttagcatccaaataaataaataaaaagacaaacaaaagagaaaaaaaaaaaaaatccgaaaagaaacaaaatcaaagttttaaaaaattatttttaaaaatttaaattgaaaacttgaatgctaaatctacataataatatgaaaacaaattaaatatttggaatcgctaacggctaatgctggatccaaaatccggttagtttcgtatcattatataaatttaacatctaaaaaataaaattaaaattaaaattaaaaacaaacacaaaatatatcaaaatctttattagaaaaaaaaaaaggaaattaagaatcaacgaacctgactcatggtggactaaatggattatgactctctcggcatgactcatggattgttgtttactaaagcccattcgttgtaatctgaagcccatcgattcttccttgacttgggccgaaactgcaatttttgatgatgaagaagatctcgcttttcaggtctgaaactctgaaccaccaaaaccccagatcttgtcgtcactttcactcgcgattctctttgtgacgattatattttgccgaaagtttagatgcatccagtttttgcgtcacgtcaaactagtttctggaactcaaagtaatcttcctccataattagcccgcgatcgtgaaaaattgatcaaacacgagagacctctttcgacatgacgttggtacagtacggcaatgtatatgggtcataaatttcacggtcacgatagatcagcgatcctttttgtaaaacagtcgcagagaaagagaataatttttttagggtttagaagaaggagttatgatttcttaaggaaggaaggaaaagatgaatatttatgacgagagaggttcacgcaacaaaaaggaaacatcagattgttgttttccttttttcatgtttggacttataagaaaaaaggaaattaatcaagtttacaacggtcttatttttctaactgcaaaagagtacgtgttagaattttattatacaacggtctatttttcacgcgcctacgcgcatcatccttgccgtatcttctctcgaagcttcccatccaaattcagcttcttccgctgccagttccactttgatgaaaaataaaagcccaggcccaataaccccaaattcttttttaatttgatttaatattttttcttcgtaggcatagtggcccatatttaacctcacaatagaggatacaccaggatcgaagcctggcttgataagataatggcaacaacaatgaaccaccactcgcccaattgttccttcttaacgtgtaaagtttgttgttcccataagtaaaaatattcatatataactaaatattcaattttatattttgagctaaaaaaataattttattatttagcaatttattgtttttttttatcatattatatttacttattaatgtggacaactaattaaattatagagcgaccgacaattgtgacagtgacactggagttggactcggctcaatttaaaggggtagttcagtaatcatacctcacattactacactcttgattaatatataaaaccaaatcagtttttaaaaataagggaaaatcctaataaaggagaagaaaaacagatctgaaatcccgcttgatactccaccgactttaaactactggtttttgtttgatttaagtatagtgttaatgactcctctctccaccttcctttgattctacctatcacttcccttgccgttgctccatcttcatcactagtcactatacaccaatcttagatccgggaagctaatttctcttctccgatcggtgaatgcagttacattgacctcggatctaaccaagctcttctggtttccagctctctggaattcaaaaaaatg

SEQ ID NO: 34362 - DNA, 3003 bp, Unknown
  misc_feature (1)..( 3003): 2750-1469P.txt file - cDNA_ID_3077409; gDNA_ID_1620797; Annot_ID_168516
tttgtgacaaactcaagaagatacctctctagatacaaaatggtgttactgtgcctaatgtattattcgtttaccatgttataaaatgcacgtgtgatttggggtatgaaaagttggcaaaacggtttaaatatatggaaaaaatagagacaattgtgtccccatttcatatagtcataatactttatactgttcatatccattagtagaatttgcatcacctttgaagtactttactgtatcacgttccatcttctaaagcaaacttctactgtaaaagtttacagtaaaaccatagtcatatgcctaaaggaattgccatgaaagtgttgaatacattgtgatcatacagtatatatgaaaagcatgcggactattttgatactagaaaccttgtaacaactacaatgtatttcttttcaaacactcattctaaaatcaaataaattgtagaaaataagatgtgagaaaatgattctggttttggtctttaccacctataattgtgttatcttttgtttgttatgttgctgttttggttagaagtagagtccaaattaggagttcgcatcagtttggctcatagagaatcaaacaaattggtgaaaaaagaagaagaagagattctagctgacactcttttgtttcacactgaatcatacaacaagcttcatatcaattaatgcaattgattgagtagatagatatacaacaactatcattcaaaaatggtccctaatttttatagtaaattcatcaatcattcggttgcatccttcttcaattattgatttctctacacaactcattaatttatgaagttctgcattcgttattgataaatttggtaatttgtacgtacacatacaatgccatattggataggccatctctagaatttttgtaaatatttatgtgtttttccacacaatgatgatatgtcacgacttgtagccgtgtggtcctctggttatgtatcatttttgtgtaactcctttaattttattatttactttgcagagtgttctttttttctttaattctttttcttttgggataaaatgtaatattgacctactagtgtaatttttttgaattttaaaattaaagatttaggtaggagatgtcagagcgggttaatccgtcccatttaacctaatttacaacaaattgcgatactttgcgagttttgacggatcattccatcgaagacctcgatattcaaacatcattctaaatcctactcaaatttcaattgtctcttgtactcatgtatttcatgtatgagaattatttcactgtctgaatgggttatggatactactgatcataaccatatcgcaaacccattttcaaacatctaagattataatcctaatcagatgtatacggagcaccactagatttaagagaatggggacataagctggtaaagaattgggccaccattaaacgtgtgaaagaagaatttgggtttaggcccatatcaagctagattctcatgatacttggttaaaaagcaacctttttatttttctccgaagcaatttacatttgagattcatgatttattcatagtaacgactaaaagaaagaagatgatgcatagttagttagtacagtgtgttttccccaatagtttcccacgagtcaggcttaacgttttcctctcgaatgactctacgtacctcatttagtgacttcgttttctttcaccttaagaattggatcatcgagtttaggtattgttgtctctttcttttcctgttcacaaatagaaaaacgagcaagattttttattgaagttcactcacaagtcaaatgttaaaatgaaacagagaagagtagagaggtgaagaaataaatatacctcagccttagattttggtgttgattgttctgtgatatactgtaagatctcaaagaatttggtctgcccttggttgattgctttttggagatatatcattgccatatccttagctctagtctttaccttcaccaagttgcggtcaatttcattttcatgctttgctatatatggcctgaagaaagaatcgtaaacgtatgttgttccctgaaatgatataacacataggtaataaaaattagagaaaaagtcagttgaatcaaaagatatataagatattacttactttagtctttggaaaccagagataaatgaagaaagccaacttcgcctcgctatacattggtaaccttcaagacaacatgaaaacataagaatactaatatacaatactgtaaaactctttgttttctaagtaatataaacagcctaccaagaaacaagagcatcaccaattctttcgaaaatcgtcaaagcagctacaataatcctgcaaagatgttttgagtggaaggaagcaagatttatataggaacctaaaaaggttatagataaaggatagaatgtatgcatataccaatactggcaccagaactgaagttgttgaatttcaggcttgttgagttcgaccgttttgaagcactcataagcaggatatgcatatccaaacaccattctgtcaataaatagaaagattcattacttagtttgattgaaagaaatgtgtgttttataaaattaaaagaagagatcaataacatacaaaagccctcttgtcagaaacgatccaatcattgtgatcacctgctaaaacgtttaaaaaaaacaaaagaatctgcttgtcagaattaaattctcgaccccgattcattgaaatgattatatcatccaaaatacaaaaagacagagacaaaacaatcaactaaacaatattgatgcatgccttcaaacgattacacttcctaaaggctaatatgaagaagaagatattaacggtttaagcgattgaacaataacacataccttatcagaaaaacggtttcggcgaaaaaggaatgagaagaatgatttcgaacgaattatagacgacggttacgtacgatagtgacttgcgaatggagaaacaaaagatg

SEQ ID NO: 34363 - DNA, 3000 bp, Unknown; identical to SEQ ID NO: 5516
  misc_feature (1)..( 3000): 2750-1469P.txt file - cDNA_ID_3077412; gDNA_ID_1620797; Annot_ID_168512

SEQ ID NO: 34364 - DNA, 3003 bp, Unknown
  misc_feature (1)..( 3003): 2750-1469P.txt file - cDNA_ID_3077448; gDNA_ID_2936565; Annot_ID_194591
agtggtgattaacatgcatattgtacgtacttttaagaaaagaagatagtgttcatgtttcaaagattaatcttttgctttatttttgttcattaggatcgatctctgtgttgcaatttaaatgtggtttagttatagtcttatgatattaattaatatataatataaccctctttttattgatttacgacatatataattatatatagtacttttcaaggtcaaatcaaaaatacttattttagaaaagaaagaataataaaaatcttttggtttgatattgaaatagctttctggttggtgttgagctccaagctacctttttccccgtttatccgtttgcttgccggatctaaacatgacttaactaggtttcgtgttccactgatcaaagatttgaaaaaaaacatatacttagtaaacttcaagcaatttttatattacccaattgaatttctccagagtgaaagatgttaaaattagttctcaattgtaatatatatatacccaacaactgagaaaagatggaaaaagtttagttaaaaactggtcctgggcggctttaaattatatttatgcacttaaatttagcttgtttatatctttctctggtttgagtcatagttgaataatccaaaaatctacataaatattttgaaaaagacctctagtctcatggacaggtttttacttagataatatcgtgtcattccatctagattcaacccctgtctacaataatataggaggttaacgttagttatgtggagaacgtcagattgtgagtaaatacgtaacatgtgaaatgttggcgtagatgaatgtaaacggatggtaatataaagtatttatatcaaactacttccctgcagaattatcatatttttagctatttaattattacttgcatggatcatggatgtgactatcagtcgtctgtagctaatccccatttactaattctgtcttacagaataaaaactggtcgatgcagtatatatatatatacaaatgactgattaagacatatgatgaaactaaaattgatttcgtttttctaatgagatgatataataatttgttttatctatgtgtgaactgatactgttaacaataataatgattagctagtactattaacagtactgttatagattgcttgatttaggacaagtataaatgacagaggagatagatggaagtttctcaaaaactgtagagtgtctgactcacggcatgtgatctcttcttcagtctctctcgatcaaaattattataaaaattaaatgtagttgatccaaaaactcatgatcatatctcctctgatattttacttaatctatctaacttcttgtttcgcaaaaaccctacagcctcatggtattaaacctatatatgggttttttttggaactatatagaacttctctctagccataacttattataactaatgtgaattatatatttgatattttttttcttctttattacgtaccgatgacgtgcatgtggttccaatggtaagtactcagtcatcctcacaggtcaaatgtttggcattgtcattaattgccattaaaatacacggtaggttaagtttgaaataatagttttttctgagatagttagcaagtaaattgttaattaaatatgctggagaaagggaaattaaattgttgagaagcatgaagatcgtccaagacacatcatttgtgaaattgtaaagtctatggtcaaagtgaaagactaattccgaacaaagattttcctcaacatctgttatacttatacctaactcgattatgattgatatgacagtttcttttcttttacctcaatttcctttacaaaaatcattaaatcttccaacgcgtcattagatagtgaccatgtgaacggaattcgtaaatggggataaataacagtttttcacaaatcacaacccaacttcagtttttccctgagatgatttggctccacgtaaatctttctctgtccatttgagatgatttttattcaaaagattcatggctagttcgaacatttttcgaagtatacctctgaaaatagttattaatatatgatgttactatttgatgctctgtattgaaaaaataaaaatcaaatctagataatgtgttacgtactgataattaagatatacatacacaacaacgtacactgaagctaactgagtaaatcttttatttataagaagtgtagagctaaaagttaaaactatatccaacaaacataaaatctaaatacaacggccataaacctagctacaactacagttacagctataaccaaaaggagaaaagatgagagattggtccccctttgtacattgaagcaactgagtgaaactagtggttagggttttctcatggatttagttaagttctttctaagaattaattcattgtcgttgtcctaatcgccaatccatttccatcctcggtattttgtttccttttttgtcaacaacaaccttggtgttctctttactctttatcagcacaatagtggtccaaaagtccaaacaatatgtatgtgatccatttaaatttaatacatttatacatgcaccatacatccatgatccatgcatgctctacatgtgtttatgtatgcagtatggacatacatatacccctattaatcatgtcatctatactttagaaaataaaacaattcaaaatgtggcaacaagaaatatatgtttttgcgaataacaaacggcccattaaagaaactggattcttacaataatatgggccttggcctatttgttttaacgcccaagtcggtccacgtatatagtaacgggtcgggtcatatgagatgggattccttttttttcacctccgcttcaaagtaagaagacttaggttttaagtcaaaacgaaatcggaagatcagacagagctcaagagaagtaaagaaactgcgacaagagaaagaagattgactttggagaagagagagagtaacgatg

SEQ ID NO: 34365 - DNA, 3003 bp, Unknown; identical to SEQ ID NO: 34364
  misc_feature (1)..( 3003): 2750-1469P.txt file - cDNA_ID_3077448; gDNA_ID_1620797; Annot_ID_168536

SEQ ID NO: 34366 - DNA, 3000 bp, Unknown; identical to SEQ ID NO: 5509
  misc_feature (1)..( 3000): 2750-1469P.txt file - cDNA_ID_3077457; gDNA_ID_1620797; Annot_ID_168532

SEQ ID NO: 34367 - DNA, 3003 bp, Unknown
  misc_feature (1)..( 3003): 2750-1469P.txt file - cDNA_ID_3077459; gDNA_ID_1620797; Annot_ID_168530
actttgagatctagatgagtttcaattttacaattttccatttttttgggagatcattagtccattacatataatacttattattgcacccatgtatatatttaactcacccaaagtcaagaatatatacggattatacggatataattcctaaactggatgtttgtatgttttcaaaaccaaatattaatgtatcttatcgattaaaatattaacatattctaactaattaagtactcacgttaccatctttgtgagttggtatcgtacgtggtccatttctttaaaaaagttatcatttttttttggatttatagctaaaagtttttatcaacaaatttttatagaaaaagctaaaagttttcatttaaatcagcaagatgtgcaactgaaagttagataaattatgcaacaagataactgttaaactttttgatataattaaatagctccaagttgcaggagtagcctaccaaaattaaatttgcaaattaacttcctgcgttcagctatactatgcaaattaccaaaattatattcactcgcatggttttctcgtatactatgcatccataatagcaccccgaaggaatccgtcaagattaattgaaaaccatgtaacaaaaaaatatgttgctacatacacaacttttaaaaaaaccttgataaattcgtatgcatgtaagatattcatttattacaaaataatgtagacaaagcagtggaagctgtgtgacacgggtttgttgtttgtacaataacaacgagcctgattgatgaatagtaacaaaatcggcatcgtgtggatgaggctttaaacaaggacatttataaattgggagataaggacttaaaggtgtctcgttcgtacaatgacagtactcgaaccggttacggcttctcgaatttaatatctgcaattaatcaaacaaatgcacatgcaggccgtatatttttctttgcttttttgttgtatataaatgtatttcgtcttattcttcgaatccatttcaccgcatgtcttctgagttcctataaatctttgataatcaggacaaatttaaatcttagaaatgtaaacaaaatatatcaaaaacgacggttaaaagaaacttaccggcttatattttaataaatagttttctttgtttttaagatatatatatttgtattgtgttttacaatctgatatatacaactatatatagaatttacatatatattcacaataaatgaaaaatttctcttaaaattgttctatggatgaaataaaatgattgcatatacgacattgaaacgccgcatccgtgtactgtgtacataatttttgtcttgcataaagatatccgtataacgtccatgcaaaaaagcacgtatatgtctataatgctacatgttgacatgttgtccagctagtatacgacgtatttttaaaacattgtgactactctaagtatgcaatgtattctttaaaatgcattgaaacggggcgatgacggaataaggttcctaacgaactacgaatctctcatctttagaatgagaccaaactcacatgttccatcaacgagattggtcacatgaaaactgaagcttattgttttgcttccaatttttgtagaaactacactaatttcgatggggccctcaatggcggagtagttggtatagacagaatacataaaggaccatcttgtttattttcaagggaatttacaagacacaacaaccgtttattcaattttagccaatgtcctattttttgctgtttcttttcaactatataaaatgggacatgttctacaaaatacaaaattatcttataagaaggaaatgtccttaaaacttaaaaataaaataaacaattatctgccaaaccatatacataaacaacccaaacgattctcctatactatcaaccaccctatatatgctttttaattatagaagtaggtacacacatcattataattcactttttcaaaaactatatgaactacaatcgtatgtggaaaccacacatgatattgacatggcgaatatcttgttggactttatccgaacagagaacacagattttttgtttcctaccagactataccttaacaattctgaatctcgagttacataaatgtaaagataaaatgactcacaaatccgttgtagtctagctggtcaggatactcggctctcacccgagagacccgggttcgagtcccggcaacggagttactttttttcagttacagcgacccaaatcgttaaatgggctattgggctttagataaagctcaaatttccacgtgaatctgtattttttttctttcttaaatctaaaatatctgcagacgtaaaacccatgtaaagttatagttcagcccatgttaaaagcccatgtaaagttatagcccacgtaaaaaagcccagcccaaagataagttgggataaataatattgatgttctcgattgctcgccgggatcgtaagaacagaggatttttctcggccaagttttctctagctcaggttcgtcgtcttctatcttctctttctcctcctaattttttttcatttttgcttatcgtcatggagacgtagtttagattcaatccatgttgttctagtttttggctggtttcataatctgtggttgaatattattgttaggttaaaattcgatttgtgagatctgttagttagattgtacatgacggtgcgaatttattgaatctgtttaaatctattgaaacgtgaaacgcatttgagtattgtgaggctgaggaaatttctgaaagtggttttgggacgatgatgctggtgttgcggagtttgccataatcagatctgtatgtatgtgggtttcttgataaaagttgtatgaggaaggcattggagatttgtgttgaagaattgatgtatgggagtatgaaggaggtaatgttgttggtgtgtgtggttgatgttggcaggtgtttgatgtgaattttttgagggaggggaatg

SEQ ID NO: 34368 - DNA, 3003 bp, Unknown
  misc_feature (1)..( 3003): 2750-1469P.txt file - cDNA_ID_3077463; gDNA_ID_1620797; Annot_ID_168529
actggtgaaaattttgtatcaaaccaaaaaatattggtgaaaatagttcttcacctctgatctaaacataacgtttttcctataatactataaacagtaattaatatgattgtctcgatagttttatttatccataaatttctttggaatgagttagctcaaagttttaaatccaactataagattagtgggtagtagtttgttttatgataatattgtcggtgtgtcagtagtagtactacaggaattcaaaccgtctattaatatgttgttaagaacaaaaaaaaaatcaaatcaaacggtcaaaattagatttatataaataattagattaatctccatggtccaatgagttatagaaataattgattacgtaaatcgaaaaaagtccatccgtccgttaagtaccgtacggtaaggtaaaggggtactaaggtcaaatcatatattgggagtgcaataacaacaacgatagtcgatacggtgaatcttatcgtgatcttcgagcccatgatacagtcaagttatatctaagccgtccaaataattgaagaggctccgtcacctaccactcttgtgttctagacgattattaacccttcagaatcttgcaaggcttctcaactatacgagagttcttaagcttgtgggtcacattcgcatgtgcttatctttctctgacgttgattttgacatctccaaatgtttatttttctattttcaaaattcaattttattttaactactgcggagtgggacgaattattaagcaaaacatataaactttacacattccatgccttaagtatatactttctcacgatttgttagacatttgtaaaaaggtatgtatggttttataaagaaaccaaactaaatgctacattaatgaaacggttgaacatcaacatctagggttagctcattatagaagttacgggttatagcttttaattttgtttctgtctataaatgtaggtgtaatgaaaattaataaaccctaaaatgtatgtatactactatttatggaaaaagtattgtagcagttacgacttttttaccaaagctaacgtagggtctataattgtttataacttaatacagaaacatgtaagcgttttcaaaatgatgattccaaatttgtttaataacatcaaaataaaatatctagcttaccttctaatctcgtagttaatacaaacagttattgcttttacgaatctaaacataccagaaccctatattatatacatagtaacgattccgcaactaacattccttgcagtttttagggtcatttcaacagttttaacggctagaaaccgccgatttagaaagggacaccagtaccatcgttgatttgcaaaaagagagagaaaataaagagatcaacacttgggagtattgacaaattttaaagatgagaaaatattgaaacatattagcaaatttggagagggagagacaaacctctagaaagtaacgaccgtgtcttattgctctgttttcaaggactatactttgcttttcaattttttttgtgcctagagtctaaactatctcagcgatgagatttttctatttttataacacaccgaattatggactccataagtaaaaaaaaaacatagcagctttttactagcctcgctatttaacagaactttttggggaatttgtttactttacacatttgactgcacgcagagaaatttgactaggtccgcgagactaaaattcaattatcacatgcacacattaagtaattatgcaaaaaatcacatttaagtaaaaccaaaggctttgatgatattaaaaagtctcattcatcaaatattaaaaagtctctcacagggtacacattgaacaaccacacaccaccatgagagtaaatctgagaagatgaccaaaaatagtaatcattctcatctaggttttctctaattaagggttagtctcactctaatacatctactaaacccatatactaaccaaaacatctaaaagaaaagaaaatttagtttgctaaaacagagaagcatttactcagcagcttcctctgttcccctaaaacatctcaagtctccaaaatatataactagaaaattttaaaaccctaaaagatatgttcatcggagcatggaggtgagagatcggaaaacgacttcttcacaagggatagtgagacccatgtcatgatcaaagccaaactcttcctcggcttgttggagaagaagctgaaactcaggtcgggtcaaaaacgaaatgggcacaacgtacctaacccgattctctccgacgtagacgacgaagtgaccttttggtacgttaagaggagatccgttttcgtcttcaccgtacacattactctgtttctttcccaagctcgagcacctcttcaagatttgcttgatcatcgccgtttgcgttagcttgtttgcttttttcatcgccattctcttcaaaaaggatttgtcttgtgtgtggtttgagttttcacaatgaagggtgagtgtgaattagagtgagggaggaggtttcatggacttatggttgggggtatttattgaggaggactagagcgagtggaaaatctttttatttatttttaaatgaatatacggattactgaattatgaaaaatgtacatatatacaccaccacaacatgtgtgtagagagagagagggggatggtaatatcgaggcgttgaggagattatgatgtgtttgttgtcttgaatatgaatttgcgtgtttgctacgggtagccatttgttgtgcatttagatgatacaaaatatttaatttgttgcagaattgatagaatgtagaaactcgaaagcgaccgcttgggtcatctggtttggctcgaagagagaatctgttgaattaaattttcttataaaaacggaaaaagaaaatggaggtgtgagtttggattgtaatatagatattaaccgtttcgaaaaatgtgaaaggtattttcaaagcatgtgaagatg

SEQ ID NO: 34369 - DNA, 3003 bp, Unknown
  misc_feature (1)..( 3003): 2750-1469P.txt file - cDNA_ID_3077467; gDNA_ID_1620797; Annot_ID_168527
aaaaggaggatattaagttaattaaagggtaataagagacttaattattagtggataataaaaggtattgtttcaaataaagctccaaattacttttagcaaacatttttggatgagctggtcgatggactggcttaacattgacgtacttgtatactcaatgtaaggactaaggactaatcatttcccaatataaattgatgctaattattacatgattacttttgtgtcgttaactaatcaaggtccattttcgttattaaaaataaattaaaaaaatattgtaacacgtactataaaattcttaatgcttgaagtccgaaattaggactaaagttattcgccctcatacgtcactgcgtacttgttcattcgctccataacaaatatcatttctaccaaaacccgttttatatgattaattttcatcctataattgcaatgcaaggctgtgtcctttgcttctcttttaacttaaattatcttatagctttttgcctcttttgttttcattctactacaacccatgaggtaaccaaatctagtgttacacaaacttatttaatcatcataaataattatgatatcttttgacaaaaccttcttgattttattattagtaacaagttgaacgaccatttccagtattggcatatatttattataaagatcccattagaatatacataattttttctgaccatggttagttttacgaattataatgagatttgaaagtttcaccaaattggatttgagtctgatgctgtggatgggttttaaaaagttgtgcctaacacttatgttatcaatagatgaaacatgatctaaacaataccaaaaaagtgaaaaaatatatttctaatttatatatattcacaacacaatagacatatacataatgaaataattacgtagatctaaacagtttcatatctccattagcgagtttgtattagagttttcactgattgtacaaatttatgttgtcggagccatgaacagaaacaaaacatttatatgaatatatatttaaaatacgaggggagatagagacgtggcgaaatctgataaggagttagagatgccgaaagacgtttgcctaaacaaatccaaagtataatcctgattagcatatcttaatgcttttgttaacctaaacattgcatgtgcatttctatgtcttcactcttcttcaaacttaaaataaagcactgatatataaaacttaaaaattatttaactcgacataaaaatgaaagctaaatctatgaagcaaataaataaaaactaaagattccaaataggcttttataaagtacaatagctaactattaaccgaacttatgtttttgtgttttactcgtcatgatatgataaaattttgttataaacagtttttaaaaaaaaagtgtacatgtgagtggagaatgacaaatttcactcgtaaaaagctacattttacttaattttaagaaacattgaggaaacaaaactttaatcaggttcatcccttctgcttgtagctaatcactgcctaatacgtaacattcactgtgtacaacggagcgccgtcacttatttgtttccttctttttctggtaacacctaaacctttggactgagaaagagggtcacaagtcggtcaacgcgatttttaatttgtttgaccactcttactgaattagctggcacgccacgtcatcttctgacgctgacatgtcagcgttaaacacacgtccacatcgacgttattcagcgcctagtagacgttttccactgaagctatcaaattaattatttacaacatttatttatttctaatcacaaaatatagaatttaacaacatttatttctatttataactgaaacatattgatgtacttaaaatttaacaataaaaacgtataatgatcgactaaggatttataaggatattgttgcttcaacaaatgacattatacaaagatttttatttgatgtgatttgtgtcctattgaaaacaaattaagcgattaatttattgtttgatcccatataatatactcatttcctcaatttgtgcgtgcatgttaatgcaatttggtgcatggaggcagaaagagacaatccactgccgattcatagcatacgatcgactctcttgtaattatatctttatggagaaaaattaaataattgagttcgattcattataaccaataataataaaaatttgcagaagcattaatgaagatttgcttaggaagataaaattaaatgagaagatccttaaaacgtaacaagtggggtgagaacgtaacgtcgcatgggggggatgcatccataacatgcatttggacccacctttgtttatttcaatttttttttttaatactatttattcaatatttagatttgaaatagggcaattcaatcatctatatcaaactataatttcagtatgaaacatatatgtatatatatatatatgagtattcgacttaaataatatgataagcgaatagtatatcataaggttattatcatgccacatgcggaaaatgtgatatgtaggagtgataggaactcaaggtgtggacagtggatcattgatcaacgattttttttttttttttgtagttcaacaatttttaggcgatgaaataaatttctcacagtacttaaataatctaattgcaatgcaataagggttatagtatacttacaaactatacaatgtaattaaaagaacataatctattagtagacataatctgaaaagtttaaggataagagtaatgagtatatcagattagaccgacagtaacaatgctgatactggttaatcatgcatttggtcacatgaaaatgtacgatacagagataattaaatgtacacatttatcatcagatttacctttttcgcaatataaaatagaaaattctgttggctgcttattgctaagaaatttttgataataataactggagatggggacattcgctcacatggaagcatg

SEQ ID NO: 34370 - DNA, 3000 bp, Unknown; identical to SEQ ID NO: 5511
  misc_feature (1)..( 3000): 2750-1469P.txt file - cDNA_ID_3077471; gDNA_ID_1620797; Annot_ID_168526

SEQ ID NO: 34371 - DNA, 3000 bp, Unknown
  misc_feature (1)..( 3000): 2750-1469P.txt file - cDNA_ID_3077473; gDNA_ID_1620797; Annot_ID_168524
aatgacaccgccaatatatcacatgaatcacacaagtagtcgttgatccttatactatattcaccaatcaccataaccttcattgtcaaatcattttaataataacattacattttaaataataaaaaatagtaatactccggtatggacgtatatggctgtgagttttttgaaccacttgatataaacagcagtactaatcattggattgagagcatctgcattcgcagagaatatatgatcatccaataatattattgagaaatatatgactcctctaggaccagtggaccagtgaaaagaaaaacaaaatataataacatcttctatcatttttctcgcaattaagctagagaagttcaaacaatttcaaagagagattcattaagtcaaagtcttagagatgtgatagtatggtacacgttagtttggagtcgtataacgcaatcattgtttttaaatcataaccaagagattggtaatgatgattatacattaattcttggctattggggcagttaggcacatgacatgaatgcaagtagaaacactgtaaggcatagtaaagatgaaggatctaactgtaattacgggtagttgtggaatataatggccgaatacttagaaaatatcatttggaattaaacgtaacaatcaagaaatggtatagctagtagcttttatgttggtcattagcagaatcactaaacataaaattgtgattgtgcaccattgaggtttagacctttatatgaacaattgaactaaacttaccaaagcgaaacctttatatgtcaatgatagggtcgtcactatcaagaaacgttattgggaagtaggacttatagttacatcaaatatcaaatacaatcatattctgtttaaaatatagcaactctaaccaatactccatactatgcttagaataaaacttaaccacattttaaaatacctaaacaatctcatgatcatgatcatgagaagatcttgagtgtccttatatttgttttatatgatatcatatcaaatatgtctgcatcacgatatatgtttgctttctctacgtttctaagatttatgtttcttgaattcttgggaagaacttgcatatgtgtttttatgatgtggctgctacaatgggcttctgggcctgttttaactggactgtagagtccattcatgatcaatagaggcccgaatataagtctactcattttaaaaccattacttaaaccataagaaaacactaaccttaaaacacacaagatttggaccaataataatcgaaaacgcagatcgccacgtatgctaatcttatccttaatcaaatatggaccgtcgaaatggcctttaatcggacgtctataaactactctcccgttaatctcccaaaattaaccgacctaataattcacctcatcactataaattcactaatctgcttcacttttctcaaaatcaaaacaacaacattcaaaagctattagcgattcttcttctctctgattcaatcttcttcatagtttctaagctctcaagttcttgacgaagcaatggctcgtacgaagcaaactgcaagaaaatcacacggaggaaaagctccgaggactctgctcgctaccaaggttcgttcgttcgttcttagttttgaatttgtaacgtagttttgagaaatctagggtttcagattgattgattgtgtaatcgtaacataggcggcgaggaaatctgcgccgactactggaggagtcaagaaacctcaccgttaccgtcccggaaccgtcgctcttcggtaagtttcacgatttctcctctttcaaaatcacaatctctgtttctgaaatcattccgtcttcgatgatgatgaaatcagttggttcctgtttgatgaatcagtgagattcgtaaataccagaagagcacagagttgttgatccgtaaacttccttttcaacgtcttgttcgtgaaatcgctcaagattacaaggtacaatttttgtctgtcagttatcgtaagaaattgattagttattcctagattgatgaagaagattggtcttgattataattgtttcgtttttggtgatgtagacggatctgagattccagagccatgcggtgttagctcttcaagaagctgctgaagcatatttggttggtttgtttgaagatacaaatctgtgtgccattcatgccaagagggttacgatcatgcctaaagatgttcaattggcaagaaggattcgtggagagcgtgcttagattcgaattaaatcatcaactattattctattagggtttttgtgttttggataatttctgcaacaaaaatacatttatgttaaaatctctttgagatattatttggttaccgatgatattaaaccttcactgttcttgttctctatattgaattgcttcgcccatgcgataatattttgaaccgaaccgtgattatcggtctttggtctgtcttcttcagttaagagagctgaaccggtggatagctttataaatcaagatcggttaaccgccatcgtcactgtctcaactctcaaccacgcttctccgatctgtcgatttcctctgttttgaaaatgggtgttccgtaaagaagaagatacacgtacatgtgtatacatgtcagaattgggtttaagttggcccagtttcgtttttcatttttaaaaagtggcacagttttgtttttggtcaaagaaaagtggctcgtttaaaaaaaaaaaacagaacaaaaagtgtcccagttttgtctttgggcttgtatacaatactacaaagtggctggccaagttatttctttttgtcccgattaattatatgtagaatataaaaccaatttaaccgaactaaccgaatgtaaaccaaaaacctattaaaattaaatcatcaaaattaaaattaaatcaatataataatttttagtgtaattatcttagaattgtttctcaattgagataccctctctctcatcaaaacatg

SEQ ID NO: 34372 - DNA, 3000 bp, Unknown
  misc_feature (1)..( 3000): 2750-1469P.txt file - cDNA_ID_3077513; gDNA_ID_2926147; Annot_ID_197790
ccattgaaggataatcgtttgcttcttgaagctaaacctttggatgaatcagaagaagctaatcacacagccaaagtcgtgaacgaattatcccgggagatatcgcgcattcttgtttcccacccggttaatgtaaagagagctgcacaaggcaagaatattgctaatcttgttcttttaagaggctgtggtattcgaatcgaggtttgtgttcactgtctcttacgaatgcttttaatgaatctatttgctccatctacttatctgttatgggttttgtatataaaggttcctccttttcacgagaagcatggtttgtggccgtgtatggtagcaccaacgaagattatagccggacttggtatgtcccttggtattgatattcttgaagctctgggagccactggagattaccggacgcttctcacatcgaaagcgattgctatagcgaatgcgctttcagctcctttgaatccctgcccaaatgtctttgaaccagcagaggacgggcataaaccgggaaggtcagatggttacgatttcggcttccttcacattaaggtgaaaacatgtctctgtcttttaacacaacataaaaaatttcattctgattctaaattattcgtgcaggctatagatgatgcaggtcatgacaaggctacattgttcaaagttcgaggcttggaagctgtggataaagcgatacgtcagctcgctaagcttctatggcaagctgaatcttcttcaaattaccagtatttcttgtgtgtgactggtgatcattctactccagttgagtatggagaccacagcttcgagcctgtcccattcacaatgtgccggttaaaggactttgtgagagcggttggaggagaatcagctctattagagacatctttagacccttttccacttccaacggatatagcatccagtgaaaatgtcatcggaaaagaagaagaagactgtgggaggagggaagcttctctggcgattagtggagattcagtctcagagttgaacgagattgcagctgcaagaggatgtcttggccgtttccatggcggtgaaatgatgggagttatcaccaagtttctgaagttggatgtataaatcaaatttcataaaattttgcattttttctttgaaaatttggattttggaagtgtaataaaaaattatcaactctaacaagctcaggaagttgaaaaaaaaatgtctaacaatgtttggaggtgtagttgcatgttaaagtttacactttggctcttaagatatacacatgaaatttcctttttacattagctcgacgagaaattaaagatatcgaaaaagaagaattttttttctctcgtgactcaattgcctacaaatttataaaaaatgatggtcacttagttaatgaagacactatctttactagatctaaacaatctgtaatgaaaattacttcacgttaatgaaagtcaatcatgcatttcattgtccaaacgaatgcttttacatttcaagcacataagtcaagatttatcgaaggttgacagctcccataattggcgtgtcttcatttgatagtgtataaaaccatcatattcctgagaaatcatcattcctttccaggaaccataaatgaaatatatgaacctgtgtttctgtaactatctccatttgagttaaagtctacgaattggcttcattttactctaattggagaacctcacttgggtctttatccacattttcataaaacttctcatttcaggctttccaaatgtattagatatttagatgatccaaaaaaacttgaactatgggagccacataattcaaagcaacttgaaaatgttagttaatttatattgaagctctctcatcattctacaaataaaataaaacattaaataaatgtgatatatatacttattaattatattgtctacctaccagactaacaagcttaccagtccaccactgtgtttggtttatatgtcgagaaaaaacaaaaatctataataaagaaaataaaagtgactggagaccgataaaataagtatcccaagcgaaaagtccaaaacccaaaatcagaccagtaatataacttgaccgtttcttaaccggtaattaccggttaactccgtctcttccgtcgacatttttccttaccagacccgttttgtttttgtcttgtttcggtctcttaacaagtcccgttttgtattcttcttccttacttcttattctatctataaaacaacaacttcactcatcatgactctttttccccattttcttactctcttgccctttcttctctcactctccggcgactgttacgagtttttaacacttccgtcgtcttctcaggtttggttcttctcatttatgttaaaccattatgtatggtaattctagaatgtagatctggttcgttctcatggatcttgattaatatgtttgtttaatccacgtattagcactaattttggattattatttggaactgttatcattagataagttttgaattatttgcttaagtaagtaaagaagataagagaaaataatatttattagtctgaacataatcttatcttaagataaacagaatttatttccaaaaaaataagtttttgttaaactaaacacaatttattaccagcaataaaaagattctgtttaatgttgttatcttaataactgatcttttgtctgttttttagttgttgttgttgtttatgacaagatcttgttctatccattaaaaccaaagaaatggaggaaggtcataaagaaccattggtgctaagagttgaaggatcacattgttctttatcagagatggatgattttgatctaactcgggctttagagaagccgaggcagctaaagatcgaacggaagagatcgtttgacgaaaggtcgatgagcgagttatcgactggctatgtaagacaagatagcattttagaaatggctcattctcctggaagtaggtcaatg

SEQ ID NO: 34373 - DNA, 3003 bp, Unknown
  misc_feature (1)..( 3003): 2750-1469P.txt file - cDNA_ID_3077513; gDNA_ID_1620799; Annot_ID_168565
gatccattgaaggataatcgtttgcttcttgaagctaaacctttggatgaatcagaagaagctaatcacacagccaaagtcgtgaacgaattatcccgggagatatcgcgcattcttgtttcccacccggttaatgtaaagagagctgcacaaggcaagaatattgctaatcttgttcttttaagaggctgtggtattcgaatcgaggtttgtgttcactgtctcttacgaatgcttttaatgaatctatttgctccatctacttatctgttatgggttttgtatataaaggttcctccttttcacgagaagcatggtttgtggccgtgtatggtagcaccaacgaagattatagccggacttggtatgtcccttggtattgatattcttgaagctctgggagccactggagattaccggacgcttctcacatcgaaagcgattgctatagcgaatgcgctttcagctcctttgaatccctgcccaaatgtctttgaaccagcagaggacgggcataaaccgggaaggtcagatggttacgatttcggcttccttcacattaaggtgaaaacatgtctctgtcttttaacacaacataaaaaatttcattctgattctaaattattcgtgcaggctatagatgatgcaggtcatgacaaggctacattgttcaaagttcgaggcttggaagctgtggataaagcgatacgtcagctcgctaagcttctatggcaagctgaatcttcttcaaattaccagtatttcttgtgtgtgactggtgatcattctactccagttgagtatggagaccacagcttcgagcctgtcccattcacaatgtgccggttaaaggactttgtgagagcggttggaggagaatcagctctattagagacatctttagacccttttccacttccaacggatatagcatccagtgaaaatgtcatcggaaaagaagaagaagactgtgggaggagggaagcttctctggcgattagtggagattcagtctcagagttgaacgagattgcagctgcaagaggatgtcttggccgtttccatggcggtgaaatgatgggagttatcaccaagtttctgaagttggatgtataaatcaaatttcataaaattttgcattttttctttgaaaatttggattttggaagtgtaataaaaaattatcaactctaacaagctcaggaagttgaaaaaaaaatgtctaacaatgtttggaggtgtagttgcatgttaaagtttacactttggctcttaagatatacacatgaaatttcctttttacattagctcgacgagaaattaaagatatcgaaaaagaagaattttttttctctcgtgactcaattgcctacaaatttataaaaaatgatggtcacttagttaatgaagacactatctttactagatctaaacaatctgtaatgaaaattacttcacgttaatgaaagtcaatcatgcatttcattgtccaaacgaatgcttttacatttcaagcacataagtcaagatttatcgaaggttgacagctcccataattggcgtgtcttcatttgatagtgtataaaaccatcatattcctgagaaatcatcattcctttccaggaaccataaatgaaatatatgaacctgtgtttctgtaactatctccatttgagttaaagtctacgaattggcttcattttactctaattggagaacctcacttgggtctttatccacattttcataaaacttctcatttcaggctttccaaatgtattagatatttagatgatccaaaaaaacttgaactatgggagccacataattcaaagcaacttgaaaatgttagttaatttatattgaagctctctcatcattctacaaataaaataaaacattaaataaatgtgatatatatacttattaattatattgtctacctaccagactaacaagcttaccagtccaccactgtgtttggtttatatgtcgagaaaaaacaaaaatctataataaagaaaataaaagtgactggagaccgataaaataagtatcccaagcgaaaagtccaaaacccaaaatcagaccagtaatataacttgaccgtttcttaaccggtaattaccggttaactccgtctcttccgtcgacatttttccttaccagacccgttttgtttttgtcttgtttcggtctcttaacaagtcccgttttgtattcttcttccttacttcttattctatctataaaacaacaacttcactcatcatgactctttttccccattttcttactctcttgccctttcttctctcactctccggcgactgttacgagtttttaacacttccgtcgtcttctcaggtttggttcttctcatttatgttaaaccattatgtatggtaattctagaatgtagatctggttcgttctcatggatcttgattaatatgtttgtttaatccacgtattagcactaattttggattattatttggaactgttatcattagataagttttgaattatttgcttaagtaagtaaagaagataagagaaaataatatttattagtctgaacataatcttatcttaagataaacagaatttatttccaaaaaaataagtttttgttaaactaaacacaatttattaccagcaataaaaagattctgtttaatgttgttatcttaataactgatcttttgtctgttttttagttgttgttgttgtttatgacaagatcttgttctatccattaaaaccaaagaaatggaggaaggtcataaagaaccattggtgctaagagttgaaggatcacattgttctttatcagagatggatgattttgatctaactcgggctttagagaagccgaggcagctaaagatcgaacggaagagatcgtttgacgaaaggtcgatgagcgagttatcgactggctatgtaagacaagatagcattttagaaatggctcattctcctggaagtaggtcaatg

SEQ ID NO: 34374 - DNA, 3003 bp, Unknown
  misc_feature (1)..( 3003): 2750-1469P.txt file - cDNA_ID_3077517; gDNA_ID_1620799; Annot_ID_168564
ctatataacaagcttatataggtaactatgccgcacaaggtcattgacatgcacttccacgaaagagaagaagaagaagatactggtgagagtagatcatcctcaagaacaccgagagggcatttcgtcgtttacgtcggtacgaagaagaagttggaaagattcgtgatccccacaacgtttttgaagagcccttcattccaaaagcttctagacaatgcggccgaggaattcggttacgcggaagctcaccgggacaagattgtattgccttgtgatgtctctactttccgaagtcttgtcatgttcctgacttctcatcaggacaagtcacattaactatatgagcccactactacgtcgtctgaatgataaaatggttatatgttatgtatctcatattgtatgaatatggtttaattcttataatgtacttatatgctaactttattcaactacgaactacgagtgtaagatttttatttatcatatgttgaatattagttcaatgtgcttttgattggtaactttaagactacgtaaaacttatagcagttaggtattttatatcaagcataaaaaaaaaagtcaaataagggacgaactttgaatatagtgacacatgttttatcaacattttttaaaaataagacaaggaaggatttttgttttacatttactctagaggtttcgaaatttatgacaaattaaagaagtgcaatttgtgttgatccaacaaatattgccgaaacacatcggcaactgcgtcgaactcaaaaatcacattcgcttttctacctagaacaactcgagtagccacattcgttcacaggaagaactggacaattaaggttcttacattttggttgatgactttcatgccactacttaatagttatgacctccatgagtaattattttggttccgccattgattgtaagtccacagaaaacttcactgagtttatgtttacttctcctcttccatttagttgagatcatcaatttagctatactcatatggattaacttggactaatcaatcggaagccttttttttttaatgtaatgtcaaattatatttaaaagaaaaatatatacggttttacaacttgtgcataagaattttgaaaaaagaaatcaaaagaattttgaaaattttagagaataattaatcgaaattgtgcaacaaaaggtatctagctccgagattgaatccagtggaataacgttataacgcttgtcacctgaaagtcgaatagctgaaatctgatttcgaatttgtttatccatccatcctgtgatacgctgagccggttgtgaggtttcaccatgtttccggccaatcaatcggaaggcttattatgatttatgaggtaaaaatgttcaaaacctgcttttctccatttgctttataaaaattcgaaaatttattttcttaaattccatttactgtacttcttactgttcatgtaaataaaatattatatgaattaatcaataaaatgataaaatcatgtattaacaggcgagtttctaatttaatgctccatgaatatgttaaatcaatctgtttttattttttatttttgtttttgttgattttcttcttattttgtttatattttttattatatatcaaaatataattgatttgactgacgaatatgacaatcacgctagatcatccacattagttagaacccctcatgggtttctttaaaattaaaagaaaaactatatttatgatctaattataacattacaagtgttaagagagatgcttaatgagagatcattgtatcttccccaaaaaaaacctctctcactcttttctcacagtcacaattctttttctttcttcaataatttaatagaggataccacctccaatggaaatgctctaattagaattttcaaaaagtatcaaatatattaattaagattttacatcattcattttaaaaaaaattatagagtagactttagcaaaaaaaaaacatattactcaccaccatatcattattttcttaaaccaaattctggacaaactctatcaattaaaatacagctacaacactaaccaattaaataacttaaaaagaaaaatcaaactaatttataagacgttgaaacattaaacaagtgcgaaattcttttaaaaaattgtaggtgatggagaccaaacagtaaaaacttacacctcaaatttgaatttaaagtgtttgtgtaaaacagtttttagttttacccccaacaaaatcaaatcaatcaacaacaaaactaatgatgctaaaacctataagagcattcacaactgtggaactctcattttaattattaaaatattataaaataatgaaaagaaagtatggaaagagacaatgggagagaatcgtcaaataaaactctctctagagaaactttgagccatatgagagaacctctactttacagatgttaagattttattggtaaaaaccaattattttaattaaataataaaattataataaaaataatattttttattcaatacatacccatttttgaaaacccaccattgtggatgttctaatgggtttaaatccctttaccaccaaaacgacatcgtttacttaatgactttaaacttagcctaaaacgacatcgttttacgtaatgacttgcatctttctaactgagcagaagccgacaaacgacacacgacgtcaccacaattctcaactttggagctgcagacacaattccggcgacgtttacgattctgacaccgccggtaagggttaaaatggattctgattctgattattgtagattcgttatctaaagattcgaactttctgaacatttcatcgcaaatagctcattcatagaattagagatctctacattgctttgtaataagagatcgatcgttatgtgaatcattgataattcttaaagtctcagacttttaatttcctctttaccaattggaacagaacccacttgtagcaaatg

SEQ ID NO: 34375 - DNA, 3000 bp, Unknown
  misc_feature (1)..( 3000): 2750-1469P.txt file - cDNA_ID_3077525; gDNA_ID_1620799; Annot_ID_168556
tggtctatgttaatgacataatcatcacatgaaacaatttggatgcatttgaaaatattttacaaaatctagctatcagttttcacttaaagacttgggtgagtaaatattgaagaataacttacaaattgattctatcaatcacaaatcgcaaacctgaatgctttcggttgaacaaatctcgtgcagttactagtgttcctcctctaccaaaatgaccaagatgatatagcatcctacgatatgaactaagaaacccagtcttggtgggatatccgaaatcaacaagatagtacttcccactaggcggatgtgggaaaaaggttcattcctcgcacaatgattcaaaacttttgtatcatgtgctctacaagatatactgacatatgcatatatgaatttcatatcgaagttacatatagcaagaacattcattatatgttctatctttctatatttatatttttctacagattgacttagacggcgaaccgggacataagttccatcaagtgctccaacacaatctctaaaaacaggccaatatcaatcatcattcttctaaacagggtttactctcgtaaattcaccttcttgtggctttagtgtatccactacaaactttaaaagagcactcaaaacatcatcaatcttttttttttttaccgtattcaatgaccgttgatatcttgtaactatatctcaaacagttttatcctgaccaaccacctcgaaaagtattagtgatttctacctatatagtgaagaagaccgtaagtattagttccaaacatttagacccattatatagaaacagacatagaatttggaaattttgaataaaccgatcaagctgagagtaactaagagaacacaaataaataagaaactcaaaatatttaagagatttcagtcagtgaataacgaaagtacctcggagtagagattcaacgttgtattagaagtaaccaacgacgggagatctagttgagctcaagtcaccggataatatttcgcaagattgcggcggcggagagagattggtttcaaagagtttgagatcgatgagtgtaagagagaaatgatgaaaaagaagtagaagaaatagagttaggtttgtttgtagtttctcaaacataataagggtataattgtcatttatcatatataatacaacttttaagcgttgaccgcagcattatgccgcacttacttgcatctgccgctgttgcagcaacctagataatcaaacgaacatcttattaaaaaaaaacagaagctgaaagcccaagcttatttaaagatgggccaataggggcctgcataaagttccaattttatttagaaaatatctatttaacatcatttatgaataaagtgtcctccgatgctatttgggtttggttaaagatggattttggaggttttccaaatgatgtcagattttgaagatgaacaatgaaataaatatatctaaagcttatacatctaggtctcttacccaacggcgatgaaataaagaatacatgtactaaaacgacgcatgcaaaataatacctgaaattttctttctacgttggaactcattgcaaaagatgaggaatattgcatagccatggattggatagagccataaagaatcggtacacattgcttttcatattttaatatcgttaaggcgtaatgtaataagtattagaaatggatttttaaaagtatttagatagttcgggtttaaattttattttattgctgattggactttgttttacaattatagagaaataattttgtgttaaattatagtattatacgacattcacacaattacatttacattaacatgtaccacgtctattttataatattgctccaaaacgaaagagtggtcttcacgacgagcgaggtttaaaatttgtagtcgtgcattgcaaaaagctgcgaaaaccgtgtgaactctcaaccaaaccaaatatgatatgaagaaattggttcttgtccattcggtggttagtgtgcatgcatgtcggtgaattttatatgttttccatttacgaccttttctctttatatcatatagatttttaggggaaaaaaaaatcatatagatttttaaaaaatcatgttcccaattaagacataatgtttagtagccaaattgagaaccaaccttttttctgtttattaaataatttaagtggatggattttacacatatattttaatgtcttacataaataaaatatcatgttattttttttgataatatcatgttttattgataaaatccatacatacttgatacttgcaaaaaatatcatgcacaaatttatctctataaatggttatctaccttttttttttttttttttttgaacacaatttacctaataatcttaataaatataagagaaatgtaacgcatacttttgttggacattgtttttggtcgagtctgattggttttttgttcagatctatcggatttatgtatttaagatctaataaacaaattataaaaaatttgattcgatttggttatcgattttattaataatgttaatataatccgacttactttggttagaaaaattaattcaaaagtaacaacaaaaaaaaattggataacaaaaccatctaaaatcctgctaattaattcacatctaataaccgaatccgaacctaaatgaccaaaccatttgtgtaaaaatctcaagcctagtccctatatttcaatagatttttttcttttttttttggtcaagatcaatagatttttttcatcaattcaatttattgcaaatttgcaataatagttggtaaatactataaatgtaaatggtcacgggataacaaaagagcaataataatataataattgcataagacgagtcaacatgaccaagaaacattgaagggttcgtaacttcgtatcatcttcctcctcctcctttgataaacaccaaaaaaaggcagagactttcgaaatcaagaacaatg

SEQ ID NO: 34376 - DNA, 3003 bp, Unknown
  misc_feature (1)..( 3003): 2750-1469P.txt file - cDNA_ID_3077572; gDNA_ID_1620800; Annot_ID_168627
gcgatgaatattatatttgtcaactcatttaacctccttagtcataacatgtttaattttgaatttatatacaaatacaattaagatggtgtgtctacaatcctttgcccactaacctccactttaactaatagtatccctgttgtctttttttttttgttttgctctgctttttcgctcacgagacattcgtggggaagaatgacttctggttttaaatcaataattaaagggaatttcacactggccagttcgtttgctttacatagaaataagataaaaggaagaaaaaacaaagtgatgaataattagtcgtgcttagttttctaatagcaaatggggtagctaataattacccaatctgtctaatgattataagattaagtggggttgtgagaaagaagaaagcaaaggtaggaattctaacatgatgaaagaacttatacatgcttaattgaaactttattactttttagttttaattagcttatgcttatctttttttctcagacagtttatgcttgtctctttgatattcttttatctaatttatttgtcgaatattcttctatattatggaatttgatttgtaaaatacaccggagtgttttacataagttgcaatatactaggttaagaaaacaaaaatttgaaatatactaaaatttatagaaattcaaaatgagctatagaatgtaaaatatatcaaaatatcttcaagtaaactaaccattatctacttaattgaaatgatttaactattcatttttaaactaattaaaataatcaaacaattcctgttaatgcaaagtgtctccagaagtattcttccctcttcactcagagatgaaagctttaatttaggttatgaaaatatcatataaaaaaaaatcgattgttagacatttgaaaccgatatcatagaactagtcgcgatagtgcagtcttgggaagaatggtccattttctccaatcaactaatagtatctggattactccgtgttcaattgtttttttttatatgttatatttctcatttgtgtaatactagaatgaatagttttaaaaaaaaataaattatttaacatatggcaaaatctcaaatcaagacttttgacacatatcacgttttcgtgaattaataactctaaaaagtatactttatataataaaatgtaagtatgatgttttaatcaagtacacaaaactatacggctatactaaaatatatttttgggtattaaattctaattagatatataaataaagaaattttatttgattagattttattaaaaaaattatatcaaatccgtgtgagtcaatcctaagaaaattaaacaccatgcacatgactatctttgtcttttgcataacgaaaatgttcattggcctaatttatagtcattgatactgatggacgtacgttaattctctaatattaaacattggattataatttagttggagtcattagcatagatagtagaagatgatgtgtcaaaacaattaatccttcgtccgcatgtacggctacatatatccacgtaatagtcagcgccttgtcaaatggaaaataaaatataatgtagtgtgatgtcaatgggtatataattaatacattggaaacaaaaagaaataaaaatgaatggatgatggttacatttttggtctttctgcaatttacaaaatattcatatcgttgggtagttggaaggtgaggtttgggttttaagctccgaccaatctactcttgccaaattagagctaagagattatgtattgtgtctatcgtttttatttttgttttagtcgaccaattatgtattgttaagtgggtgactactagatcacacttatcctccatttggaaaccttttctaatatgttgaattcgaaaacgttggtaacaattagtcctcatttgaagaaattgcttgaacaaaaaggagaatacatgttaaatatataaagttcatgaattcaacacatcatcttctaaataagaaggttattgtataacccatatctaaccaaattccactatagaatcagtaacattactaaatcgggtttagaatcgtaaccatgtcaatattaataattttgcttatcaaaattgcttatcaaaatcagttaacaagtagtgcaatggctcatatatcttatgtgttagacatgcatctaaccatctatcacttgggcacacagaagttaatcaatattagttgggtattagtgtctcgtacaaaggtgaaagactaaagtaggcaaaaatataatgggctttaaataccaaaggcttatttagctggacaagcagatgaaaagttgaagtgtcgtcgttttacagtcacatctcattcggttaaaaaatcaaaaagaaaaacaaaaacaatgcggtgagcgtggatcgaacacgcgaccttcagatcttcagtctgacgctctcccaactgagctatccccgcttgttgatatttattactttgtatgttatatgtgccattataggtgcactaaacagcaaaagtgattttttgggggtacaatctattattgtaaaagtcaaatatatgcaatgcaagaaatcgtcttgttcacaatccaagaaggtgttgtgttgtttaaagaattaattgtaatactggttaagataatgcaacgcgtagtcgcatagacatagagtgcatcaagaagagtcgatgcctgtcttacgtgacgttaatgcgaaacttaattgggctggcctgggccttctgaaggccctatagattttatcgaccaaagtagaacaaaatagaaaggataaaaaagaaatatttgtggacagcaaacataaatttctccataaaaaatttgtcgtttattttccttatctcaatttctatggaccctatctcttgagaagtgtaaatacaggtggcgtttcttaatcttgaatctgtgaaattagtaattacatttcgttgcagaaaacatatacttttccgacaaaacatg

SEQ ID NO: 34377 - DNA, 3003 bp, Unknown
  misc_feature (1)..( 3003): 2750-1469P.txt file - cDNA_ID_3077584; gDNA_ID_1620800; Annot_ID_168612
attagcattaaaacccacacagctaacaacatcaaagttatataatattacagagatcaacctcgatgaaaagttcccaagactatagcttaagcaacagccactccatcatcttctcgatgttgttgctttggataaactgtctgtgaattggtttaaacgctatttagcaggcgatggaggttgctcgaggagttaccagaacagcagtctttcctgttatcggcttcatacttgctgcattctctagccttgcccatacttctttcctcttttccgcagcagaacattgctttgcttcgtcctccttaaagcgggcgtggcaagacatgaacagagcctcgtccatttcgcagaacatttttcgtacgtttaaggttaagtttagcacggattggttccagtggttctgagcattcttttctaaagcagtgaacatgattggtaggatggcttgccggttatgtccaatcaagtttacaatttgatcgttgttccacaagaataaagctctttcagaaacctgaaacacaagaagaccaattggttcaaacttagcttatcttagactcatgcagatcaatcatatatgagaactatgtatgaataggaatgtacctgaaagtgggaactggtgacacaacaagcaatccgcaagaacaaagggaccatgatcttttgaaactccatcacactcattgcttctacaatttcttcgacctccccgagaaacatcacttccttctgactattcgtgataggccagaacttcaacaaaccctttatcacaacactgcctagtttcggctctttatctatgaactgagtgatacaataagaaagctgctgaaagtagtttccaacagatttaggcttgtgcaatggaatcaacactctccacaagaagatcttatgctcttctttcaaaggcaacgcaaatccactcactatactcccgaaaatctccaaaagctcagcgattccgctatgcttctctgtctcaaacacaaaccggtagaatatattgctcatggacttgcgtacaaatggcctatgaaccatgaacttcccatatacccgatgcagaatcgtcttcaaacactcccgttctctaggatcctccgaatcaaacaagtcaagcaacctcacaatgaaagcatgatctaaatacttttttgccactttagcatcaagacacggagaagtgataaacttaagcaacaaatcatacacaatctgcaaatgaggccaagcagggtcaaacatcggttcatcatcatcgttttcgccaccagaactagaccgataattcggaggaaagaccctaaagagattaacagcacacattctacacattgcaagaatagctggctcagtgaacttaacagaccctgaagctacaaaatccaaaagctccaacaatgtctgccttttaacatctttctctatagagtttttaccagggtcagagaaatcaaatgtcacacaacagagactaactttactcacaaagagattcaacttctcagagcttggtacatccttaaacggtaccaaaggctcaataccagcaacaacactagctgggaacacagcagatgacatacgcttccctgagttagatcgaaccggacccgaaccaccaccactagtaccggatctctgaaccggagacgataccggacccgaactcgaacgattcagctctcctgaatcagattttgaagacttcctcggaagtttactcagaaactgcttaaacattctctctttcccaaaaatttcaaaactttcacaaattgggaatcaaagaagctcaaatccacatattagccctaaattctccgacaaagaacatggatctgacattaaaaaaaaacagagaaacgtgtaatgtgggtttagatccgaagaagaagcagagaaaaaaaaaaggttgacacttttataatacccaatacttgaaaaccctaatcattaccttgctttctccttcaaaatcttattctcatgattccagtatccacgaacaaaaacattcctagagagagagagagagagaaaaaaaaaactgaagctagagagtttttcaaaaaaagaaaccaaatctggaagaggaagaacaaaaaacagagtttggattttgagaaattttatgattcgttacggtgttttcttcattgtttttttttagatttctgagaaagaagaaatttgcaggaaaattattttaactttcctaattttaattttgtttttttcctttttgtctcgaaaagacagcgttttcgtttcagttttatttccgataatataaaaattagaaaacatctcgcatgcaaattattaacgtccgtttgatgagacgttgacacgtaaatccaaccgttggatttgtctgagagaggaatcctaagtaatttggttcgctaaggcccatttattattatgagcctattattaaagcccatttatgattttggccttatcacaattcacaagagtatcctccactaatctctagaagaaactgttttcgtcaccgaaccagctgaaatctttttcgcaacaaaacaaactctatccccaaattcagaagctttttagggtttcttcttcctttcgcacatatcttctccgattgattttgcagtgaaattgtgtatctttttgttgttaatcaggtaaacttttcatggtcgccatgtttattttttcgctagatcgagctttttttcttcagtcaatttcggattttatttggtttatgttggtgtatattttttgatttggttgttgttgaatcttcttagaaatgggttttgtttaattttgaattttgattttgtttttcccctaatcggaaatgatgaaaatggagatgtgtgttgatcggagtatgttataggattgaatcaaagtttctgttttttttttctcagagctgttgaagtgaatgtttggatatagctgtggtggtttcgtatcatgtccagtaatatg

SEQ ID NO: 34378 - DNA, 50 bp, Unknown; identical to SEQ ID NO: 30
  misc_feature (1)..( 50): 2750-1469P.txt file - cDNA_ID_3077584; gDNA_ID_1200; Annot_ID_144876
  misc_feature (24)..(24): n is a, c, g, or t

SEQ ID NO: 34379 - DNA, 3003 bp, Unknown
  misc_feature (1)..( 3003): 2750-1469P.txt file - cDNA_ID_3077592; gDNA_ID_1620800; Annot_ID_168607
aaattacgcaatatttgaaaagtaagaattattgctattaaaaaatcttgatacgattcaaaaaaaattatataaaaaatacggtttttaattatttaaattttcagcatctttacacaaaaaagaaaagaattcattctcatgttcaaaactatctattttgttaactttgtttttgaattatgcaattttaaatatatttcctaataatactagggatgtttgatcttaaaataaaaacaatttggtcttagtcatcaaattttaattttttttgggtttttttttgccgtctatatttattatttattgcaaattatgagaactgtttcatatacaattctacccagaacaatttttacgactcttattagatctacgagagatgatatctccttcttcttctccatgcttttgatagacatattcaatgatcctctttacgtagaatcttgacgaacggctataattgtacatcgttggagatctcatgtacatttacctccattaatctgcaaatttgttaataaatcttagtatctgggactcgaacctcaaattttttggtataaaaacattaataaacctttcgtcaatcaaagggatttccaaaatcacgcaatatccctacctaaactggaaactccgacccaaaatcaaacaaaaatttgaattcaacatccctacctaatactacgtatattatatgaatacaacgtacctcaaatagtattttgtctttaccaatataaattatataattataacggacctactaatatatatacaaaaaaaggttatcgatatctcttctctgtacaagagatcgagtcatgaggaaatgggcccgtaaaagagtaaaagaaatgtacaatgaagaggagacaaagccatgatcctgccttttgctttgatctcttcttttttgtatgggttccactacgttcgttacccatgccccacccacgttttcgacggttcctcgtctttttttggttcttctctcactcttattatacacttgtttatcttttttagattcaacattttaaatagtgattgttgtttgttcgaacttgggtcttataagtcctaatcaacatttaattggatccattagaaacagttctttcattggagctacgtgttacgtttttctgatatatgataaatattacaaataagactagccattttagattttcaaccgtaagtatgtgtagaaatacacggttttaaatttataatcaacaaggtagtagaaaagatagatagtccacactagatatgagtaaaatatatacatcaagtcatattatataaggtgggaactatttgtggttttattataatcgttagaacgatatctcgaatttatttagctcaaaaacaaatatcactagaaaactactacatcaaaatcaataccatttcttacaaaacaatatggcatattgatagaagaatgtacaaatcttcgatgccataaacagtcgcatcagaacagttgcatgaccgtgaccatgcgaagtagtgtacatcctcatcctcacgttcgaatgaacgttctcgtaaatcgttcctacaacacatatccctaaagagagagcaacacatcctgtttgtttaatgattcggccactaaaataaacgtgtagttaagaccaaaaacgtaaagcacacctgattagaatattgatctctaagagtaaagaacgcatatattggtggttttggcggagctaaattccaaaaaccgaacataagacaggtagttagaaatgattttagagtatttgtttttaaaaatgaaatcctttagaaaatgcaatttcttgggacgataagaatgagaagaagacacgattctgaatttttctgaggccaacttcatggccgactttggaaaccgcattcttagccactgaacggcgcccttaataccatagactattctcaattttgttattaaaaatacagccaagaaacaaaccaaaaaagagcacgaagaagacaaaagacttaaaaaaaagtttcaaaaggaagagatttgtgggtgtaacacatgccacgataaacgattctcctagtaatagtatctgtccaccgatgatctaaacgaccaatttggcatttcccagttactatcataattaatcatatttgtcacgtagattcagatgtaagattactaaaaaacatctcaattattttcacaatcttagacttaagtgtttatagcatgtggataagggatcatgatcataagtttatagttatgtttagtgttttgtttttggtagttttagtttcaggcggttttgaaacactttttccgatccgacctatactcattttattttttttgttttatttacaatttaatttacagattagacattaacacatattttcaatttctcaaaattatccaaaatattcatatcttaaagatgtgaaaatttatcagaattagtgaattcgaagtgtaatttagacgatttaaactatccgaatccgatcaaaactatacgattaaaactatccgaatccgagccaaaacggtatttagtaaatttaatattttattccgtatatttctagcaatatatttaaatactcctgcccattacctgtttatacgcaattacctctaatcatctacaaacctgtcccaattggacacttctggcttccccagtcacagcctaaacagagcttgactcaataaacagcaaatataattgcatcaaaacaatactttttttttacaaattttttattccggaagtaaccccaaatggtcaataaggttccaaatctctgaaaaggaatgaggtcacaaccccacgtgggataccaactagccacagtggcacacactcgtaatatatagaaacctccaaggtcattttcatagttctatccccttataagcaatagccacaactctctttgctaattacattttacactcatctcgttctctcttccgtcaatatg

SEQ ID NO: 34380 - DNA, 3003 bp, Unknown
  misc_feature (1)..( 3003): 2750-1469P.txt file - cDNA_ID_3077592; gDNA_ID_1620792; Annot_ID_168351
aaaattacgcaatatttgaaaagtaagaattattgctattaaaaaatcttgatacgattcaaaaaaaattatataaaaaatacggtttttaattatttaaattttcagcatctttacacaaaaaagaaaagaattcattctcatgttcaaaactatctattttgttaactttgtttttgaattatgcaattttaaatatatttcctaataatactagggatgtttgatcttaaaataaaaacaatttggtcttagtcatcaaattttaattttttttgggtttttttttgccgtctatatttattatttattgcaaattatgagaactgtttcatatacaattctacccagaacaatttttacgactcttattagatctacgagagatgatatctccttcttcttctccatgcttttgatagacatattcaatgatcctctttacgtagaatcttgacgaacggctataattgtacatcgttggagatctcatgtacatttacctccattaatctgcaaatttgttaataaatcttagtatctgggactcgaacctcaaattttttggtataaaaacattaataaacctttcgtcaatcaaagggatttccaaaatcacgcaatatccctacctaaactggaaactccgacccaaaatcaaacaaaaatttgaattcaacatccctacctaatactacgtatattatatgaatacaacgtacctcaaatagtattttgtctttaccaatataaattatataattataacggacctactaatatatatacaaaaaaaggttatcgatatctcttctctgtacaagagatcgagtcatgaggaaatgggcccgtaaaagagtaaaagaaatgtacaatgaagaggagacaaagcatgatcctgccttttgctttgatctcttcttttttgtatgggttccactacgttcgttacccatgccccacccacgttttcgacggttcctcgtctttttttggttcttctctcactcttattatacacttgtttatcttttttagattcaacattttaaatagtgattgttgtttgttcgaacttgggtcttataagtcctaatcaacatttaattggatccattagaaacagttctttcattggagctacgtgttacgtttttctgatatatgataaatattacaaataagactagccattttagattttcaaccgtaagtatgtgtagaaatacacggttttaaatttataatcaacaaggtagtagaaaagatagatagtccacactagatatgagtaaaatatatacatcaagtcatattatataaggtgggaactatttgtggttttattataatcgttagaacgatatctcgaatttatttagctcaaaaacaaatatcactagaaaactactacatcaaaatcaataccatttcttacaaaacaatatggcatattgatagaagaatgtacaaatcttcgatgccataaacagtcgcatcagaacagttgcatgaccgtgaccatgcgaagtagtgtacatcctcatcctcacgttcgaatgaacgttctcgtaaatcgttcctacaacacatatccctaaagagagagcaacacatcctgtttgtttaatgattcggccactaaaataaacgtgtagttaagaccaaaaacgtaaagcacacctgattagaatattgatctctaagagtaaagaacgcatatattggtggttttggcggagctaaattccaaaaaccgaacataagacaggtagttagaaatgattttagagtatttgtttttaaaaatgaaatcctttagaaaatgcaatttcttgggacgataagaatgagaagaagacacgattctgaatttttctgaggccaacttcatggccgactttggaaaccgcattcttagccactgaacggcgcccttaataccatagactattctcaattttgttattaaaaatacagccaagaaacaaaccaaaaaagagcacgaagaagacaaaagacttaaaaaaaagtttcaaaaggaagagatttgtgggtgtaacacatgccacgataaacgattctcctagtaatagtatctgtccaccgatgatctaaacgaccaatttggcatttcccagttactatcataattaatcatatttgtcacgtagattcagatgtaagattactaaaaaacatctcaattattttcacaatcttagacttaagtgtttatagcatgtggataagggatcatgatcataagtttatagttatgtttagtgttttgtttttggtagttttagtttcaggcggttttgaaacactttttccgatccgacctatactcattttattttttttgttttatttacaatttaatttacagattagacattaacacatattttcaatttctcaaaattatccaaaatattcatatcttaaagatgtgaaaatttatcagaattagtgaattcgaagtgtaatttagacgatttaaactatccgaatccgatcaaaactatacgattaaaactatccgaatccgagccaaaacggtatttagtaaatttaatattttattccgtatatttctagcaatatatttaaatactcctgcccattacctgtttatacgcaattacctctaatcatctacaaacctgtcccaattggacacttctggcttccccagtcacagcctaaacagagcttgactcaataaacagcaaatataattgcatcaaaacaatactttttttttacaaattttttattccggaagtaaccccaaatggtcaataaggttccaaatctctgaaaaggaatgaggtcacaaccccacgtgggataccaactagccacagtggcacacactcgtaatatatagaaacctccaaggtcattttcatagttctatccccttataagcaatagccacaactctctttgctaattacattttacactcatctcgttctctcttccgtcaatatg

SEQ ID NO: 34381 - DNA, 3000 bp, Unknown
  misc_feature (1)..( 3000): 2750-1469P.txt file - cDNA_ID_3077596; gDNA_ID_1620800; Annot_ID_168603
gtttggttaagtgggctttagttatatagtacaagagactaacatgcttaaggaatgtttctttggtagaaaggtaatgctcccgaagcctctcccgcttcacctgcatatgaagtatcgtgtaagaactttgcaataagccccctaacactacaagacagagaaaagttcatgctacaagactacaaattcataaaattatataaactattattctttgatcattattagcacaagatatgaatatgaaccctacgaaaaaaaaagatatgaatatgaatatgaatatttgtgtatattaaatcaaaattggctacgacaaaaaaaaaaattcaaaattggctatgggaaaaagctaattatgtaaggttgttcacaaaagggctctttaaacacagacgattcttgatccttatacaagtcttatgttcaatcttgcaagatcaatttaaactacaaacttgaatattgtgctccacgtcataggtttaaaactataactataaactacaaaagttggtggttcccttgttgacattttccaacgcgttgacattttaacacattgacttgagacgtccatatactcaatggcttactccagaaccttgaagcccggtggagtagatctagataagtaaggtgaatcatcttcttcctcaaactctgtttaactgtcaagaaagcggatcttataggcatgggaaactgttttctaaccgaacaacttgcaacaattccaggtatatatgaatctgtgtgaggagacacatcaatcccaagacgttatctccatctaaggaaggtgttggcatggccatcgccgttaagagattttacttaacctatgaagaagccttgcaaaagtgatttgtaagaaattaacctctacgagagagactgatcactcatatatgtatgcttaacacggcagccgaggtttgtaggttgacctagagtttctacgacataacctgcatccaagcttggtcaagctcattggttacggttcggatgataattgttgttcattgtttctgaatactttccaaacggaagcttagagcgttacatttataggagtaagcaagctagaaaattgtattgagcgcatttcttagaatttactacgaacctcctgaatacatattctcaggtaagtcctctctcaagctacagaatgaccattaaaattcatacactaacctaaaactgattgcacggtaatacgcatatacagggagatcacacatggcgggcgatgtatacagcttcggtgttatactatttgagatcttaactggtttgggaaacccgtgcatcatcttagcagaggaagcaacagagaatagaaaagaaaacattgtggaaatgatcgatccagatttagagaatagctatcgtgttgaagaggggatgcgtatgtgcaagctcataaaactgccttgaaagagatcccaaggaaagaccatccatgcaacaagtgctagataatttgaatgctatagcccatatttgagaggacaaactaagggttataaaggattgtggttcagaggttacacgcctctcttcagagctcctatgaggaactgtgaaaacatttccaaaagctagcttaagggtttgtgtgcctttatgtctttatgtagcatgatttactctcctcctaccggtgtgggatattttactcatatttctgtaatagctcaatcaagcttacattacacatccaattcaatctcataaaatcttatacataaggttcacatatccatgcataaccatacaaaagcaaattgtgcggtattgaagcctaaagagtactaaaacagtgaccctactataagcacaagagagactaacatgcttaaggaatggttctttggtagagaggtaaagctcccaaagcctctctctcagctctctcccgcttcacctgcacatgaagtgtcgtgtgttagaactttgctatatgattcttctatcactacaagatagataaaactgtttttgttcttacaagagccaacatgtcttggaggtagctcctgaatggagtctgcactgcctgtggaattacagagacaaggaaaagaaaaaaagatttacataagcttcctatctcacaactaacaagcactatctcaaaaaaaacttctttcatagacaagatcttacaaagcttatcaagttacaattatattacagaaccaaaacaggtttctgaaaacagagtgttcttgatcctaatacaagtcttaagtcaaatcttgcaagctctatctacaaactccatagctatataccgttttagctctgttgtcacttacttagagactaaaacatacctgaagattatctgggaggtattcatgtttcatagaaagatccattgcacgcataagacgctggttccgagcatcaacaatctctctcggtaaacgattaagagcttctttaatatccaaatcatacaaaggatcataaagatcgtcgtatctaagacctaaaaaatcgtaaaattcccaaaatcagccagaagagaattagggtttggtttctagggtaagagagaaagaaagagtaccgtatctgcggaggcgattagaaacagacttcatatgcatacgagctaagaaattcttcctgggatctactagtctctggagaaacgacgccattatcttcttcggagtaacgttgaagatgtgaattgtgatgaaaccccttcgccgctatttgtaatttaacccgggaacgaagaaggaagaagcatccagagacatctgtttaaacgccgtcgtatgaaactctagccaaacggcgtagtatgtactcttatcaaaaaacggcgtcgtatgactcaccaaataaaacgcgtcaaccgttgactctcaaacgcgttttcgttgactttgctcctcggtgtgaaaaactaaaagtcctctcttcttcattgaactctagtgttaagatttagcagagagtatccgaatg

SEQ ID NO: 34382 - DNA, 3000 bp, Unknown; identical to SEQ ID NO: 34381
  misc_feature (1)..( 3000): 2750-1469P.txt file - cDNA_ID_3077596; gDNA_ID_1620792; Annot_ID_168346

SEQ ID NO: 34383 - DNA, 3003 bp, Unknown
  misc_feature (1)..( 3003): 2750-1469P.txt file - cDNA_ID_3077637; gDNA_ID_1620801; Annot_ID_168664
cttggtaagacttaagagcgtctcaagtctcaacattccataagattctctgagcaatgtctcgtacagttgcttgtttaatatttaggcataaatcatatctatatattactcttaacttaagccgacatattaacttgattatcagggattattaacaattagttgtcacagtcccaactaaaactttgatgtaagagacccgattaagtgattaaataaaaagatcctccaaactcttactaaaaaaaaaaaaaaaaaaaaaaagagtaactttgtatgaactatgaatgatacatatcatacattacatgaatttgactacttttgtgaatggcctgtgagtgctgacgtatacacttttgtccacgtcagcatcaagtagccggtggacctctctcgatggtgcccactggtaagtaatgtcactgaaacggataaattatttctgcagcgcaattaacggcaatattgacgccgttaataccctttgtggacgaataccactgtctgtcaggtaagtaggtccacatcaattcacgcgtcacataaacaaagcaatttacattatcattgttgtgtatagatttggtaacgaaaacaaaataaacatttgtttcttattgttttttgttagaaaagttaaaaatgataataatttgggaactcacaacaacggtcatcgtcccaacaagtctgctgggagcaaattagcgaagaaaaagagttttctgctaacgtgtgcgtcgtttgatctgagctcatggaatctaatggaagatcccaatgtggaatattcattcacgtgagattttttttttgtttgcatcaaatctcacgttggccaatcgcagccgttcatttcttcatggggattttcctcccatgcatgtgggtacttttttaagtttttgctggatccaacggctacgatccgaaatttggctatgtgcaattaagccaaataaaagaactcgggttaacaagtctaattagtaattagctttaactatcctagcaatgaaaggcgttgggagattcaaaggtaaactagtgtctagtgatatgataattgtatttgtaagctacaaaggccatgcgattacgtaccgttttttgaaaaaaagtaccgtcggaaacaactatggaatgggccttcattttcaaagcctgatacatagtgatatgtaataataagaaaactatatccaaaaattgccatgtcaccgtacatcaactcatatgccatccctctaaatatttgattgtactaaaactcagaataattgacgataatataggttatttcatatatttattatatttgaatgatcgaattcatttgaaaaactatcaaaatacaatttcttgatcagattattcaaagagtttctatacttttgggtcaattttagatgtatcacataaatatttagattagagtcaacgaggataattatactaatactgttgaattgttcaaagtttcagtttgataatattgtggtcaagatagttgaccattaattgacattgtattagtcaaaagacataacaaacaaattctcggtctattgaccaaaaaatttccaagtttgagaaaatctgatatttatataggagcgagccatgcagcgaatcttagtttaactctactttgaaaaataccatggaaaaaattaaagacctaataagcataagcctgtgatttatccactttgttggtggtatataaggtacgtaacatagaatcagcctccatcttcctttgatataagaaaatctatataaaccaaaactaatactcggttagctcagcaagtacaatttatttatgatatttcttgtgtatccaatccttaattagtgtaattagttagtataatcatttttattgtataacataaaaaacgattacatagtttggttgcggataccttccttgcctctcaccctagtctaatccatctttatattttgcaaaagttataaactattattcagccgctctttatgttaaagcgatcaccagccttgtttcttacatctttaactctgccctacctctcaaaatttaagaataaacataacatctttggacgacgtatagtaatggagttatatgtttgatctattcgtacgtgtttgttctccctctttattcaacataaagataaataatttcttacatcaaataattaagattgcaattctagaaaaaggcaatagaaggtagggccaaagtgagttagatatatgagattagaatcaaacgtacaaaaaattccaaaacattgaaagttcaaacccttacacattagctgtcttcgttatagaagcctcttcatttttattccaaacccttacacgtaagctattaattcgttcaccaatatcttaaatcactaattataaagtacgtagtaggaaaaaataccaaattttataattttccaccaattcttaaaaatattttattcccttcagaaaaacaataaaccatcgctttggatacttcaacattttaaaacgtcattttttgggggaaaatagcgacaaattttacattaacaaaaacatataaaaatggcacatttcaattttgtgcagggcattcgaaaattcgaaattgcgaagtttaaagattctaaaccacagttttttccggattgtggtcgaatcaacctttcgggttagatcaattttaacagcattggttagaggtatatactattaattagacatctggcgtacatatacgtacttacgtgtgattctaagtttccatttatatattgtttgtgttgttttcacaaaataatcactttagtataaataacccttttagatatcatccttacccgacagaacaggtgatactcaatctagcacattctcttctcttttgttctctgtatcgcgctctctctctctctcttcattgattgagtcatcatcttcttggacaagaagtggtccgaaccaaaaccaagccagagaatg

SEQ ID NO: 34384 - DNA, 3003 bp, Unknown
  misc_feature (1)..( 3003): 2750-1469P.txt file - cDNA_ID_3077641; gDNA_ID_1620801; Annot_ID_168656
ctaaaattaatagaagatgtgtgtatattttacaagaaaaatatgccaaattggtctaatcaaaagcaaggaagtggtggtggccaatgtcactccactccactaatttcattaagaataagttgaaaatcttatttctatatttaatttaatcagcaaaaaaattagtatcattatccaaacctttcattattgcttgccacaactgctaattttttttttttgttgtctgaattttattaaaaacccaaggtagaataccatttgaaatacaaacgccggcagaccaactaaatgtctccaaaaactaagcccaaaagaggaaaactaagcctcaacggaacggagaaactatttagaccaacgaagaaaacaaaagacaaatatctaaaaaagatcaaccgttaagggaaaacgaagatctaagcactaaaattgcgcaaaagaaccaggaaccctcacaaagcttccccaaagaaacggaaaacgtcggaaacaccaataagatcggaaagaactcacatcgaagtcaaaccactagcaatccgacagggaggaaagcaagaagccaccagagcgagagacacaactactaatcaaataagcaattattatgacattatatattgaatttctgatatttatgtttgtcttataactatgttaatatctcacacgtactgacagaacaagcagccttactttagaaagtttagaagaagacagaaacaggataatcccaaacattgtgttgggttgcttgaattattagccgacaagttgagttctaaccacttcattcataaataaagaagtcagctgatgaagattatacaacaatctttgtcataaactacgtaaagataatgaagtagctagtcctgtatatattatcttatgtttcctggtactagttctggtgcgactgctaaaatctaaattgtcgtctttagattaacatttgttttttttttctctctatgaaagtactaaattttcataggataagccattcaaaatatcaattacagtgactattgagtattgactaatattatttgaactcacaactcacctacatgtattaatgtttgcattattttagtgattgctaaaacacataagtgtcacatgacatatatatcattgtttaggctaaacatattatatatatggtctatattatagatatcgatccaagtctattagccaatccaacactaaaacaatcctcttgtaaatgagtagctcatgacgacattattctgtttcattttggaagcattagcatcatttccacacacacgtgttgacctaaaaaggcctatatttgttctatttataaagccttaaattaaagactcaagcaatatcacatggatctaatatataatcatatgttgcatagaaaaaaagaacaaaaaagaaatagagagaggtggttgaatgatttaggctttacatcaaacccactgtttcaataattttgttaggtgtgtgtgtgtatgtgtgaatacagctagagagtttcacgaagaagctggttggtcaaaacttttgactcgaaaggaattgctgacaaatcgatcaatcaatttgcttcagagagaaaaaaaaaacacataaacacaattgacatctctctatctatacggtccgatactagacttggcgaaccaaactaaagatacagtaggacactgtgactgtctaggaccaccagagatattcagtgaagtttctatagtcatcataagtcaatcttgctgactacatcatactaataggaactatagtcgtaaggaacatatataccacattaagcttgtttcttttgattaactcctcaagttgttttcaaaatactcgacgaactagactgaatcagcaataagaccaaacatgtaaaataaacgttgcagaagttaatgctcattagttttctcttttgtaagaacatacaaacacacaggtgacaagttttggccaagaattacaaaataatatgataccttcatagtcatacctcagaattaatgtcctagtcgagaagcagaagtttgtttttatagatctttcttttcattagagaaatgggtatcggcccaataacataggccaacccatttgcatttattttctcatatccagtaaggatatactttcaaatttttgtataaatgggattttgatttttctttaatatgttgaacgaatttagtaaactattcacattattttatgttcagaactatactgtaaaataactaacggtcaacaataattgagagaatttggaagttttcgttagactcacatcaataatgtgactcaaagctaataattgcaatttccgacaaatttgtggcatgggcgtttatgctgtcttctactcttcttgtatgacaacgcacatacccgagcttcgtaaattttatttctatttttttcaagtatattttgtttttaaaatgcgattttagaaagaatttgtgtgatcagaattcacggtgtaataatagtttgtatgcatactgttgtttgatgtgtcataatccaaatttagataatatgtttatgtataatgttagaaataaaaatgtagtagaaatttacgtatattttcactgataatagaaattttcaaatatccttaaactgtcaatatccaatttctttatgtttaaaatatttcaacagctaattttcaaccgctatttattttatttaaatttatcttgtcattatatttcgttattgataaatatctgaaaaagtgggtgacaaaaaaattaccgattcaaattattgtaataaaattgacaaatcaaaagattgaaatagaaaacaaaaatggactacatttctcaaaatggcaaataatttttattcatatttatcaacctcgaaatgacctacatatatagagacacaaagatcacaacaaaatcaaccattcctttccttatcttcttcctcttttgcttttctaatctctcaatg

SEQ ID NO: 34385 - DNA, 3000 bp, Unknown; identical to SEQ ID NO: 5539
  misc_feature (1)..( 3000): 2750-1469P.txt file - cDNA_ID_3077645; gDNA_ID_1620801; Annot_ID_168655

SEQ ID NO: 34386 - DNA, 3000 bp, Unknown; identical to SEQ ID NO: 5537
  misc_feature (1)..( 3000): 2750-1469P.txt file - cDNA_ID_3077649; gDNA_ID_1972118; Annot_ID_178862

SEQ ID NO: 34387 - DNA, 3000 bp, Unknown; identical to SEQ ID NO: 5537
  misc_feature (1)..( 3000): 2750-1469P.txt file - cDNA_ID_3077649; gDNA_ID_1620801; Annot_ID_168648

SEQ ID NO: 34388 - DNA, 3003 bp, Unknown
  misc_feature (1)..( 3003): 2750-1469P.txt file - cDNA_ID_3077660; gDNA_ID_1972120; Annot_ID_178922
ataactctagaactcagatattaatactcaccgtagatccgtgacctcaacacgtgtcatgtttctgaaacatcttcattaaaactacccttatatttttttatatatttaagattgaccttataactttgactaatactgattacaccctctattctccgaatcggttatcaaaaccaatttcactggaccgtgatatcagaaaccggttcactgaggtgggcgagattttttgttgtcactctcctctcctcgttcttcgatgctcatccattagaggaggagccgatgtttctgcttccatggtaacgctctcgtctccatctccctcgctctcttgcgtagagaacgtgacatgtaaatcttctcacgtttctcgggttctaatctccggtaccgataatattaatcacggtgaatcgtcggaagccaaaatactgagagatgttcatatcgtaagaactttgagatttttctttgaatctcagttctctgtgatttggtacgttcaattacggatatctaatttgagttaatcgttgttgtgtttgtgcttcttagtcagaaaggttattggaggatttcactgagcttgcaagagagaacactgagaaggacctcgagacttgtgggactctcgctgcctttcttgtaagattgttttgctttcttcgcattcaagttgattactttgggtgataagagaatctgggtggtgagaaaatcaaggaaaatgttagaaagtttcagactttattgttcctaattacaacttctaacagagatctttgcaaatttgaatttttagtgaaactcgatctatgctattgtttaaagtttacaccttgttttgacttttgtggtcatgattcatggttgttttgcttctgttccagggttcttcgtttttcgagtttcatgaacctgatggtaattacatttctatttctgttcatgctgtaggaaagaggaattttttatgtaaccactctgataatacctaagcaagaatcaacttctaattctgtgagttatcttagaaagattatctcgatcattttgtggtattcaaaatgaggtgcttactcaggtgctaaaattggcagtgtcaggctatgaatgaagtggaagtgttttccattcaaaacgaaagagaactctatcccgtaggatggattcatgtatatctctctcttctagctccctccatgtttagtgatctgtttatctactttgtcttgacttactataacgaggttatgcatattttccagactcatccttctcagggttgtttcatgtcatctgtagatctgcatacacattattcgtatcaggtacatctctgctgtttccaaattgcatatatactaggtttgagacaattctgatctcagtttcccatcatgtcattcttaggtaatggtgccagaggcttttgcaatcgtcgtagctccaactgatagctctaagtatgttcttccaaagctatggagtcaattatacagtcaacatatttccttgatagactctcaaactgatctttttggcaggagttacgggatatttaagctaacggaccctggaggaatggaggtactgagaggctgctcagagactggattccacccgcacaaagaaccagaagatgggaacccagtttatgagcattgctcaaacgtctacaagaactcgaaccttaggttcgagatttttgatctacgttaaggtaacgacttctgtggacttatcagtaaaaaggttcaaactttatccactgtgggctaaggatgtcaataataaccgtcatcataaccaccaccctaaccagaactgtatacttggtctgagaaggctgtctgattcgggttatgaacacaaggtaccttctattaagcttagcaatgttaataaattgtcatgtccttagatttggatcaattggttccattatggaagaacaacaatgaccatagacataagacattgtattggcgtatgcaattgttatatatctgtacaaatgtatacattggcatctatttctccatataacactacattaatattatcaccatatttcgccattttatacctcttaacttgccagtgatgactgatgaaaatggttgagcttttaaaaaggacgggaaaattttaaacttgagctttgacttgttaaaaaattattcattttgacagttttcgtctgattcaagtttcattcttttcatttctcatttgattgattaattagatacaaaatagccataaattagctgtaataataatttaaaaggtatctttgagctcttttttggtaaagacatattccaaatacctctcttcacatgaaacaagagtacaaaccccaaaaacagaaccaaaggtccaaacttttcttttgaaagtaataaagctatcaaagctctttccttgttaaagtaaatagtacagaggatgggttttatcagaaaaaaaaaagctagctcatttcatattgttgagtgttgctatcaaaacccatacagatacagtactttgttttgcttcaaatccctttatggccgttttcaagcacatgatagctttcttcgtacagtcaagagtaaaacctctctttttcttaccctatcttctctctctacagatgtcacagtcacctctgtcacggatttgggtacagagactcgcagacgattcactcttctttctttctctctctctgggttttaattcaaaaagtgaagttggttaccattgtcttgtacgatcgtatattcccgatatgatttgttttgacagagcaactgctttgtatatatatgccaaatatctctctctctctccctctctccttgcatcaatttataagtaagaccaaaagagatcaccaaaactcaggcttcttgtttggcttttcttattgttgattgagagagtgagagtaagagagagagagagagagagagagtgagagagagagagagagagagtgagatg

SEQ ID NO: 34389 - DNA, 3003 bp, Unknown; identical to SEQ ID NO: 34388
  misc_feature (1)..( 3003): 2750-1469P.txt file - cDNA_ID_3077660; gDNA_ID_1620803; Annot_ID_168744

SEQ ID NO: 34390 - DNA, 3003 bp, Unknown; identical to SEQ ID NO: 20762
  misc_feature (1)..( 3003): 2750-1469P.txt file - cDNA_ID_3077668; gDNA_ID_1972120; Annot_ID_178921

SEQ ID NO: 34391 - DNA, 3003 bp, Unknown; identical to SEQ ID NO: 20762
  misc_feature (1)..( 3003): 2750-1469P.txt file - cDNA_ID_3077668; gDNA_ID_1620803; Annot_ID_168742

SEQ ID NO: 34392 - DNA, 3000 bp, Unknown; identical to SEQ ID NO: 5566
  misc_feature (1)..( 3000): 2750-1469P.txt file - cDNA_ID_3077679; gDNA_ID_1620803; Annot_ID_168736

SEQ ID NO: 34393 - DNA, 3000 bp, Unknown; identical to SEQ ID NO: 5568
  misc_feature (1)..( 3000): 2750-1469P.txt file - cDNA_ID_3077683; gDNA_ID_1620803; Annot_ID_168730

SEQ ID NO: 34394 - DNA, 3003 bp, Unknown
  misc_feature (1)..( 3003): 2750-1469P.txt file - cDNA_ID_3077687; gDNA_ID_1620803; Annot_ID_168727
atggtgttcttcaatcaaatattatgttaaaaattcttaatctttctggaaaccctatcggtgatgaaggagctaaggttagtggaaatatgatatactagttttaaatttaacttccgggtgtccaatggtagaaattcctcagttccatcaagagaagagatcatatcgatttctgcttatatctttagctctaaaatcacatggaacttattctctatgtatacgtttctggctgagaatggtttcgcttcattttttctggttatggcagactttatgcgctacactgatggaaaattctagcattgagatacttcagctgaacagtactgatataggagatgaggtttgtttgagcagatgctttgatttacatgcttttcaagctcctaagttagtcacaatccttcaaattgttttcatacgttaagtagttccaatgttcttgcgcagggtgcaaaggaaatcgcagaattgttgaagagaaattcgaccttgaggattattgagctgaataataacatgattgactattctgtaagttttttctgttcatgtgttgtacagttatatttcagattgacataccaagtttatgaattaaatctgttgcgtcttcttcccttctttttttgaaatggaggtagggattcacaagtcttgctggagctcttcttgagaataatacaatacgcaatttacatctcaagtgagtttaggactatagatggatatatcttttgggcgtgctttttttattttgtctgtatagttcatatccctgacataccgatttatggataatctgtttcagtggaaattacggtggtgctttgggtgccaatgctttagctaaagggcttgagggtaacaagtctttacgggtacaaactttcctcatgtctctttcgatgtatatcgtgtgccatttctatattaaaagagacatttcatagttagatctgttatcttatatgatgcattaaaggtgatttctgatgtcatcagagacaaccaatgaataaaggtcatcaacagttgatttattcccttggcctttccacctgcaggaacttcatttgcatggaaactctattggagacgaagggactcgtgctttgatggctggtctatcttcccacaaaggttttccaatagaacacttgtcatacgtctatattaactcttccgtacctctactgtagaattcagtagttataccgagatgcattttcgtgtgcagggaaagtggctttgctagatctcggcaacaactccatttccgcaaagggtgccttctatgtagctgaatacatcaagagaagcaagagcttggtttggctgaacctgtacatgaatgatataggtgatgaggtacatatatatccaatttataacaataatctggattgtgtctgtgcttctctaatatcggaaaaccttgtctctttttgctctgttgtctatcttaaagattttcaatggtttcagggagctgaaaagattgcagattctctgaagcaaaaccgttcaattgcaaccattgacctggtgagaagtgaccatcttctccagcctccctaagttttccttgcgtccatatcgagctatttgttctgctaacacgtttttggtaaaatagggtggaaataacatccacgcggagggagttaatgctatagctcaagctctgaaagataatgcaattattacgacggtcagtgccaaaaacccttctcatctttgattccttgtttacgtataactagtatgataatgacactaccactctcaatatttcctcagttagaggttggttataatcccataggaccagacggagctaaagcattatctgaaattctcaagttccatggaaatgtaaagacgctcaaacttggttggtgtcaggtaaagcctgtccataactctttatctaggaacaaaagtatttcttcacagttacttatttcgttttgtcatggttcctttcatttcttattcctgcagatagctgccaagggtgctgaacatgttgcagacatgttgagatataacaatacaatctcggttttggacttgcgggcaaatggacttagagatgaggttcctgcagacagattttatgagtatcagatttgtacttctaatatagctacgaactatatgttttcataatgtatgtggtacgttatttgcagggagcttcctgcttagctcgaagcttgaaagtagttaatgaagctctgacatctgtggatctaggattcaatgaaatacgggtaaaaaaaaagcgctacttcgtttatcaatactgtgtcttcttttaagacttgtaagcaggtcaatcttattattttgcctcatttgtaggatgatggagcattcgccattgctcaagcattgaaggccaatgaagatgtcacagttacatcgataaaccttgggaacaacttcatcaccaagtttggacaggtaagaaacatatggtgcaatggagataatcaaatctttcgctcgacattgctgagaaatttcccttttgtgttatccagagtgcgctcacggatgctagagatcatgttcttgagatgactgaaaaggaagtagaaattttcttctaggagagacattgaagtgaagaagactttgtcactctgtaattttgcaccattagttgttgtttcattatttatgacgttgaaatgattcaagcgagagataaaacatttgttgttccttacggtgagatttaattttaattcaaggaagttttcatgaaaaatggtgttgactaacaaaagagaggcattttaagtcaaagttggtcgttgaatgaggaaaaaattcattcggtttagaacaggttatttcggtttggttccgattcggttcgttgaaacgagcgtaattgcctaattggggtattcctgctttgaaagacatatactagtttggtggacaaaactcgagtgagttacgagtaaagcgagaaaaatg

SEQ ID NO: 34395 - DNA, 3003 bp, Unknown; identical to SEQ ID NO: 20766
  misc_feature (1)..( 3003): 2750-1469P.txt file - cDNA_ID_3077691; gDNA_ID_1620803; Annot_ID_168726

SEQ ID NO: 34396 - DNA, 3000 bp, Unknown; identical to SEQ ID NO: 5572
  misc_feature (1)..( 3000): 2750-1469P.txt file - cDNA_ID_3077695; gDNA_ID_1620803; Annot_ID_168725

SEQ ID NO: 34397 - DNA, 3003 bp, Unknown
  misc_feature (1)..( 3003): 2750-1469P.txt file - cDNA_ID_3077714; gDNA_ID_1620803; Annot_ID_168715
agaacaagaaggttacctcctgtatccgatccaagcttcggatattatcaagagtatccagagaaggtgaaagccctccatgcaaacagaaaacctacaaaatttgatgaagtcaaaaagctgtacttagaaaaagatgtatcaaacaccaactgagaaagaacagctctaacctgactctctatgagggcggtaagaggaagataatcgaaaaggtctgtaaaatacttccagacgttagcatttccgtacttcctcaagcattcgtcataaaaaccatagctgaaacagagaagcaaaacatgcatcaaaacaggatagtactttgctgatcagccagaaaccaatgaagaaaagtacgattcgctcaaatataagcttatttcaaaacaaaagcttacacttgagtaatctgccgactctcgtgattccctcgtaagattgtaagtctatccctgtatcgcacttttagtgccaccaatagagaaactgtctctactgaatagtagccacgatctgcaaagaacaaagcaagacaatgagaaaccaacaacactccttttaaactaaatctagctgtcaccatcttatggtacaccaacgaatggttaaagttccaaggatctaaagactagaattcaagggaagtgcaataatgaaagtgagcatcaacaagtctctatattgggaagtttcagtacctaccattccaaaaaaaaacagaacccacaagtaactcactctagataaataaaaaggtggatacttttccaagaattcaccattttggaatgatccaaaaacacagatctaaaatgagaaaaaaaagtaaaaaccccaaaaataaaatcgaaagaagaagaaagacagacctacatagtctcccatgaagaggtagttagtatcaggagcgttgccaccgatacgaaagagctcaataaggtcataaaactggccgtgaatatcgccgcaaacggtaacaggacacttcaccggctgaacattatattcctcgacaaggatcgctctcgcttgatcgcaaagcgtcctcacatccgcctccgataacggtttacactccatcagctgctcgatctgacggtccagatctccgttcgacggcatcttgaaaagccaccaccgatcctatatacgaaaattacggcggataaagaagatgaatcgccggagaatctatcggccagagctaagatatccgaatcggagagatcaaatcctcctagcttctctggtcttcgatagttcgatgtctctctctctcacctggctgagaaaaaatggatattcgttttttttttttaaagactaaaagtgggtcgtgtccaaatagacaaagtataaatgttttatgacccggttaaggttcggttttgtgttaattttattagtctcgccaattgttataaaacttatgattgttttttttctttggttcaaaataaaattttgagttttagttgttttttcttctgttaaattcgttggtgttttcaacttaattctagttgttttcggtcaaattatcaaaaaaaaaaatgaaaaaaaaaagagagaattgagaccaaaccggatcggatttgaattgtgaaccgttacacgtgggtagttggagcagagctattgtcatttgaacttgtctaaacgataagtatatatggacaaatcatctcctcctctcatccggtaattataattagtcaactaatgttttcatattatgttttagatttgacaaatttgcttttaagtttttaatgttgacatgatcgtcgactatgaggcaagttcctcgtcgaacaaatgggcctggagaatctggtagagcggcccatggtaacaaaaataaaagaaggggcgttccgagaattgaactcgggacctctcgcaccctaagcgagaatcataccactagaccaaacgcccattgatgatagctctgacaatacatatttatatttagaaaacattttgaaccattaattttgctattaaattgatgcaaatcaaacctaattaaagtttatcatctaacacagtatgaaaattcatagaccaaacatttttcccttgcatattcttcccacttgtaagaaaatgtgaccgagctttttaggtaaaattaggatattatactttacttactacaaacgaatattaataaaccagatttagtttgaatagactggaatattatgtttcgtttttataaccttaaatcaaatcctcacttacgcataggtaatgaaagttgaaagaaaaaaaaccctaactctgctttttacttggtttttgatttacataatattaaaccggtaagtttgatttggaattgaaaaataaaccaatttcgtacgtaaccttccatttagctccgaaggttctgattacatacagacatgaagatttctttgggtatataagcaaaacaagctcctctctttttcttcttcttcctcgttccgttgccttaccctcttccctcctccgcttccaaaatcagcgagagagggagacacatagagagacagagagattgctcctaatcagaagcaatctcaccattgaatcatctattttctaccaaaaggaagcttcttttgcttttcattttgccaagtttccgtctaaatctctctactttaaaactccggcggccaacgtttccaccgatcctccgacttctttccgagtttcatcttctaacaaaggaacgaagaagctctcttcaccgtttgagtaacgtgatccggtctacaaaggttttaaatcaaaatctcttgctcagaatttttcctcgttttttgtgatttctcttaagattttccgatgagagatctattacttgggacaacgattccgagctatttctcttggcttggactatttccacggttcttagtttggtttggcttcttaaaagcctcttttttttgttcttccagaaatcagtctgcgggagaaagtggaagaagactgaagatg

SEQ ID NO: 34398 - DNA, 3003 bp, Unknown
  misc_feature (1)..( 3003): 2750-1469P.txt file - cDNA_ID_3077764; gDNA_ID_1620804; Annot_ID_168772
tcaccaatgtgagagaatcaaaaccataggaagcaatatatttatatcagtgacattagaaaccaaaccaaatctgacaaaaagttcatgaggatgagacacttcacacaccgttttctgtagctgaggtggagccttaacttgcgttgtagcagaccttttttcattcataaacggcaaaaactctgcaatctgataaacaacaccaaatcatgtatatatgattcaaaccaaagatcaatgatttcaacacctaatgatgaatctgatgattattaccattgtagatcgaagcaaatgtgtattgacgctgtggccttcatataaacgtgaatacgcactttttccatgagcttcaggaactggaaatgtaaactaaattactccaaaagcatcacttcacagtcacattcaatggagaaattgagaaaaattaccgtgacaaagagaagaatgatagcttctccaacaaccaaatctgaaatcatctccaatttgaatcaaagagaactcatttccattcctaaatctgaagaaaccaatgatgaagaaagctaaaaattgaatctttttggtaacagaaacgattcagagttcaatttcacgtattttcctaaaacgcaatcaaagttaggaaatttgcttacggaagagaagaagattctcttgatccagctgttttcaataaagaacgaactgtttgaaatcttctcacgagcgacattttttatctgggtgaagaaatctcaaagaaaaaccctaactttcattgatctcaaattccatcgaaggatttttgtctgtgctgattcgactgttcaatcggaagggtttaaggcggaagagattggctacatcgcggagcactgtatctccgtgtgccttctcttctagactgaaaacgtggacacacgtttcggaaacgcaaacgcaggtttttttcacaattgggctaaaacatgagcaaggtttcaactttcaacaacacaaccgcagaaaatcacagattttgagcccaaaacgcataatcagtaaaaacacgttctaggactttcgcggtacaaagaatcttgatttgttatctcattatacagaacatcaatgaacatattacatcaaccaaaaataaacagataaacgaaaatggaatgacaaatgtgtctcaaaacaatatctggttatcgcatttggccagtttgttcttagtcccacattttcgagtcgactagagagcgattttcgagttttctgttagaagaagctgccttttgactatagaatagtgaaagaaatggcagcagatcggagcttcaactcatcgtctttccatttggattccggtgcagctgctccagcgatataaaccttttcaagattaagaaagagacgcagagtgagtaatgaatctcgaaatatgaatgtcgaggagtaatcaaatgtgtgttttgcagcagagaccttccctctgttcacagaggctactagagctatgcgttcttcatctctaccaaactcgtagaagtagtaatttctgcagatataaataacaagaatttcaaacagatgagtcctttggaaattctcctatcaagaacattgattcccgaaccgatgggagtatagtttgaagctacttgccttaaaccttcttcttcctttaccttgattgtacgagcagagtaaattgttgccgcacctgctcatgcataaagaatatcaaagacaagattctaagcaattttctaatatgtatatgatttagcgaacctggaacaaaaagtcttgcagctgccttcaatgatcccaaatcagatatatctttagcctatttgaatcagagatcattcgatgagcttagtgaacaaggcaaactgatgactgcggaaaatgtaaacttgtaaaggaaatgactttgcagtgcaaacctctaagaaagtgatcttaagttgatttgaaggacgaatgactacactcaaaacttctgatctgcatacacaaatgatttatcacacaagttatcctaatggaaatccaaagggattataaaggaagaggaacaaacaatacccatcaggagtttggaaccgggcggcgaaagtttgtggctttgccttgtcaccatagagagacaatcccgcagagtaatcctagaggatgaggtaacacataatgtcaagaacaatgatcatttcatcccaaaaaaggaagtagcaccagttttcaattcaagcttaagattctactgatcttgaaacacagaacacaatgtaacagtaactcttaaacctcaaaatcaaattgactagaacaacaaccattgattcagacctaacttggcagctaaatacattgatcactaaaaagtctacaactttaaccaaaggagcagtctttgcatcgctatatcactcattgattcgtattcataagagattggtcacagagtttacacacctcaggctcattgacgtcttcaaagtcaggaggaaccctaatagcgaacccactaccaaagtactggaaccaagacttagtgttcgcaatgccgagtcgtaacggtttggtagacttcaaaggatcagctaatgactctggaatttggttttgaaagatgaaggagacgaaacagagtgatgctgttctaagcaccacatctctccgaaaggtagcagaagaagagagaattttgggtttataagggttttgaggtttagggtttggtggatgaagagagagggagtgaagtagaatggccatgagaagaggaagaagaagaagaagaagaagatagaagaaggcttcattgcttcgaatggataagaagtggggagattctctgaagtgtttagaagacaaatgatggtgcaaggcgaagggtacaatagaaatttcgttttttttgaagggttatttggtccttttgtatataggcccattaggcccaaagtttgcatgcttttgatgtggctagtgatcctcggagcttgacacggtgaagtcatg

SEQ ID NO: 34399 - DNA, 3000 bp, Unknown
  misc_feature (1)..( 3000): 2750-1469P.txt file - cDNA_ID_3077768; gDNA_ID_1620804; Annot_ID_168770
aacaaacacacacaacaaagacatgactttaccttcagggaaaagaaaagaaatgaatttggttatccttatgttttctttcaccaatatatcttcctaaaacacccaaccaaacttagttttgtttttccatcaactacagaaaaaccaagaaaacttcaaatagcaaagaaaaaagtacaccttagaagttaacatgtaaagagcatactcttcatacacttcatccaatacttcaccattctctaactcaacttcatttatgagtttcttcagtaacttcttcgcgtatgatccgttaccattcgcagcctaatccaatacacgagtttcacagtaaattacacattactacaactcaagattcaattttgcaaacactaacaagtcccaaatcaataacttgactacaaatatcttaaagcttccacatttctccgagttttcaaaagagtagaatttacttacagcttcaacgcaaatttcccagaaaaatctctgggcgttctcagtaattgatcctccagtgcaccctctacacaaaaaagaacatacagaagcaaaatcaaacgccggagctaatggaacaaagaagctagcggcggcgggaatgatggtggttttacctagcgagagtgatgacggagtccaccggttcgatggcgaggaaagcagagagtacattaaggtactgtgattctgcctccgtctccgccgccatgacttcaccgtgtcaagctccgaggatcactagccacatcaaaagcatgcaaactttgggcctaatgggcctatatacaaaaggaccaaataacccttcaaaaaaaacgaaatttctattgtacccttcgccttgcaccatcatttgtcttctaaacacttcagagaatctccccacttcttatccattcgaagcaatgaagccttcttctatcttcttcttcttcttcttcttcctcttctcatggccattctacttcactccctctctcttcatccaccaaaccctaaacctcaaaacccttataaacccaaaattctctcttcttctgctacctttcggagagatgtggtgcttagaacagcatcactctgtttcgtctccttcatctttcaaaaccaaattccagagtcattagctgatcctttgaagtctaccaaaccgttacgactcggcattgcgaacactaagtcttggttccagtactttggtagtgggttcgctattagggttcctcctgactttgaagacgtcaatgagcctgaggtgtgtaaactctgtgaccaatctcttatgaatacgaatcaatgagtgatatagcgatgcaaagactgctcctttggttaaagttgtagactttttagtgatcaatgtatttagctgccaagttaggtctgaatcaatggttgttgttctagtcaatttgattttgaggtttaagagttactgttacattgtgttctgtgtttcaagatcagtagaatcttaagcttgaattgaaaactggtgctacttccttttttgggatgaaatgatcattgttcttgacattatgtgttacctcatcctctaggattactctgcgggattgtctctctatggtgacaaggcaaagccacaaactttcgccgcccggttccaaactcctgatgggtattgtttgttcctcttcctttataatccctttggatttccattaggataacttgtgtgataaatcatttgtgtatgcagatcagaagttttgagtgtagtcattcgtccttcaaatcaacttaagatcactttcttagaggtttgcactgcaaagtcatttcctttacaagtttacattttccgcagtcatcagtttgccttgttcactaagctcatcgaatgatctctgattcaaataggctaaagatatatctgatttgggatcattgaaggcagctgcaagactttttgttccaggttcgctaaatcatatacatattagaaaattgcttagaatcttgtctttgatattctttatgcatgagcaggtgcggcaacaatttactctgctcgtacaatcaaggtaaaggaagaagaaggtttaaggcaagtagcttcaaactatactcccatcggttcgggaatcaatgttcttgataggagaatttccaaaggactcatctgtttgaaattcttgttatttatatctgcagaaattactacttctacgagtttggtagagatgaagaacgcatagctctagtagcctctgtgaacagagggaaggtctctgctgcaaaacacacatttgattactcctcgacattcatatttcgagattcattactcactctgcgtctctttcttaatcttgaaaaggtttatatcgctggagcagctgcaccggaatccaaatggaaagacgatgagttgaagctccgatctgctgccatttctttcactattctatagtcaaaaggcagcttcttctaacagaaaactcgaaaatcgctctctagtcgactcgaaaatgtgggactaagaacaaactggccaaatgcgataaccagatattgttttgagacacatttgtcattccattttcgtttatctgtttatttttggttgatgtaatatgttcattgatgttctgtataatgagataacaaatcaagattctttgtaccgcgaaagtcctagaacgtgtttttactgattatgcgttttgggctcaaaatctgtgattttctgcggttgtgttgttgaaagttgaaaccttgctcatgttttagcccaattgtgaaaaaaacctgcgtttgcgtttccgaaacgtgtgtccacgttttcagtctagaagagaaggcacacggagatacagtgctccgcgatgtagccaatctcttccgccttaaacccttccgattgaacagtcgaatcagcacagacaaaaatccttcgatggaatttgagatcaatgaaagttagggtttttctttgagatttcttcacccagataaaaaatg

SEQ ID NO: 34400 - DNA, 3003 bp, Unknown
  misc_feature (1)..( 3003): 2750-1469P.txt file - cDNA_ID_3077782; gDNA_ID_1620804; Annot_ID_168757
tccgaatcgaactcatcaagcctcttccggaatcgaactctctccaatgtaaatctcgatcttgttcgatctctatttttggtggaattgagattgttaattaggtcaaaaattcgtgattgtattaggatgaagcaatgggactggtgttgagtgcagcttcggttaaaggatggacaaccggttccggtatggaaggaccgtctctaccggctaaaaccgatacagacacggtttccacatttccatggtcattattcactaaatcgcctcgtaggcgaatgcgtgttgctttcacttgtaacgtatgtgggcaaagaactacaagagctattaatcctcatgcttacactgatggcactgtcttcgtgcagtgttgtggatgtaatgtgtttcataagctggtcgataatctcaacttgtttcatgaggttaagtattatgtgagcagctcgagcttcgattacaccgatgctaagtgggatgttagcggcttgaatcttttcgatgatgaggatgatgataatgctggtgatagcaatgatgtctttcctttgtaaagaacctttctacaatatctttgttatatatctgtatatagctaccttgtcatatcatcttggtgtgaataacatttggaagtaataaattggtcatatagctcatgttctgaatttcttggggaaggtagatttggttctgagatagctctttttagtgtattatataaatgcttcttcatatgctggatttacagaaaatagatgagagcatgtatttctagatatcagaaggatcgatagaatcttcgatgatttggatacaagatccgacagattctcctttggacatagcctgcgcgagcttcgatcgagctatctcatggcgacgtagtagcagtatggtgttaaggactgaccacctcacctgcgagtccgctttcttctgtgtgaaccccaaactcttcaccaaaccatctaactgttccatcaacaccacaaaaccataaagcatatttacataatcagaagagtttttaaggggtaaaagaaaagagaccttgctgatatcgtcaaggcctccttcagcataaccatacaggagatattctgttgctacaccagccagagcaatgcatgagaatctgttcagcatctggttttggaatagcaaacacagtttcttgttaggctgaagattttaaaaaggtttagaacttttttatgggaagtataagaaaacataccgtagcggagacttttccagaattaacctgcattgtcaagttgggaaaaaagtgttagaagcttggatttgaatgagtttctgcttcttcagaggatgtgaaagaagaaagagaggttatgtacttcttcaaggaattcatagtctacaaaagctgagccagcttgaatgttgagagatccttctttctgtaaagcttcaaggctagagagcgtgtatccgcgtggtagaatcccgactaagtaggccaccaagaaatgacccgcttcgtgctgagatctcagttcacagtaagtccaatgaaaaatgatatagtgtttctaaattttttcataaagagtgatatattgaagcagagtgaagttgcaggttttacctgaacaactctgttatggtatcgttggctaaacgtatgaccagttgtatcaagaaccaaactcccaattccgccattaaaagagacctacaacattaaggacatatgaagagactatttatgtgtgtgtttcatcttaagtcagagctttgagttaccaaatccaaagtccacaggaacataaacccaagagtaagaaagaaaagctgttgagaactcaagtcaaaggctttccaagcaactattccccctgagacagctgcgatctgaaggtttctttcgatggagccaagcgttgtatctgttggcgagagaagtgaagctgcgttaataccattcagtttcagttcctccaacgtgtagagtctctgaggcacctataacaaaacacagccaaagaaggaggataaagacaagaaatgagaccactgattacaaattacagttttagtaacctaaatgctacatttcaaggacaccaagatctaaactaaacctatcatagtatcaaatcatgatgatcacgacacaaaggccaaaacatgcattagatcaatcaagtccatcaaagaaccagagaaggagattcacattgacattatgatacattagaaaggaccaagatctaagctaaacttatcaaagcataaaactgtgatcattaagacacaaaagcttagagatagatcaatcagttccaacaaagatacagagaaaggagtatcacattgacattacgagattcaattcacaattgtaacaactaataatgatataaacaacagaagacagacctgccttgcagcgccaaaacatcgaaggccatcaggttttccttggagatctttgacaagagacaatgcagctctttcgtctccactagacaacttagaatcaacttgctccaaagcttgtcttcttatggacaaacctgtttcagatgaacaaactatgcatctgtaacggtaataactatggaagagaaaagacttttgttggtttgaacatggaattagtcccacactatgtaacaacataaccattcagcaataaaggattttgtgaaactaaatctgacccagtaatggatttgcaatagtaatactgacttagattaagaattcagcaaatgggaacaaaaattggagattttagcattagggaatatcaaccacttgttctggataagaatatatttaaatttgaaatcagagtactttacctgagtttgttaaacgttaatgattttagccattgctttggaaagattccactgtgaatctaggttaaaaaaaaggacgaagatgaagaaaggtaagggttcttctcccacaaagaaatgcagatagttttagttgaaataggtgactcattgtaaaatg

SEQ ID NO: 34401 - DNA, 3003 bp, Unknown
  misc_feature (1)..( 3003): 2750-1469P.txt file - cDNA_ID_3077832; gDNA_ID_1620805; Annot_ID_168801
gctgttaagacaagtatattgtctaaacgatggaggagtgtggaagtcccttagtccaatggttaaccaagggttcattaatacttctacactatgtctagggctcgagtttcagagaacacgatttcttgcagattaatggtacaaagcttatcggaggtccggaattccacatgcagagtcgttcgtagtggtctaaagtgcggggagagcatgttcatcacaaggatgtcgtacatctagaaccgaattatgaattagaggaagccaagtgtttaaaaaaggttttaaaatatttacaagggattttaaaagagttttaaaacatttacaaggtattttaaaagggttttaaaatatttacaagggattttcaagggctttaaaatatttacaaaggttttttatagatttttatagggtttaaaagtattttgaaaaatttacaagagattttaaaagggttttaaaagatttataagagatttttaaagggtttaaaagggttctaaaagatgtacaagggtttttaaaagatttataatgaatttacaagaagatcttttaaaaactcttgtaaatctttttaaaaccttttaaaatcccttgtaaatcttttaaaacccttgtaaaatctcttgtaaatctatttcccgccaaaacaaatttacaaggatttttaaatgcattttttggctgagaaaaaatttgttaaggaaaaaattttggcgggaatttttttttcggctggaattttttttttgcgggaaaaaggtattgcggaatttgttttttgcggaaaaaataacttttttggtgtcaaaaatttagcggaaaaatttcagttttcaattacatgtttctattagatgaaggtaatttggtcattctgttcaaaggaagaggtatttttaaaaatggacaacataaaagggtattgcttcaaaagggtagtaaaaaaaagatagttttgcaaatcttccaaataaaactgtttatatgtcatattaaacaaatttactgtttatattaaataattatctttcaagagtcaagacatatttgttatatcataaaattgtaaaggtgtttatgtttctactatagttaattgtctactgcaacatgagatcataaagttttgttagaaatgatgataaaagggaagatagtgatatgatataaaaagatgatttgtgaatatgtatatataaatatatcaaactacttcgttataaacataatggctaattcttctaatacaatttaataatactttcaattaatattttcaaatttgtgagatatgttacaaaccaaatttcaattgaagaaaaataaagtaatttgcattcaagataaaattaaataggaaatttgtgatatgttaaaaaacaattgtgttatggtatcattaaaatacaatgacatttattttttgctttcaattttttggtttacctttaggcccgagcataatagccgaatccgaagaaccgacccgaccccgacccaaaaaaccttatccgaacccataattttcaaaatacccgaacgggtctatacttcaaaactcgaaaaaactgaacccaaactcgaatatgtacccaaacatatctcaaatataagtatataccatgtcaagtattcagtagttgaatcaacattgttgacaaaacaaatcctcgtggaagaggtggaggagagaccatcacaatgttcttttgaaaatctcttagttgtaggtgaacttttatttttctacgtgtgtgttcaaaacttagttattaaaaaccttagagagctttgggattattactttaaccgagggaagagagactcttttttttttcttttttgtcaagcaacttgatttcaatcattcaacggaaacaagtttactgataagtgtgtattttgcatgtttttagcatccatttgtcatcattttagtatcatatcatcactgttttataccatttcacatcatttgtcatcactttgcatgtttaggatagttttacatgcatgttgcatgtttgcgttgatttcaggtgatttggagctgttgacgagctatctggaagaagcggaccagatcacgacaaaccactcgaccaagaggtcgagtaggagcttcaagatctcaagagactattcgacccccaggtcgagcagaggacatcaccacttcacttcaccactcgaccacgtggtcgagtgccctcatcaccaccactcgacctcttcactcaacctggaagtcgagtatcttctgacaccactcgatcacatcactcgacccccaggtcgagtgccttcaccttcactgccagaccactactcgacctcatcactctacctagaggtcgagtatcgccatcacaccactcgactacatacttgatgacaagctttagagccttcttcattccgccctcaaccagacactcgagcaccaggaagaaaagaagactccagctattcactcgacctctcactcgaccacctaggtcgagtatagttcttaacccgtccaaatacttcgtcgttttgagtattagggtttcgggatatttggctataagtagcatgtacttctcattttcgcagacaataagtgtttttacctagttttatttccgcagaccttgtgttctagactttttgtaatccggatttctctttatctattcagtattcagtattcagtttctgtacttgatttcgtttactattgttcattctgttatcatcctgctgttacattgttgttatcatgttttcaatttgttcaacgtttatgctttctgttatgatgtctgagtagtgaataggtttctgaggatgggttagtgtagtgtaaaattctcagtatgctaggtgattgagtattgattgatagatcccttctggattagttgttcttaatgcctattgatttctgatcaactggaatttgaacccagacatttccgcgcccaaaaggtgttcgatgaaatg

SEQ ID NO: 34402 - DNA, 3000 bp, Unknown; identical to SEQ ID NO: 5622
  misc_feature (1)..( 3000): 2750-1469P.txt file - cDNA_ID_3077870; gDNA_ID_1620806; Annot_ID_168867

SEQ ID NO: 34403 - DNA, 3000 bp, Unknown; identical to SEQ ID NO: 5622
  misc_feature (1)..( 3000): 2750-1469P.txt file - cDNA_ID_3077870; gDNA_ID_2926172; Annot_ID_199579

SEQ ID NO: 34404 - DNA, 3000 bp, Unknown; identical to SEQ ID NO: 5612
  misc_feature (1)..( 3000): 2750-1469P.txt file - cDNA_ID_3077884; gDNA_ID_1620806; Annot_ID_168858

SEQ ID NO: 34405 - DNA, 3000 bp, Unknown; identical to SEQ ID NO: 5612
  misc_feature (1)..( 3000): 2750-1469P.txt file - cDNA_ID_3077884; gDNA_ID_2926172; Annot_ID_199573

SEQ ID NO: 34406 - DNA, 3003 bp, Unknown
  misc_feature (1)..( 3003): 2750-1469P.txt file - cDNA_ID_3077892; gDNA_ID_1620806; Annot_ID_168856
aatgatttcaagtaaccaaaagtgcctagtactactagtgttgtttgttagtagttctttgtctgctcctctagcaacatcatttctcatttttcttctctcttttgacaaggccaaatgtctcataactcaagagcctctggaaacacttgtaaattgaagaaacttcttaaagtctataagaatgttactgaaaccaatatttgaaaagacaacaaccgttttccagtgtaaaggagaattgcttctaatggaagcacaatataacctaatctatctagatttatatgcatatatctagatttaatgaagacgcttttggtcataagatctaaatgtaaaagcagacaagactgatagtattgtgttcttcatttttaatgtgagattttgtagaaacgaaaggcataacacgtttgaaatagctggatcatatcaaattaaaattgcaagattcttatataaataatacatcaacgaaatcaacttataatggaaatgaacttgtagaagaaatggtacaagatatctaaaagaaacccccactccctagacattttgggctttaagggtataccttcaccccactcgcttgacatctatccaaaggcgcattcaatagagcaaaagtacttatctgaggttccaactatcttcaagatgataggaaaaatgcaatgcatcttacacccgctgcaaaatggacgcgatatactattattgagtaccaccttagataattcgctaagatctatcgtgcttcctggcatgagccatgaaaagtctccgagcacacactttatatgcaaactagcccggtaatctttacatgtgtagaaccatgtctctggattggtttctttttcacaaatgtcacaccagtatttaccactagcctctttgtcaaagcatagtgagagaggatgatcgtcaactctatgctttaccacttgtggaaaagtggcgcatttgaagcatatggcaaatctgcaatcgtcttcaatgcaccttagcacagaataagaactcttattgcagccattgcaactactcttagtctcttcatctagtaaagtgtaatataagggatgatcgggatgacttggatggacaaacggctcagagattgaaccgcacccaacatcgaatgtaatgcccgaatactggtaactgaaaccattggaaaatctattacaagcttgacactgaaagaaatcatactcgtatgaaactagagtaagacgttcattgtgtagcacatgccatctctttctaggaaatccagcgcagttttggtggagaatgaagtcacaatccatacagccgtagaaagattggagacatatgggatgagtgcatgctctgcaccgcttcttgtcgtcacaaagaacaccattaacgtggagtcttaggtaatgttttttgtggctgaaatgttgtattgtgttgttgtctattaccacaaatggtttgatatcttctgtttcttcaggtactccttcgagttctttcccgttccacacatctttgttggtagcacattttgaatgaacgacgtagccggagcacctctgacaagaaaaacctccacaagtccaatccaccttccggtgacaaacttcacacacagaattcacaacaccaagaacagaagttcgcgaaacacggtgatcatgccgattaatgtttatgaggcgtggaagggaaagacagtcttgatggatcatgaaaccacattgaaaacacacgtaagggcttcgatctcccttcagcccgcaagcattacatgtaaaagaatcaagtcttgggagaagggtgagttggtgatcatgagctttcaaattcagaagagattgttgtggtggatgtagaacacaacgcatatccaaggtgaagttgcaagaagaacaatgataaaaatatctatcatcaatctttcttgcgcaaagacgacatgctccatcagaatagtccggtcgttgacctgtgtggagcttaagagggtgcgaggggtggtaagagtggtttacctctaaagggtgatatacctctgacggatgccatacgcaatccacatggaaggttaaatcacactcttgacatttgtaagcaaattcattaccactaatctttccacatttagcatcacaatcgaacgccgcgatccgctccttgagaagggtgagcttgtggtgatgcctctcggaattttcaataaactctggcggtgggtacatggcacagtgtagatccacgataaagccacagatctcacaataataggataggtaattggtgcgccttccacataaatcacagtgaaaacgtaagttactacaaagctcaagagtgtgattggggtgagatggatgctcgatatattcggagacaccgtcaccacatgtcttgtggacgaaaaaatcacatcttttgcaatagtagccatcgctgatagcttcaaagtgaccacaacaatcacctttcctcaggtcattccaaggcatcatttgatggttatggatcaacggtagtgacaccactcccttagaatccatggtcgtatactacgagatttggaagaataagaggttggatctgaaatcgcaaagctatgctcctttcacgtttctttctctctcaaaactcaaaagtcttctctcgataatctcaacgatgctcttgtaatattaatcattatattaaacttttgaattgtttggtctttcattaacaatgaatatagttttatgatagtgacaatataactaatcatcattaaccacttgtaataaatagtcaatttttaattctttagatgtataccaatcggcatgatccatttatgagcttcatctcccccattattttttcaacttcacttttgatgtacgttaaattttggaattaatattgatagaaaatctcaataagaaaactcccactcgttttcttataccaaggcattcatgtaccttctgagatatcggtttagttttggttatg

SEQ ID NO: 34407 - DNA, 3000 bp, Unknown; identical to SEQ ID NO: 5606
  misc_feature (1)..( 3000): 2750-1469P.txt file - cDNA_ID_3077905; gDNA_ID_1620806; Annot_ID_168839

SEQ ID NO: 34408 - DNA, 3000 bp, Unknown; identical to SEQ ID NO: 5606
  misc_feature (1)..( 3000): 2750-1469P.txt file - cDNA_ID_3077905; gDNA_ID_2926172; Annot_ID_199558

SEQ ID NO: 34409 - DNA, 3000 bp, Unknown; identical to SEQ ID NO: 5605
  misc_feature (1)..( 3000): 2750-1469P.txt file - cDNA_ID_3077909; gDNA_ID_1620806; Annot_ID_168838

SEQ ID NO: 34410 - DNA, 3003 bp, Unknown; identical to SEQ ID NO: 20792
  misc_feature (1)..( 3003): 2750-1469P.txt file - cDNA_ID_3077933; gDNA_ID_1620807; Annot_ID_168915

SEQ ID NO: 34411 - DNA, 3003 bp, Unknown; identical to SEQ ID NO: 27794
  misc_feature (1)..( 3003): 2750-1469P.txt file - cDNA_ID_3077941; gDNA_ID_1620807; Annot_ID_168913

SEQ ID NO: 34412 - DNA, 3003 bp, Unknown
  misc_feature (1)..( 3003): 2750-1469P.txt file - cDNA_ID_3077952; gDNA_ID_1620807; Annot_ID_168904
atgttttcactcattcgtatgttattcaactttatacttccctagactcgaaaagtgtcatatgcaataaaagaacgttgattgattgattagtaccttagtatcgcgaccagcattaagaacgacgagcgataaagttcccttggtgttcataagggctcctatagcgaatgcgtcacgcataggtatatgcataaataaagaggtgattacggtagtcacgatctttactaagaaggaagagcagatgactacaaccatcatgaacttgtcagtaaactggagcatgaaaccaatatctgctcgcaacccacaaatgatgtagaagagaggcataaggatcccggaaaggaagtcatggagcttctcctcgatcatgttacgtatgatgtggtcgtgcggaatggagagaccgaacaggaacgccccggttatggagtggaccccgcatgcgtccgtaatcaggccgcataggaccacacctcctaaaatgaaccaaacgtgagtgtctccgacgtgacctgccttcacggtcttcgcgaagatccatgcaattcccggacggatcacaaagatgcagaggaggacgaagattgcggtggtgattatcacgaacggcatcattttgttccatgtccctttttaaccaccaacaaaaaaaaagaacaacgaaaaaaatcatcagaattcttgaattaccatgcatatttttgctatatttctttttcgaggaaaaaataggattcattccattttcggccagtggatatttattttaacggttgtaggtttttgggtatgagtttgagttttggcatggggtcccaaaaagtttgaactaattgtaggaatctttacctgatttgctaaaagaagcaaacccaaaaacaaggaggacccatgtgcacaaatcagtgacaatggctgcacacatagccgtacgacccatatcggaccgcaacagcttaagatccgcaaggatccttgcaaggtcagggaagttggtacaggctagcgcgacagaccagaagacgcaaccagagatgatcttgtctggatggccatttcccgggagatagtaaagaaaggcaccaaccggtaaagcaacaagaagccctgtaaaagcaatgatgaccggtttgagctcggtgatccgcaccatcctcaggtccatccctagaccaaggaggaagatgttgtagacgagagctaagttagcgaatgtctcaagaaccattgtgaatctgtaggggaatacatgtgcgattatgaaacgtgtgttcccgagcacacttgggctaaataataatccacactgcaaaaatacaatcacaacaaatcaagacacatacggaactagagagctaaaaaattgatgtagcaaaaattgcatacgtacgaggatctgagctacgaaaggaggaagatacaagggtcgggttagatagtagaggacacgatagctaaggttcgcgacaaagagttgcgttatgaagaacggaagggaagaggctagcgtacttccgctctcccatcccttttgttctctcttctcaaagagaagactttggtcataacacacaatctttccaaaacgcgattcttcaatatcatagttaggatttgtcacattaaggggggctccggaagacatctcctcctacgatggctggtcggaatccccaaaaaaaatgacaatactatctgcctgaacccaacgttaggttcagacgaaacattgggttcatatagactgcaataacaactaatttgcaacctcttccaagttttagttcagacgagatggctaattatagatgatgtattagttgtcattggggaattcattaaccactcgttttaaaatgggcttatcagatttatgtttttgctgttaggtgcttttttaaacggctggttgaaaatgatcacttgtttcaacatatttttgtccgatttctaattgtacggttacaaaatctgcgaataaattattttcaatcaaacttatagatgttttttttcttaacaaattatacaagtttttttctttctttttttttgtttggcagttcttaacaataataagatagtttagtctattattaatttattattaacataagacaataagattcctttttaataataattaaaatagacaagtagtagaatacaataaatatgcaacgagaatttttttattactataatgcaaaagtatcaaatcaatccagaatccagatcttctggaagcaaagtagttcacaagactttgtagagtaaagacagataagttttgaacagactgaagcaatttttagattcctcaagtcaatttctctccccaaacagcttccgtgaatgacaaattgctaaatctaagggtaatactctgttacagtttctctcttcgctttcagtttttcgtttttctgcaattccaattacttctaagctctctctgtccttccttactatggagatttgataaacaaccaatcagatttgctgacgaaccccatttatcatctagggtttgcttcagaatgcttttgaaacattaaagttcaacacttcagcacttgggatcttaatgctgtttcttgtttactctgatctaggagtgtagcttttaccatttacttgtgtctgtttttggtgctgttgtttgatctgtaatgcatacttcaattttcttttcttgtagattgatttcaagaacaagtcatgctaactctttccaagtttcatgtgatactaatcccaatactcttcttcattacgcttctttcgccattgttctccattgctctacctatcaacatttggccaaagccgagatttctctcatggcctcaacataaagccattgcactctctccaaatttcactatccttgcccctgaacaccaatacctttcggcctctgtaacacggtatcacaacctgatccgttctgagaattactcgcctctcattagctatcctgtcaaacttatg

SEQ ID NO: 34413 - DNA, 3000 bp, Unknown; identical to SEQ ID NO: 5624
  misc_feature (1)..( 3000): 2750-1469P.txt file - cDNA_ID_3077956; gDNA_ID_1620807; Annot_ID_168900

SEQ ID NO: 34414 - DNA, 3000 bp, Unknown
  misc_feature (1)..( 3000): 2750-1469P.txt file - cDNA_ID_3077960; gDNA_ID_1620807; Annot_ID_168898
taacgattgggcaaagagtgctagctagtcccttgaagtaagtttcttccctgttctgaaatcttgtcagggtattgtagttgtcaaaattgatgtgctctttctgttgctgctccagagtacgattccattacggacatccagatatttttgatcgtctgtttcaccttaccagaggtggtatctgcaaagcttctaaagtcatcaatcttagtgaagacatatttgcaggcactagcttgatctcatattctttggtggtacacatatgatctacttcattttttacattttttctcatacctttttactggtttcaggttttaattctactctgcgtgaaggaaatgtgactcatcatgaatatatacaagttggtaaagggagagatgtgggcctcaaccagatctcaatgtttgaggcaaaaatcgccaatggaaatggcgagcaaactttgagtcgcgacctttataggctaggacaccgatttgatttcttccggatgctgtcttgttatttcaccacaattgggttctacttcagtaccatggtaggttgagattctccctttttatctctcaatcactagatatatacatggcaggtttgtttttctttctcaagactgaagccattatctgtgtgttttgacagttaaccgtgcttacggtgtatgtgtttctttatggacggttatatctagtacttagtgggcttgaagaaggattgagtagccaacgagctttccgtaacaataagcctcttgaggcagctcttgcttctcaatcatttgtgcagattggttttttaatggctttgcctatgatgatggagattggacttgagagggggttccacaatgcattgattgagtttgtgctgatgcagttacaacttgcttccgtctttttcacgtttcagctcgggacaaaaacacattactacggaaggacattgtttcatggaggcgcagagtatagaggaactggtcgagggtttgtggtcttccacgcgaaatttgctgagaactataggttctattcccgtagtcactttgtgaagggcattgaacttatgattcttctactggtatatcagatctttggtcaatcatataggggtgtggttacttatattctgatcactgtttcgatatggttcatggtggtgacatggctctttgctcctttccttttcaatccgtctggttttgagtggcaaaagattgttgatgactggacagactggaacaaatggatttataaccgaggaggaattggtgtccctcctgagaagagttgggaatcttggtgggagaaagagttagaacatcttagacattcaggggttcgtggtatcacccttgagatctttttggccttgcgcttcttcatctttcaatatggacttgtgtatcatctcagtaccttcaaaggaaaaaatcagagcttttgggtaagctaaccttataactacttccctgtgaatggtgaaactcttgattattgaacgataatgactctgttttcaggtttatggagcgtcatggtttgtgatcttattcattctactgattgtgaaggtatgaatctttaagcacattcacatttcaatttcttgccaaatcttaacattgtgttgctttcttctatgtaacgatcattgcagggtttgggcgttggaaggcgaagattcagcacgaatttccagcttctattcagaatcataaagggtcttgtgttcctcacatttgtggcaattctcataactttcctcgcacttcctctgataacaatcaaagacttattcatctgcatgcttgccttcatgccaactggatggggaatgcttctcgtaagtctttctcctccatcaaactcctctatttgtatctaagataccagttttgtctggtttttgtgacagttgctttgttttgtcctccacgtcagattgcacaagcgtgtaagcctctgatccaacagctagggatatggtcatcagttaggacgctagctcgaggctacgagatcgtgatgggcttgcttctgttcacaccagttgcgtttttggcctggtttccttttgtgtctgagttccagacaagaatgctctttaaccaagcctttagtagaggtctacaaatctctcgtattcttggtggtcaaagaaaagaccggtcttcaaaaaacaaggagtgacatgtacacatgtaaatggcgtatgtgtagatttaatggttatctgttattgtttccttcccaagtaatctatagttagaaagttcctgtaactttcatagatatatgttaattattttccatttccataagttcgcgtccattataatagaaagtgcatgagacgtatctttttcatatggaagacgaaaacattggttctccattctaaaagtcaaaaagaaaatgtatatcacttgaacttttccacataggtcatgataaagacaggactaatcaatcattcattgttgataatggtctcaattacctgttgctagttatttctacatttgtatagtgcaatactgtttttttttcctcttccaaataaaaactacagtactaaaagaaagttggtaatcataaaagttataaaactcaaataaaagcaattactctgtttctttttcactcttattttatatgactgaaatgaaattgtctatatgttgtttttgtttgtatgttcattgatatgtaaacatcaaatctgcaaaaaacaaccgcaagtttggatttatacgatgaagcgtttatctagtgagcgtcatcgcagacgtcacaagttatgtggtacaattttgcgtatgtttgatgaatacgcatgcatgtgcagacatcaaaatccaattcctcatctatatttatatatatgtatatatatacatatgaaagcacagatatatccacaaggagagacacagattcttgtattgatactcacttcagtggagctaagacaagtagaaaaaaaatg

SEQ ID NO: 34415 - DNA, 3000 bp, Unknown; identical to SEQ ID NO: 5639
  misc_feature (1)..( 3000): 2750-1469P.txt file - cDNA_ID_3077964; gDNA_ID_2684237; Annot_ID_192468

SEQ ID NO: 34416 - DNA, 3000 bp, Unknown; identical to SEQ ID NO: 5639
  misc_feature (1)..( 3000): 2750-1469P.txt file - cDNA_ID_3077964; gDNA_ID_1620807; Annot_ID_168897

SEQ ID NO: 34417 - DNA, 3000 bp, Unknown; identical to SEQ ID NO: 5655
  misc_feature (1)..( 3000): 2750-1469P.txt file - cDNA_ID_3077974; gDNA_ID_1620808; Annot_ID_168932

SEQ ID NO: 34418 - DNA, 3000 bp, Unknown; identical to SEQ ID NO: 5661
  misc_feature (1)..( 3000): 2750-1469P.txt file - cDNA_ID_3077987; gDNA_ID_1620808; Annot_ID_168943

SEQ ID NO: 34419 - DNA, 3003 bp, Unknown
  misc_feature (1)..( 3003): 2750-1469P.txt file - cDNA_ID_3078018; gDNA_ID_1620810; Annot_ID_169019
gataaagtcgtttcattgtttgtagagttccgttgacgcaaaacgtgacgagaaaccgacaaaatgagacacctacataaccacgtggaatgatatatgccggaactataatgtaaagttcgaaatggagaacactaaaaagacaaaagataagctataaacctctaattaggtataagttaacacagtgcaacaacgtgaacatccatttggccaatcgacatattatgctctaaatttactaaaagagtgaattactcggtaactatacttattatgagaaattgattagttggttagtaaaaattaatatgaacatttacattacataacttttatatagattgagtgttttttttatcattatataatattttttatgtgaacatttcatttatcaaataaatgtgtataaaaccataaatctgatattctaaaaaaaaattttcttagtaaattagatatcaacataaaatataacatgttacagtaaaaaaaaaaaaagctattttgtgaaccctacaaaatcaaatatcactatccatagattttcattgcctttgggtcatttccctatctgttgtttacctttttgacgggtttctttttgcggagaagcataaaaggatttgatcgcatattcgcattaaaggctcaattggtagaaattgaagactaattttaaattgcaaacaaagagacccatgccacttgtgacttgccccacgtaggtccactatgttgtctcttttcatcacacaacactataagacaaattctcttataagacaacttgatccctaccatcacctaatgaatgatatatttttcaatattatgaagaaaaagaattatagagtattcataatcaattgggaatgattgaagtagattatgattcttatatatttcgggtgatttttcttacaaaaatacaattttcaacatgccatgcaaaacaattttttttttgctttttttttttttctcaaatcagattttattttataattgacattgcaaaaaagtccgaccaatttctaccaagaatttagttcgaaattggttagaccatttttgatcgaatcatgaattgctatgtttaataaattaactacccaagaaatgatatctaaatgactgattgatcgataatgggtagtaatttcatcttagacaaaataagcatagtatactatttcccccaatattatagttacctaattaatctcttaaacaactgattaatcgatttaagcgatcgacaaaatataacataaaattatgtttaatagattacaaatcctatatatacatcaagttaacgcctaatggttgttgtaaaacctttaactgtgttttttttttaattggtcagatttgttttagcatatttctttaaatcgcatttgagtggcggccaaagtttaacagattaaggaccctaattaagacctgacaacttcattctttgaaaacaacaaacccgtggtattacttaatcgctgtcaccgagtgcattacgaaccccatatgtccacatgcttctttcaaactaatacaaaactgaatacgatttccttcatcaataattgagtataataagatcttaaatactctaactacaattattaaaagaaaaggttaagtttttgccaatagcttccacgcaagtggttgaccaattcaacttaactttctcaaaacaatgagattccacctaaactatataaatgacgtaggaattatatgtattacactaatataacaactcttatatattagttcatctctcttattctcgcaaagttttatttatttatatttaatatttaataataaattaagttttgaatgctatttgtgaatttttttaaatgaggagctatttttggaagatttttttttttggagctatttatgtcaatctcccaaaattaaaatttacagattttatgcttattgtttttgatgttaatttggtataatatattttccttaaaatagaccattacctcaacaaatatttattgtaactaatcctatatatatatatgcaatataatataatatcatattatttaatgtttatatataataaattaaaattccattgattttatgtttacatatttttataaaatttaatatagttaaacttaaattagtttatctatattcgtaactaataaaccaatgtcaatttttatatcagcaatgaagaattaatttatgatttatttttttaaccaaaaaaaaaaaacaataaataaggatcatgacctatcaagatctggaaaatctttcaactgttacatatatgaatatatgatagacaaaccataaacatatcaacatcaaataattaacgtcattagctgtttactatattaatcacacaattataaataaaggtaactaactaaagtatctaaaatggaaagaacattttgttgaccacataataaaaacaaaacaaaaaaatagagacaaaggggttttacgtcatttcaattcctgacgaaaaaaatctttaacacagaggggtaaaactgtcatttggatatcggctcccactataaaaagcctatttgcttcgtgttttttggtcaccaaacccttcatcttcttcgtttcagcttttttttctctcatgtttctcgtcttcttctaaacttttgtgaccacccaaaaaaaaaaacgtaacggaacaaaaaaaaaaatgctccgatcacggaattgtaagatctccgccgcgaacgaagccgttatttctaatcgtctttcaatttctaatctcaaagttttattcgtttttgaatcctcgccattgaataatttgattaatcgtttttccgataagcttcgtcgttgaacttatctccgatctctgcaaattttctctcaaatctctccgatcttcctaattgattagaaacttctccatcgtttgctcaattatttcggatttttctctgtttctttccaacaaaatcttcaatg

SEQ ID NO: 34420 - DNA, 3003 bp, Unknown
  misc_feature (1)..( 3003): 2750-1469P.txt file - cDNA_ID_3078022; gDNA_ID_1620810; Annot_ID_169016
taatcaagctaagtcctaaagtattaattgtagaattacgaactaagcatgaacaccataatcgatattaatgcagtattgcagtttgttaaccttgttctcttcttcctacatcgtatcacacaaaacagtgtttagtgtctctggtaaaataattgcaagaaaccagaacatcccaattgtgattccgaacagaccaaattgccataatccattattctgagtttctgaccaacaaccaccatgatagcactaagaattcaccaccaaaaccaatgtttgtctcaccataatcgctaaatttctaaagcatgttggaaatagctcaattgtatatatcatctccatgttaaaagaagagcagtcactaaaatattgccacaagcccattattaactttatcatcatgttactttatcataaataaaaactcgattattgatttggaaaattttgcaaatcaataaagcatacgatatggaattttttttcattctaaaatatgacaagaaaaatgcaaaacataagcaatacataagcaacacacaagcaaacaaaattataagctcaaattttaagactttaaaacattgctagttatcaactacacaaaaatgtgtaataatataagagaccgaaaatatgtgttttaagactgtagatagttgtcattaattttgttttaactaaaaaatatttataaaactattctatataacacttctttttctatgtgttattcgcaatacatcatacaagattttggaactgtcggaggaggcgcagcgggcattacttcatttaccatcgcagagctcatctcgatcgtgtcgtcggtagcggccacgccttggggaaaggattcatccgctattcttgttaaccttttttaattgagtcttcgaattgtgaacaaaagccttttgtgttgtacttggttcgaattgtgaacaaaactcaatggttcaatctttataaggaatccttatcatttttaataaatgttttttgataattatgaagtttagagtttttgtagagtctctatattttttattatctaatagtggagtctttaagtaagtttttaaaaacaaaagtattttttaaataatttatttgataaaacttaaaacttattagaaatattaaaattgtaaatatatatcataacttaaaagcacaaaaaaaactaaaaaaaaacaaaataaaaggcttacaagaagaaactaaaatccaagattccctatctcggtgaagactttcgttgaacatgttgtgtgtactaaataaacgagtggagaatgcagcgacaaaacaatagattcgaaaattgggtttgaacttttccagagatggaggtctccttgttatcattgtgaatcacatttgattttcacgatttgatgatcaagagattgttcaatcgccatcggagttaacaagagaaaagagaaagaaacgacatagaaaaatgaaaataatacgttggcaaaggaaaacaaatgtttcgtccaaaaacgttaccaattgagaagttgacacgtatgcgcaccttaacattattaaaaatccaagcttaggaatgcacctaagtttatataacattttttatttaatttttgcccattttaccgaaggattcatacattagaaactcttaaggatcactaatgaaggtggtcttagatcggttcaccagtgggcaaatataaaacatctatcgtatattttcttctagttaccaaatttaggattgcatttttgtttaattattttgttattctatgactccaaatggatatgtccggtttaacggctgatcaaatgcggttcggttctaataatgactaatatatatatatatatatatatgaagaaaattttgttactacagtagaaactctataaattaataatattgggaccatgaaattttattaatttatagtgatattaatttataaaataataaatattaatttatagaaatatttacgtgaaatacaatactaaattcttcttaaaatgttttttaatttagtttttcttatgttttgttgtttgtatattcagttatgttaaaaaaaagttatttttctcttgacttttataaaacatgaggcttaatccaatttatctttgtacaaatcttagcaatgattaaaaaatgttacaaaaccaaatatgacggataaatacgcaaagagttatgtgagtataaaagagataataccaactgtactctaaaaagagttataattatggtttgaataaaagtttcatataaaattagtgttagaatatatgcttaagatttatgattattaatttatgatattattgagaccatatttttacatagggatttcaaaaaaattattatcttattatcttatcgattttggttaatttttacattggtccgacttggaaccggtaaagtttattaatttatcgtgtttattaatttatcgaatattaatttatagagtttctactgtatatgacttatcaccatgagattgtaataactcttatctaataatactcactcaagtaaaagatccaataatcttcaaacgaaagtagtaccaggtatgaaactccagcgttgatgatgtgagcttctcaatatctactagtcaaagacgcatcggatcgatcatcggagttgcatcggaatttatcgggaaagaatggattgggcccaatgtggaaatgataagtcgtatgggcctaaatcatttagtcgtaggcccaatatgagtttaagctctttgatatttcagagaatgttattcaatttattagtaattttcaaatgatataaattcaatttattaatcacttggttaaaacttatacacgtgaaaaaatgagaaatcattttagtacattgttgaccatctttttcgtatagactactatctctgatctcttgcgagttaagtcagtaactaggaaaattcagaagcgctctcaatctcaaaaatatccatg

SEQ ID NO: 34421 - DNA, 3000 bp, Unknown
  misc_feature (1)..( 3000): 2750-1469P.txt file - cDNA_ID_3078040; gDNA_ID_1620810; Annot_ID_169000
ttcggataaaataactaaaccggataaaatgttcggttcggtttgagtatttcttttaacatttcgtagttaaaagcaacatccaaaagcaaaaacacacgccggagagttttctaagaacaacagtgacgaaaaggtttttagggtttctttaccaatcagaatctccgccaagtaacgattttcagattccgaagcagcaaaggttagagcttttccctcatacgtttcttcttctgaattccttgaaaccctccggtgaaccagaacctgttttacattcgttttctattcggtggtttcttttaatttaggtcaaattacactggaattatcatttgtttctcgtaattctggatttatgttaagtttggtgaaatctctcgttgagatggatacgaaatctattaatttttcattgttatccgtaagcacaccaagtgttcgatgaaattcctagtctaatttttagtaacctttcagttcaaataatttccgaactgtaacatggcggcaactactggacttgagactctcgtcgatcgtaagttagtctttttttttgccattctcgattgatatgtgatgttctgtcacatgaattgtctaaagatcttatcttttgattggttgctgcagagattatttcggtgattacaaatgacggacgcaacattgtggtatgttatactctcttgtgtgatatctggtttagaactccttatgtcaatgcaagtatcttagtaaagagatcgatttttatattttttcagggagttcttaaaggttttgaccaggctacaaatataatccttgatgaatctcatgaacgtgtgttttccacaaaggttagcttctgattcctgttttaaagtattttcatctgaacttttcgatgttactaaattgaatgggtgcaaatacatttttctgcaagtaaattggccagtgtatgacctgcaaaaccttgttggtttgtatccatgagtggctatgatgtagcagagttctcgatgtctccatattttgtttgtagtgatcgcataaaactagaaaaatagaggtactataaggatgctagtttatcttttgttcattgtcactcaaagcatctttcgtcgtctggtattgatcttttaattggtactacgttcttgctaataatgtacattgcttgatttagttgcgtagtgtcatcttttcaacagaatattgaggaaacttactcagatatttaagataggccttgtcctacagttctttgtttggtaagagaatagtgaatcatgaactaactggcctctgaatggaagtatctaaatcagatagtgttggatacaccgaaacagatttagtgttagtattcttcgagtgttataactgattgaaaaaatcttgtgagttcatatgtcaaaagatttagctagtgataggtaagtcaaatacgtagatattggcagtgtgtaattaattatacatgatcacctcctttttttcgtaagagggttaaaggtttgattcatgtctgttttcttgtttacactaagagtatgtcaggtcatgttgatacttcattagacaaatgttcttggatatttttggtgtgaaggcagagttctgttaaaatgatggatattggaattaggattgagacctcttactatgtcttcatctttgcaggaaggagtacaacaacatgtgttgggtttgtacatcatcagaggggacaacatgtaattcttatcatccatcatcatcagtgattttctaacattgcaattgtttttttgtttcaataaaaaaaatggtgtcatctttgatcagaggtgttatcggggagctggacgaggagcttgatgctagtctggatttttcgaagctgagagcccatccgttgaaacccgtagtgcattgattgaatatagttatggtgagaaaatctaattctctcattcaaagcctaaaaacaaagagaagatttgattgtaaacaatttggatagtttgttttgatgtctggagttgtcttatttgtgtatcctaaggacaaaagctatatgatattttatgtcttaaacgttttggtcggaaacttaaatcatacaatcttttggacggacctaggtttgctactagaccacaaattctttgattagaaaaaaaacttttattgttaaccaaaattttatagatattcaaattgcaaaagaaaaaaaaaagaggaattagtttctggtatcttacaaattataatgtcgttgcaatttcatctagaaggattatatacatcatcaaatctatcaacatcaacaaatggccgtatttaaaacttagaagcatcatacattttctataagacaacaatatagatattaacttaatatgtcattctcccatagtcgcatcatacaagtcgttggttttggtaataactcgccaaaaccaaacacttctgatttcatcggagtcttgggtcttcttttacgattccaatgtaatattcttcatattaagtgatttatttcttgaaatttttcatagtaagtgttatcagaagcttttgatttttggttattaatatgaagaacaaaagaattgcgttctaaaaatttttcgttgataacgattaatattaaacagaaacactacaaataaattaacatcgttggggcctagggatttcgaatggaattttatttgcaaaaaaaataataaaataaagcatgttaacaaaaaagtaaaagaaaaaaaattcatgacgaaatgcatgagaacactgctgcataagtcttaggggattaggtcaacaaaagtaaagtagatcttcatcaaatgtattttgactttataatgtacctattagtcaaactatatgcgatctaaatattaaaaacttgtattttctcaaagacaatgcgaggcgtaaatatatgaaattttattttgtagattaagtaccatttatatatgaaatataaataaatcaagaagagtaaacatg

SEQ ID NO: 34422 - DNA, 3000 bp, Unknown; identical to SEQ ID NO: 5703
  misc_feature (1)..( 3000): 2750-1469P.txt file - cDNA_ID_3078060; gDNA_ID_1621183; Annot_ID_57406

SEQ ID NO: 34423 - DNA, 3000 bp, Unknown; identical to SEQ ID NO: 5703
  misc_feature (1)..( 3000): 2750-1469P.txt file - cDNA_ID_3078060; gDNA_ID_1621183; Annot_ID_174324

SEQ ID NO: 34424 - DNA, 3000 bp, Unknown; identical to SEQ ID NO: 5703
  misc_feature (1)..( 3000): 2750-1469P.txt file - cDNA_ID_3078060; gDNA_ID_1620811; Annot_ID_169077

SEQ ID NO: 34425 - DNA, 3003 bp, Unknown; identical to SEQ ID NO: 20807
  misc_feature (1)..( 3003): 2750-1469P.txt file - cDNA_ID_3078071; gDNA_ID_1620811; Annot_ID_169064

SEQ ID NO: 34426 - DNA, 3003 bp, Unknown
  misc_feature (1)..( 3003): 2750-1469P.txt file - cDNA_ID_3078075; gDNA_ID_1620811; Annot_ID_169063
agtgttgtggtaggtacaatgagctttcagatttttcagttctgtcgacaggcgtttcgtttgtggtttccattttgtgttatgctgcgagagactagtaaatcagtggagattacgctgaaggatgtttctagaccacgtactcgtctctctagagattgcattccgttatgcgagctctccatgaacttctgcaatattaagtccaagaaaacattcaaaagtcagcacattacagtttgttggatgttttaaaagttaataaagataaatgagatcagaagaaaaggttacctgaaagagatctaacagactggactgctgtttttcgatctgtgtaatctggtgtcttatcagagacaactcttctgcattactctttgcctgagaagaactgctactaccactgtcagttttaggactctcctcatcactactctgaacaacttgtgacttgttcgacccattctctttgaccttatgcatctttgccgggaacagaacccgtttagctcccaatgtcgaacgattccgcttctctttcgacacaacagcttcctgctcaacatccttaggagtgtcaccacgatctaatggctcaacatcattcgactttgagcttaatggtgtgtttaaattcctatctttgcctttcaatgtgttgcttctctttcctgaagtcgcagacaaaccagaagaagctgatttggaggaggaagaagactctgagacctctgttgaatcaccttcaagttgcttccataaacccaatgtacgattcattgtctctctaacaagtttgacctgcacaagttatatatgaagttattaaccaagaacactaaagtcaaaagtgattgcacttcttataaatttttaccataaattgttttgaaattttaccttatcgaatcgtctgctctcaagaatacctagacatgtcttcttatacagtggagctaattcttcttctaccatagccactctagccattgcctccgcagcagctttcctcgcacgccaatcgtcgctgcttagaaactccgagacgtttggtaaaagccagtctagcaccgccttttcgctgtttcgaccgccaacagcgccgattacggttcctatggctccaagaagttccgctttcgccttgaaaccttccgatttaagcaacttcccaatcttcggcagggccttctgcagttgctcaacatccggctcatctgctgcgtctaccgccgcagcaaggcacatagcagcgctgatctgcgcattgggatcgcaatcgtggataaccgtttcgatcattggtccgaaaaggatggagaaaggctgtccggtgatgttggtagtcatatcaacggaagcggcaacacaagcggcacggacggaggaatcaggatcacggaggcggcggagaacggtggagaccatcttcgagaggtgaggagcgagagaatcgccatgagaacgagaaagaacagagagaagcgaaacgcaatgtttcctcaccggagattttgcggaagagtctgtactctgaagacagttaataaataaagagaaagtctccggtgagagattaagagcgattgaatcaagctctgcggcagcgagagcaagagtatcgcgatcagagagacgattgagacaagcgatgactcgttgcttgagatcagtaaccgtcatagccggctgtgaatgagacggagaagaacggatttgaacggaaggcattgtgaaaatgtccggagactttttcagagatccgccatggaaggagagaagaaaaagctttgtggagaaactaagatttggcggcagaaaaaaggctatgaagatgactctactacggttggtacttggcctttttaaacaagactcgtctttggcttgccttttaaacttgtcatatttcactacctgccacaaaatttacatttactattagtttatatccaaaatttctagttttcgtaagactatgtcctttttttgtttctaaacatcgaatatgtcaaatttagtattatcttacaatttttttttgttggtcaaaatattatcttacttgtttctcgttttatgaacgtctttgtacatcaaaacagattcaatataccaacaaggattctaacgtacgcaaggaatagttaagtaaatcctctatgtagtaatgggaaattgttaggactttgaagtaagtatcagagactcgtgtataataaggtattcaaagtcaggaagataataaaatatttgtgtaacttggtggccacttagaagaagaaccaagaatatacaagcaaaaaggaaaaaaaactagattccgtaagattttcttttatttcaatcctgattataattaaaagaaggaaactatatccacaaccacaatgttacacatgagctaatgagcaagtcaagcaaacacggtttcttaacgcgtaaccaaacgtgaaatgaactattctttctatttttctcaatattaggatgacatatatactgttatttaacatctatatatctaataacaaactaaatcttcgaatcatacttttctcaacaaaagattgcattgataagttcttaatttaaaatatttatgagtacatccaagacaaagaatagttctctattttcagagaggactgcatgtaatggtagtaatcatgttttctcttaggaaaaaacccgcacaacgtttatgggaaacatgtttgtgtttgaataacctttatggaaaaacaaaaatatttagcaactgattaaaactctttacacggctcatatttaaatattgggcctttagagcccattatggcccataaacacacaacttggaacgcttctagacttttctggatttgcctcatttctagaagctctggagatttcttcttcatcaataaatagaatcagcaaactcaccagctttcatcataaattcgaaattcaattcgtcggaaaattgttcagatttcgaaatcaaccgagaaaatg

SEQ ID NO: 34427 - DNA, 3003 bp, Unknown; identical to SEQ ID NO: 20808
  misc_feature (1)..( 3003): 2750-1469P.txt file - cDNA_ID_3078079; gDNA_ID_1620811; Annot_ID_169057

SEQ ID NO: 34428 - DNA, 3000 bp, Unknown
  misc_feature (1)..( 3000): 2750-1469P.txt file - cDNA_ID_3078090; gDNA_ID_1620811; Annot_ID_169050
ttttagctcttttctaaatctagtttctactttctacaaagcataagtttttgtaattcaatgcaaagaaagccatgtggggagctcaattggtatatttgtcaagatttgacggagattaaagaatcatataatctattaaaaaatatctttatggatcttacgattgaaaactatattttaatctaccctatggtttaaaaccaataaaaaagttgaagatcttttacatgtttttagaaaaaaagtgaagggtttttaatccatgtttttttctaaccaaaaaaattaagttatcaaatgattagaaaataaataaataaactgcttcggaaacttttctaaaaacaaaaaagctttcagaattcaaatgtgtagatttttttatagtatagaaaaaagaaacaaatcactttaatatttttttgtttgaaaagcctcgtttatgaggtttaaaaaaagaaaaaaaaaaaaaagaaaaaaaaagtttttgagaaattagtaaaaaagcctaattggaaaaacaaaatgtgagaactttagactgcttttaaagtcttgaaagcatatagccaatcaccccctaacttctttaaaaacaaatgtgggacaacataatgctgtattattgttctacaaaaatgtgtaatgggtaaaatggatcaagtagttatattatttttcatatatactacttgacttgtatttgctagtattaaaattttaatacttggtagttggtatccactttgtttgttacggatacttattttcttcgtccgggtaaaagtcaagtaacgactatgaagcgagtgataactaatagtaatcgtgtccagccttttttgtttttattttttgtaatttgtcaagattaagatttaacggagattatggatcaaataattaaagaaacgttaaaagtaccggagtaaagatattggttttttatttattgaccccaagttttaacgtgcactgcacatgcacaacaaagtcttaactttttcccggtcttattttaatttaaatatcgtcaacttggctaccgatttcatacttactcccatatctaagaataagctgagacttcataactaaagaacaaagaacaatcatctttcttcttccaaaggacaacgagaaaaaagtggtttcgacaggtgagccagtttgtttgttattgatttttacttttctgtcaaagtttatttgttttctgattgcagaaggtcttttgctctgtccttgatttgtttccatcaattcgactctactcgttcaattagttttttttttctttcttaaacaatgcaaaatcttagatcatgtttgaagaaacttgaatcctcaaaagtttgttctgcttccttggccacctttgtttgttcacgtttttcctttttccgatttacttctataaaccctcgtgaaacctatatccctcaccggttttaaaaggcaaaacaatctcacggcagaggaagacggtggtggccggtgactactcttacgctcagctctctgcacgttctatttttgctgaaaccgttcccccactgcgatgcatctttaaaagttgaatattcttccatcacttagtttcctttctaaacttctggatctgctcaaatcccttcagaagaaatctcacactcgacttcgttgtggcaagagaagtctctcttggaccgtctatcttctgggtggtgattcattggctctccaatgggttttcattgacaaagctagtgagttctctcactcacaatcgcggaagctccaaacctgcaaaacctttggtccctaactattggtctcccacgacggcttgcatccccctccaagcagccctcaacttctggatctgctcaaatccctaattgctcagatggactctttctttgagatgggtttctcaattcttggcccactaagatatctttctcggcccatgtctgaaataatagggctaacccaattagcatcttggcccaggtctgttttttttataaatattttggcatttcctaatcctttgatgtctcttgacattgctgatattggtcaaggactccaatttcactttgtgcggacatcggtggttaggaaagctaataatttgttacgaaccttggaggaagacatccttagtgttgttaatcgttttatcttttctaagaactctatgttacaattatcctctttaatagaaagaaccttggtttggactctcacctccttttgaaggaaccgtttatgtactttacccagattcttagatgatgtggatattaagccggtgatattcaagttaaagaacctcttttcaacattattatgtctttattggaccgtaactaatcttcaatctccccaagtttttgtggaatgattttcgactcgccattctctcgcttgttgcaaactacgttcaagttcttgtctccgatgtttggatcttccgtcaaattatcgtatattctatctctaccattcacttgttagaatgctagtttgtgaattgtttggctaaaagtgatacttcattaacgtgaaaagatggctttaaatagccttacaaagactcaaaaggaacaacaaaacgactaaaaaataggaacagactccataactccactacacgaactgactcaattccacaactccactacttagactccataagactcggacgtaattgacttcgaaccatgtgttggatgtttgtttgaactttgtatttggtatgtggattaatggagtcaagtatgtttttgcccaaaaaaaaatttagctaagccaaacctattcttaaagaatcatgtgatagactgctaataatgaaaaatgcaagtatatattaaatcacttttatctttagcagtttgaacttatatataatatatgtgatgtaggttcttgctaattaatgtttcctcttcattataaaaaggtttcacctctactttcgtactattcatgcaggacttatatatg

SEQ ID NO: 34429 - DNA, 3003 bp, Unknown
  misc_feature (1)..( 3003): 2750-1469P.txt file - cDNA_ID_3078100; gDNA_ID_1620811; Annot_ID_50588
agccattattcgtcctcacattagccaaatctgatcaatccaaagaatctggaccgcttcgttgttttctactatctaagacaatgtttctctctcgcatttcttgctaaaaagctcattttctgatttgtgacaaaatgagattttttttaattaaaatattatgactaatctctttatttcttataaaatattatatcttaaacattacaatttttctaacctcttatatcacaatttatttaagcagttccgtaaatttttcagtcatcatttttcgtggatttgtttttttttttttacgttccaatcaccaaccactaccgtcaagcacccaagaaagttgcattagttttacactgacaaatcgtcggtaagcacgtcacaattttttaagtcttaactaagctttttgccatatacatttccacaaaaactgctttttattgtcattttccaaaagcatatatttgtccatacatatatatctatatcaaatgcatgcgcaaatgtatcatctaattagtatactgagcttgaaagaggataaattttgtaaagagagtcgtgtagaatgtggaacatgaggaaaaaccaaagtggcaacccataaaatgttagaatattgctaagaaaacggaatcgacgaccagatttcagtgtatgaacaaaagaggaagaaaaggaaagtgaaagacaaaactaagattaaaatgaaggaaggaaaagaaatagtacgaaaatggatgtacttaaccccaaaaaaataagattatgtagctaaattttagtttaaccaattattacaatattcgtaaattttaatgtagcactaatcaaattttttttgtgacctcataatttttaacttttgcatctgattactatattaacacatgaacataattttattgacactagaagttttacatgttttcgtgggcgtcgttaccgatcatgttttcatgtagtcaaatggattcagaaaaacatgaggtataaaatagtaactccaaaattccgaggaaaataattttcaagtggccaaaacaaatattttctagtatttaaattacggaaaatgaaaaattaatgacatgagtttagagtaaacccagcacatctaaaatgacaaagaaagcgggtcaatcatctgaaaactgcaatttagaagcactattaactagtatgattgggagctttactgttatttttagctagagaatttaaaattaataattttgttccggaagatttaagatgtttatcgtacaagaaagtgtttaataatgtgtatcatgtattagacctaaataaagtatgaagagacagtgaaagaaaaacagagtatgatagcacaacacaaaagcaatacaaatataattaacaccatccttatcaacaaatacactgcgtcccttaaatattccactaaattacaaccaaatactttaaacatgcacgatagtgagctgtatcttggaaattcataaaaatgacataaacttttgactcatatatatacgttgaaaaagtatttgaaagtagactgaccaacaagtaaccatcaagaagcataaaatctaaaatatctattgtatttaaccatcccttatgcccatcattttcacaaacccacacatatacatacttatatactttataacattccaaatttcaaccgatctatcataattaggcatcaaattaaaaaatggaatatttgtggtgggagagagatccacatcttttgtagaaagtgcgtgtggggctaaacttagaaaaaaaagcaggaatagtgagagaggagacacacggcgttttcgtttctgcctagaatctacacttagtgttatacgtaaggccaaagagtcaacgactttggctccctctcttcacctcttctctattataaattgaagggccaataacccaactctatttgtcctcaaagatagtaaagaagccaaataataaccaatctttcttctatcttctctccctcaatatctttctctcactctctgatctccctggcacaactaaagtagagatatagagagagaggaactttggattgtttgtgtctttgtgacagatggcagagataaacaaacaaagcaacaaatgggaacaagaagaggttagtaatgaaaataattgggaattggctgaagaagaaagtgttgactggagagggagaccttccaaccctaacaagcatggtggaatgagagctgctctctttgttcttggtaatattaaaaaaactttcttagtgttaaacatttgtttgtagccttagatggatcatcttgtttttgtatcttggtccataagaactccactttttatccaaactttggtcccactatctaagattatatattccatggaccttggcaagggttagatttctcgatttaattatgtcttattgatttgtggtctttcattctatttttttaggactacaagcctttgagataatggggatagcagcagtagggaacaaccttataacttatgtaataaacgaaatgcatttccctttgtctaaagcggccaatattgttaccaactttgtcggtaccatctttatctttgcccttctcggcggctatctctcggacgcctttctaggcagcttctggaccattatcatattcggcttcgtcgagctttctgtatgttcatcatctctttccagtacttttttgacatatatgtacatacaattctccaagttacttggcttgcaatttaaaattaaaatctaaaccactttcgatatgggatttctaaccaaatctgtttttttacacgtaagtaatttacgtgagtatctccaggcaaacatgccttttgtgtgtgatcccattacgatttaattaactatttacaaaaataccagcctataaacatcaccaattactgttttagatcaaagtttctcattccgaaaactttctaataattttttttccttttcttttaacgatg

SEQ ID NO: 34430 - DNA, 3003 bp, Unknown
  misc_feature (1)..( 3003): 2750-1469P.txt file - cDNA_ID_3078100; gDNA_ID_1620811; Annot_ID_169042
taataagaattttgaaatgcatataaaacttgcacatgtttctcctttttgatgtgcattcttcaatgactaacataatctcctaaatacaacaacatcatagcatttgagtctctgaaaaaatgaaaaattatagaaataattgaaacaattagtaattaatgccaaaacagtttcaaagtcagaaatcagaacaagaataattatacacgtcttagattggtatatataaaaataggaagctctttacgttgcatttgacttttgtttttaaggataatggaatcatactgtaatgttaacaactaagcaaaaatgtttaagaaaatggaacaataatgtaatgtttagaagaaaaaaacaacatgataaattgatatgatgtcttgtgggttttaattaaattcataccgacaacctttttgacttgcttctctgtctttgtttctacccacacagagatcaaaacaccacattgctgttaatctttaaacaaaagaacattaaaaaaaacacttaatgaatattccttaaatctaatcatttctattcaaataagtgcaacacactccaaacacctaacctgccgattccttcatacgatataccttttgtattagattagattaattaatagttggaatagttccatgcgacagtaaatcactttgataccatcggctttttagataatagtaggctttattgaattaccgacaagtggaaaaattttgtatatgcgttttaaattttagatccttaatcttgtcttatgctttagtattatttatttatttttctttaatatttcaaaattattgacctctgcagcagaaggcaaagacgaggtttcaagtaaccattcccatgatttgatattgtgcatttttacccaagtcaacagccattattcgtcctcacattagccaaatctgatcaatccaaagaatctggaccgcttcgttgttttctactatctaagacaatgtttctctctcgcatttcttgctaaaaagctcattttctgatttgtgacaaaatgagattttttttaattaaaatattatgactaatctctttatttcttataaaatattatatcttaaacattacaatttttctaacctcttatatcacaatttatttaagcagttccgtaaatttttcagtcatcatttttcgtggatttgtttttttttttttacgttccaatcaccaaccactaccgtcaagcacccaagaaagttgcattagttttacactgacaaatcgtcggtaagcacgtcacaattttttaagtcttaactaagctttttgccatatacatttccacaaaaactgctttttattgtcattttccaaaagcatatatttgtccatacatatatatctatatcaaatgcatgcgcaaatgtatcatctaattagtatactgagcttgaaagaggataaattttgtaaagagagtcgtgtagaatgtggaacatgaggaaaaaccaaagtggcaacccataaaatgttagaatattgctaagaaaacggaatcgacgaccagatttcagtgtatgaacaaaagaggaagaaaaggaaagtgaaagacaaaactaagattaaaatgaaggaaggaaaagaaatagtacgaaaatggatgtacttaaccccaaaaaaataagattatgtagctaaattttagtttaaccaattattacaatattcgtaaattttaatgtagcactaatcaaattttttttgtgacctcataatttttaacttttgcatctgattactatattaacacatgaacataattttattgacactagaagttttacatgttttcgtgggcgtcgttaccgatcatgttttcatgtagtcaaatggattcagaaaaacatgaggtataaaatagtaactccaaaattccgaggaaaataattttcaagtggccaaaacaaatattttctagtatttaaattacggaaaatgaaaaattaatgacatgagtttagagtaaacccagcacatctaaaatgacaaagaaagcgggtcaatcatctgaaaactgcaatttagaagcactattaactagtatgattgggagctttactgttatttttagctagagaatttaaaattaataattttgttccggaagatttaagatgtttatcgtacaagaaagtgtttaataatgtgtatcatgtattagacctaaataaagtatgaagagacagtgaaagaaaaacagagtatgatagcacaacacaaaagcaatacaaatataattaacaccatccttatcaacaaatacactgcgtcccttaaatattccactaaattacaaccaaatactttaaacatgcacgatagtgagctgtatcttggaaattcataaaaatgacataaacttttgactcatatatatacgttgaaaaagtatttgaaagtagactgaccaacaagtaaccatcaagaagcataaaatctaaaatatctattgtatttaaccatcccttatgcccatcattttcacaaacccacacatatacatacttatatactttataacattccaaatttcaaccgatctatcataattaggcatcaaattaaaaaatggaatatttgtggtgggagagagatccacatcttttgtagaaagtgcgtgtggggctaaacttagaaaaaaaagcaggaatagtgagagaggagacacacggcgttttcgtttctgcctagaatctacacttagtgttatacgtaaggccaaagagtcaacgactttggctccctctcttcacctcttctctattataaattgaagggccaataacccaactctatttgtcctcaaagatagtaaagaagccaaataataaccaatctttcttctatcttctctccctcaatatctttctctcactctctgatctccctggcacaactaaagtagagatatagagagagaggaactttggattgtttgtgtctttgtgacagatg

SEQ ID NO: 34431 - DNA, 3000 bp, Unknown; identical to SEQ ID NO: 5707
  misc_feature (1)..( 3000): 2750-1469P.txt file - cDNA_ID_3078130; gDNA_ID_1620812; Annot_ID_57888

SEQ ID NO: 34432 - DNA, 3000 bp, Unknown; identical to SEQ ID NO: 5707
  misc_feature (1)..( 3000): 2750-1469P.txt file - cDNA_ID_3078130; gDNA_ID_1620812; Annot_ID_169099

SEQ ID NO: 34433 - DNA, 2255 bp, Unknown
  misc_feature (1)..( 2255): 2750-1469P.txt file - cDNA_ID_3078139; gDNA_ID_1620812; Annot_ID_57897
cttcttgatgtaaaatggtagggcggaaaaagctagggtgatgtaaaaccaaaacttgaaccaaaattcgtgtagatacgtaactagatttgatttaaataaataaaacattcgttatgtgccttggatcctctggctaacgggtgaccataaagtagtgttgcattctttaattttgtttcgccttttgcgtaatgagagaccatattataaaataaagcctaactttacaatatctgtattttttcctcgacactcttttttaagagaccaatagtttgaattcattatcatgcatcttccaatctcataactaatttggtatgcatgtataagtgctacaatcattattatatggggtttctgattttttgaagtacaagaatcaaaatgaatccaacctgattggtgtagttttgggtcgagttcggtcgaaacaaaaatttgattcggtattatttatttgattttggttcggtttattatggttggcacttggcatattggttttgaaaaaaaaaaatgttatcatgtacgattttttttgggtgcaaaaaagcatcatgtacgatagttttctacttttcttcaaagattgaaagtaaccgttgcaatctcattgcattattaggcctacgagaggtatcttctttcaagtgggctttaccattacactattgaccaagtttgggccacatttggtttgaatagcccataagaatgtggttttttttttttaactagtcgcaacttattatcgtgtatggtgtgaacttgattgattttgacaagccaaaaaaatcgattgataattaattgatctcgacaaaataaaaatctaatatcaacacataagctcaccaagcatgttttattctttattgatcatacaatgtatgtttgctgttattattcgggttgcaaataatttatgtgaatatcagaacttcagaagtaactcctaccaaaaaaggaacttgagaagtaatcacatatgaatatcgaagttactctcatctcaaattatgcaatgatggcattccattaaattactactattgaattgtacacaaatcctccatcacatcaaccaacaaacaaagaataatacaaattaagaatatattccaaagaaattgataaatagtgattgttagttgtaactgtaaacacaaaaccagaattcttaattattaatagaaaaacaaaggtttcgaatggtaaccaaaatgcaccgtgcaatcatacatataacattagttagttatttttagaatatattgaaaagataattattgtataattactaagtatattcaatttaaagtcgtaagaaaaaaccctttattggctctaattgtttaaaaacatatattaggattcactaagatgtataattgaaatcaatttccaaaccatgtaaaagtactagttttctcaaatagtttgttgctattagtttgttactaaaactaattcacacatttttatcaccaaaagagcaaaaatggacgtgggatgaatatgatgatattttttttgaccttgttgtagggtctctcactctcttcttccattaaagaattctcagagcttttcttacttcaactgttttcttggcccatctcactgaaataagtgtgataaactctgcctgttacattatttggattttaataggtgaagtaacggaatatgtaatctacatcaaaataatattcacttctatctctctaccttatggcattagaaaaatccaattattacatgaaaggaaactatagtaattagatgaagcatagaagcgacaattaaaagacataaagagagacaagtcttggcaagttttctctgtttcacactttggagacgaaaccttaaaggcttaaaactgagaaaaacaaagccgttggcttttgtaagccgctcgttcttcgagacaaaacacactacactctttctctctcactcactcttcatctcttttcttctttctctctctcctaaaaatccgacgaaattatgattcactttaccttttaatcaggaatatccctgtttcacccttcttcttcttcttcttcttcttcttcctcgtgttttttttccataacattccctctgaatcttcgttttttattggaaagaaacaatctaatccaagttcaagggttttctcatcttcagtggctgaagttatgagctttacaagatgggaagtgttctttggtctctctgttttagccttgacaatg

SEQ ID NO: 34434 - DNA, 3000 bp, Unknown
  misc_feature (1)..( 3000): 2750-1469P.txt file - cDNA_ID_3078139; gDNA_ID_1621115; Annot_ID_171831
ttcaatcaaaatgtagttctttttttttttttacatcaaaatgtagttcatttataattggtttaagacttgattcatagtgtaaaaacaaaatagttatttagttttacatgaaccattagtaggttctagtttgtgtataaaatagtttatttgttctacagccttacttaactatcttagtttatattcaatcgtgtaaaacaaaactgggatccttcctttttggttaccataggtatggaagtaaaagtatttaggtgttgtttaaaaagtacaaaaattcgattttgtggtttgtctattagtaaatcattcaaacgttttttctttttttttgatagcaattttattattattctttttacttttataggctcatcttttggagagagcattgtaaagattatgcttttcttaacgctttcttgtttgtccttttgcaccccacatcacacgttaactaatttattggatgaatgttgaataatttccgccgagagaaaaaaaaacaggcttcaatagttctgtatcatacttcaaactaatttagaaagtttgagtgtatcatacttgtgtatattggaaaatgaaaatggaacgagacaattcaatagttctgatcaatttaatattttcaaaacgatcaagtgcataacagcaaattgtatccaagtatcgtctaacaaattcttttaagttctttttttgacttttcataatctatagaactttttctttgaagcttcttgatgtaaaatggtagggcggaaaaagctagggtgatgtaaaaccaaaacttgaaccaaaattcgtgtagatacgtaactagatttgatttaaataaataaaacattcgttatgtgccttggatcctctggctaacgggtgaccataaagtagtgttgcattctttaattttgtttcgccttttgcgtaatgagagaccatattataaaataaagcctaactttacaatatctgtattttttcctcgacactcttttttaagagaccaatagtttgaattcattatcatgcatcttccaatctcataactaatttggtatgcatgtataagtgctacaatcattattatatggggtttctgattttttgaagtacaagaatcaaaatgaatccaacctgattggtgtagttttgggtcgagttcggtcgaaacaaaaatttgattcggtattatttatttgattttggttcggtttattatggttggcacttggcatattggttttgaaaaaaaaaaatgttatcatgtacgattttttttgggtgcaaaaaagcatcatgtacgatagttttctacttttcttcaaagattgaaagtaaccgttgcaatctcattgcattattaggcctacgagaggtatcttctttcaagtgggctttaccattacactattgaccaagtttgggccacatttggtttgaatagcccataagaatgtggttttttttttttaactagtcgcaacttattatcgtgtatggtgtgaacttgattgattttgacaagccaaaaaaatcgattgataattaattgatctcgacaaaataaaaatctaatatcaacacataagctcaccaagcatgttttattctttattgatcatacaatgtatgtttgctgttattattcgggttgcaaataatttatgtgaatatcagaacttcagaagtaactcctaccaaaaaaggaacttgagaagtaatcacatatgaatatcgaagttactctcatctcaaattatgcaatgatggcattccattaaattactactattgaattgtacacaaatcctccatcacatcaaccaacaaacaaagaataatacaaattaagaatatattccaaagaaattgataaatagtgattgttagttgtaactgtaaacacaaaaccagaattcttaattattaatagaaaaacaaaggtttcgaatggtaaccaaaatgcaccgtgcaatcatacatataacattagttagttatttttagaatatattgaaaagataattattgtataattactaagtatattcaatttaaagtcgtaagaaaaaaccctttattggctctaattgtttaaaaacatatattaggattcactaagatgtataattgaaatcaatttccaaaccatgtaaaagtactagttttctcaaatagtttgttgctattagtttgttactaaaactaattcacacatttttatcaccaaaagagcaaaaatggacgtgggatgaatatgatgatattttttttgaccttgttgtagggtctctcactctcttcttccattaaagaattctcagagcttttcttacttcaactgttttcttggcccatctcactgaaataagtgtgataaactctgcctgttacattatttggattttaataggtgaagtaacggaatatgtaatctacatcaaaataatattcacttctatctctctaccttatggcattagaaaaatccaattattacatgaaaggaaactatagtaattagatgaagcatagaagcgacaattaaaagacataaagagagacaagtcttggcaagttttctctgtttcacactttggagacgaaaccttaaaggcttaaaactgagaaaaacaaagccgttggcttttgtaagccgctcgttcttcgagacaaaacacactacactctttctctctcactcactcttcatctcttttcttctttctctctctcctaaaaatccgacgaaattatgattcactttaccttttaatcaggaatatccctgtttcacccttcttcttcttcttcttcttcttcttcctcgtgttttttttccataacattccctctgaatcttcgttttttattggaaagaaacaatctaatccaagttcaagggttttctcatcttcagtggctgaagttatgagctttacaagatgggaagtgttctttggtctctctgttttagccttgacaatg

SEQ ID NO: 34435 - DNA, 2255 bp, Unknown; identical to SEQ ID NO: 34433
  misc_feature (1)..( 2255): 2750-1469P.txt file - cDNA_ID_3078139; gDNA_ID_1620812; Annot_ID_169115

SEQ ID NO: 34436 - DNA, 3003 bp, Unknown; identical to SEQ ID NO: 28111
  misc_feature (1)..( 3003): 2750-1469P.txt file - cDNA_ID_3078151; gDNA_ID_1620812; Annot_ID_169107

SEQ ID NO: 34437 - DNA, 3000 bp, Unknown; identical to SEQ ID NO: 5712
  misc_feature (1)..( 3000): 2750-1469P.txt file - cDNA_ID_3078155; gDNA_ID_1620812; Annot_ID_169106

SEQ ID NO: 34438 - DNA, 3000 bp, Unknown; identical to SEQ ID NO: 5704
  misc_feature (1)..( 3000): 2750-1469P.txt file - cDNA_ID_3078178; gDNA_ID_1620812; Annot_ID_169091

SEQ ID NO: 34439 - DNA, 866 bp, Unknown; identical to SEQ ID NO: 21630
  misc_feature (1)..( 866): 2750-1469P.txt file - cDNA_ID_3078182; gDNA_ID_1620812; Annot_ID_169090

SEQ ID NO: 34440 - DNA, 3003 bp, Unknown
  misc_feature (1)..( 3003): 2750-1469P.txt file - cDNA_ID_3078217; gDNA_ID_1620813; Annot_ID_50630
gattcttttgttcgatgatatagaggatgcattttgtaagagagacatgaatgaagaaaagagagtttgactcaaaaactaaggaaatggaagtatagcttatttgattttattgttgcaaagaggcacatcgtagagtatatatacacaaaaggcaattcaggttaattaattaccttcccgtttttcaattggagaattttgattattattttttgtctacatttcaaaatgagaaagaaaataatcatttaatacgtggaattatagtttagtaatacatggcatgaaaataattttatcaaattttatttcggcatcaaaatttgtgtgttttttttttttttttttgaaattaaacttattgttatgatgcatttattgagacattatttgatcgatagtagcaattttaggagagtgtctgttgtatatatatatgaactatgaagattgaaggctatttgatgtactgtatatatgtaatacttgggacatagctaaatatgcatattgtgtcaatttcttttacttatctagcgttttctgtcaaattcattttcagtttgtagattggtaaaagtgaactgagaaatacaaaatgtctttaatgaaattaggtgtttactatctagtttctaaacttttggtaattcagtagagcggcacaatttgcagtttcctacgaagagatgattatcttgacttttataattagcatcagatatccgatcgccaactaatccctacaagtaaatcagtccaaatagttaagtggtccgcacagaacaagtttgtttgcagtggaaactgaaacatcaaatatgtgcgagtttacatcctaacctaggttctttagtgaaattgatcctctcacaacttacaagtccaaacaaaatatcttcatcacttgagttgagtccatctatcgttactgttttcagacaaatccaatggtccccatatcagcggctgctctcatctccttcgacaagtccacattatatcttatatcgatctatgctattttattatacaaaattagaaacatttagtaagacatcgacacatcggtaattatgtttcatcttatcatatttatcgggaaaaaaaaatgattttctctattaaaaaaaaaaattatccttttttaccattatgtagttgaatttaggttgcttcttaattttttttaaaactgttcaatatttactcacacaattaatattgtgcctttttaaaaatggaagtcctaatttttgttaggctatcaattttgctgactaattaatatattatccataagaaattaacttttatttaggcaaatatctctgctaaacttggcaaacatttatcaaaatctacatttaatacctcaaaggatttcataattgtcttgccaactgaacccaattattagaggtcaaacttgtactactaactttaacaagtcaaagatattaataacttgtactctattcttatcatctcattgcccaaaaaaacaactataaatacttacacaaaacattaccaattcggatctacgattttcaattaactctcttcttttttttttttttttggtttttcatttaagtctattcaatcatggaaaccggtttaaacatcttaaagctatcgctatgcgtcagcctagtcgtggttggatcatatgctcaggctcccgcaccatggaatccatctaatgggtttcgtccggggacatgtgaccactacgagtgtcccacctataaattggtagaggccggatacggctttgagatccgcatgtacgacgctgccctatggatatctactagtcctatcccctccctatccatgactcaagccaccaaaaccggtttccgacggtaaatgaataaatcgaatatataagacttggtgttctttcggtttctttatattataaactgaagttgactacgtttttgggtttatagattaaataggtacatagaaggagataacaagagcaacgtgaagatgaacatgacagctccggtgatcgcacaagcaacgcctggaagatcagtctacacggtctcactctacctcccgaagaagaaccaacagaacccacctcaggccgatgatctccacgttcggtctacgaaaccaacttacgtagccgtgagacagatcggtggctacgtgtcgaacaatgtagccaaggacgaagctgcggctctgatggaaagcctccgggattctaactggattttgcccatcgagaagagcaaaggaaagttgccggcgtattttctcgctgtttataacccgccatctcataccacggctagggtgattaatgagatcatggttccgtttaacatgtagatcatgttaatgacgccctcacgatttgattgttacgtagcaattggattagaagaggtggtttagaaccgatcgatactgtaacagcagcttgcagcttctggtttaaccggtataaattgtatctctggttaagtggtgattaatattgttattttgtaaaggtggggaaaactgtaaccaaaaagtttgataaaagattaaataataactaagattattgaatcaaaattgaaaatcaaacctaaatatcatcgaatcaaaaaaaaactgtaaatgattttttcagtttcgctttttttttttttcagtttcgctttctagaacacttataaagctgtaaaagaaagcacctgatcaaaaccatgaaaaaaaagagtgaaaaataaatattaggaaaatataaattaaagcgataatttatgtaatttcgatatttttaatgcatattatttttgtcggccaacttgttatatttaatcatgtgtttacaatgcaatttaatcctatccgaagatgaaccacacacataaaaccttatctgttacaaaaaaaatgtttatgtttttcttcataaatgtataaaaccttgtatcagtttacgttgcatggccgcaacggaaaacaaatccgccaatg

SEQ ID NO: 34441 - DNA, 3003 bp, Unknown; identical to SEQ ID NO: 34440
  misc_feature (1)..( 3003): 2750-1469P.txt file - cDNA_ID_3078217; gDNA_ID_2684091; Annot_ID_189940

SEQ ID NO: 34442 - DNA, 3003 bp, Unknown; identical to SEQ ID NO: 34440
  misc_feature (1)..( 3003): 2750-1469P.txt file - cDNA_ID_3078217; gDNA_ID_1620813; Annot_ID_169155

SEQ ID NO: 34443 - DNA, 3000 bp, Unknown; identical to SEQ ID NO: 20817
  misc_feature (1)..( 3000): 2750-1469P.txt file - cDNA_ID_3078226; gDNA_ID_1620813; Annot_ID_169147

SEQ ID NO: 34444 - DNA, 3003 bp, Unknown
  misc_feature (1)..( 3003): 2750-1469P.txt file - cDNA_ID_3078234; gDNA_ID_1620813; Annot_ID_169140
cctgtaacacattcgtaatgaagattagcatactaaaaaagaaggagatatcgataaagctagagtaacagagcaagaattagttataccatggctttggttttcgagtagaaagagccagtgaagttgggtgtgtcttcctccttgaagccaattcctgaaccttccggatgcttgtcgtcatattcgaatatacaaccagtagcgaaattcatcattaggagtccgtgctctctgcagacatcagctagagtcaatgtgccagctacattggcacggatagtctcggtcttgtgagactcacaccagtcaacattgggtctcccagtcacaccagcggaattgaaaacatgggttggcttaacactctgaatatcctgcagaagagaagatcgatcctccaaccgacctttcccatactcgtaagcaattccttgcttatcacatatctttccaagcagaccaccgatccatccggtctttccatatatcaggaacttcagcgaaggcttttgaggtgtgccgttgctcctttggcttggaacaaccatatgggtttgacttggtttttcagataaagtagctgccagcgaattgtcctcggagccatcaaagtgtcgcccaccaggcatcatcagcatccttggatgaggaagcaatgctccagaaacatcaccccaccactccgggttctgtgtgtaccaatccatagttttcttcaacccttcttcccacgtggttctctctgaccatcccaactttttgagcttctgatcgtcaaggaagtacctctgatcgttaaaaggtctgttgtcgacaaacttgatgttcgcctcagggtccatgttgaagagtttgcagatgtctttggcaacatcattcactctcctctccttcttcgtcccaatattgtaaacatggccaacttctcccttgtgaagaacaacttcaaaagcctcagcaacgtcttcacagtagaggtagctcctgacatttgatccatctccatgaatgggaagaacctgccctctcattgccagcaaaatgaacttaggaatcaacttctcaggaaactgattcggtccatagacgttattcccacgagtggtaataacaggcaaaccataagatctaccataagccataacaagcatctcagcaccagctttcgtggcagagtaaggattcgtcggaagcagctgagaagcctcatggttaccaacaagagcatcctcatcagtttcaccataaacttcatcagtactaacatgaataaacctcctaatctgaccagtaactttacaagcctcaagaaggacatgagttccatagatattattcttagtaaactcgaaactgttaccgaaggaattgtcgacgtgagtctgagcagcgaaatgcatgatggtgtcaataccttcagtgatgagaagatgattcaccaagtcagcactagcgatatcacctttgacaaacttgaagttcggagagtgcttagaaggattgagattcttgagatttgaacagtaatcaagcttgtcaagcacaacgattttgtaatcaggatagcttcgtatgagtctgttggcgacatgagacgcaatgaaaccagcagctccggtgatgagaatgttcttgggagtgtacgaagccatgatcaaacgctgcgtttaagaagaatgaaatcataaacactcaaatacgcagaaatgaatcagtagatctaggaaatcaaacgcataaaagcttagatccagatccgaaatctcgattctgtgattatgaccatcggatcaaagagagagagtacgaaagggtaaatgaaactcagtgaagcattatgatcaatgtaaaattcgagataatggagtataaaggaagacgagagattcaggaaacataccttcgaatttttcagatcttcaacgatcgcaagagaattggagaagacaattggaaaattccgaggaaaacgtgaagaattttcgacggtgacgaagctgaggaagtagcgaaagaaacggagaagaagaagaatcaaaattcaaaaaagagtcttctcgttcgtcacacagcaaaaatagaagaagaagagaacgaacactaaagactcctggagagggaagagtctacgggaattcattatatactgcttgcacttacgaaaatacccttctcgttttcactcttttacaatagcgggtaggtacacgacttgactcgcgtgttgatgatcgcgcgttttgtcaaacattaacttcgcatgtcagctaattactaacatgttatagtctaaaattagtctagatttgatttagaaaatggaattttataattataaaagactaaaaatgtgaatatgaagtatgaagtaacgattgtacgaaaaaaaaacaagaatagaaaatgattattgacgatttttaataaagtcaatgaagttaaaaacaaaattaggtaagtaaaacaagggacggttggctacagtgcgtttacgtttgcgattgtggtatacgtgttaggtaccatgtgtggctctcaacttctcaaacctttcatttacgatctagggtcattttcgtcattagatagcaatcgaatttgtatttgtaatgatattcttactatattttaataatagtcttttaatatgggatatgtaatcatttattgcacttgcccatatgcttaattagagatcaccgacacattccattattgtcacttgtgatcttgtgagagtgaatgattaactaaaatatttgtaattgatttgattttcctaatttctttgatcattaacatctaaagacgccttggatgatttgtgtgaaaaatagtttaacgggggtagagtagagaaacaaatttaattcagggaccattttagcaaacaacgtgtttaattgacaaaaggcacgtgagaccacgtgagtacttgttttggtttcttcttcatcggtccgatcagagagagagaatcgccggtgagaaaagaaaatg

SEQ ID NO: 34445 - DNA, 3000 bp, Unknown; identical to SEQ ID NO: 5725
  misc_feature (1)..( 3000): 2750-1469P.txt file - cDNA_ID_3078241; gDNA_ID_1620813; Annot_ID_169136

SEQ ID NO: 34446 - DNA, 3000 bp, Unknown; identical to SEQ ID NO: 5737
  misc_feature (1)..( 3000): 2750-1469P.txt file - cDNA_ID_3078252; gDNA_ID_1620813; Annot_ID_169126

SEQ ID NO: 34447 - DNA, 3003 bp, Unknown; identical to SEQ ID NO: 20827
  misc_feature (1)..( 3003): 2750-1469P.txt file - cDNA_ID_3078267; gDNA_ID_1620814; Annot_ID_169188

SEQ ID NO: 34448 - DNA, 3003 bp, Unknown
  misc_feature (1)..( 3003): 2750-1469P.txt file - cDNA_ID_3078284; gDNA_ID_1620815; Annot_ID_169210
gaacagtacaacggaaaattgaggagcggaactaaaagttggggacgtgaagcaggttttaggggtgcaaaatttgtctatgtcgacatgtacaacactcttatggatgttattaaaaattatagaagatacggtaagtaaatacccaccaccattttcccttgtttttttttgctaacaacatgaattatattggatttgaattagatggggatataattataatgacgaaaactattgattttatgtcacatttaactgttcctcattcttaaagatcttgtttaccgaatttgttctatcgcttgataatttatgtatatagttactaagtatcatgtacttgtatggttgcaggattttctaatgagaaaaatgggtgttgttgtatgattacggctataataccatgccccaacccagataaatacgtcttctacgacttcgttcatccatccgagaaagcttacagaacaatttctaaaaagcttgtccaggatatcaagaatggccttgcctgatttattatatatacaatgctttattttaattttaataacagccatcgttaataatagaaatgagaagacaaaaatcatacatggcgatctctctgtttttcttatgttaaagaatgtataatccagtttatgtattgttcactttatataatcccagaacaacaaaggagtttgtttacaaatgtaaaccttttcttttttgccaatggttagaaaagaacgtatctaataacaatcccctagcaaataagaaaatgaccaaattaacacttttggaaattagtgaaataaaaatccaataaggtgatttaaaaactcatgtttttgatgacgatagctaaaattttatgaatttaaatatcgtcaaaataaaatatcaacttcacttataagtattccgtaaaacatattggtttaattgtgaacattttttcatagaatatgtccgatatatatatttcttcttcttctatatgtgccagtcgggcaaaaaaaattgtgaatggcaaatgaaaaaggttatgcattgtaaacgaattgcttctagcaaggtccgcaaccactatatacaaaatgatgcaagggatattggaattttacttttttatttatttaatttctatttattatacactagtacatctgttcttcttagccctgttctttaaaacaataagtcaacgtggtccagtaatacaaaggaggcagagcacaacgttagataaatgaaaagcaatggtttagtagaaagtaatacaatcaaaatatatacaatcagtatctaaactaaaaattagtaggagcgtatcagctaataattggaaagtatttgacccgaaccgtgtataacggctagattatcaccgaacctaaggttagtgtttgctctggactataacaaaccctaagtgaaaaggaaaaaaggaaacttgagtgtcaaacaaaaaaatttatatacatgcgtctcgcgtctcctttcaagttaaaaatgcaattgctctgaattttttttcaattctcttcttcgattgttgtctgcttcgtttgcctctctgttctcttcttcttccttttttgagatttcattattcatgagttgttgcatctgcttgttggattcaccctaatctttggtgtgattcgttggtatggcccaagaaagactcatatatacaacggctctctctgttttcacttaaaaagcaacgaagaagacgagagagatcacacacacaagcatcacatcttaatttgtttgcctgcgatgataagatctatcatccaccgtagaaacagagacatagagagagacgattcgaaggacatgttgccgggattttaggcttcgtgagtcatgatgttggaggttctatccggcgatggaggtgtcgatagattgaggaggtggagcgatcagaggattttaggcttcgggagtcatgatggtggagcgatcatcggagattggcgatggagattgaggaggcggagcgtattttccgttaacgggtatagatggcatgtgctctcagaggcccaatagaaacaatttcagcccatcaaacaatgactagcccattgccaggttaattctcagcccattttcttgtttagttaagaaattaatatattttataattttaattaaaggcttttttctcacggattttttattttcttgcaatttttatttaaagttaatttttaatatttttagattaaaaaaattattttttaatatatataatatttttgtttttaagtgttaaagtttaatatgtgtaaaataattggacacaacatcccgtccataatatgaggtccttaagcggtgttctaggttcattaaatattttatacatacaaaattttaacatttttaaaaaagtattttttgggttttcagtatgtattattttttaaatatacataaagttttaatttaagtgttagatttaaatatgtgtaaaccaaaaagaatgtaaataatacatgtaatatagacataactctttttactaactttcaaaaccatactttatataataaaattgatttttgatttaccaaatcaataaaggtacatgtacaaccaattactcttttttttttctttttgaaacaaattaatggtaataagatcaatggtttacttaacttaatagaacttttctttttcataaattttatatttacatgatattcttaatagatgagccatgacttttatatagcaataataagatgcactaaaacatagtgataatattattttagcattttttaaatgagagtgatagaattattatcctcttaaaagctaaattctaacattcattttgtgtatgttaactctcatgctttttgccttggacaaacaaaagctagacgtctaaaaatagttagaaaataaaacatatataagatgaactaaacactttgggggaaaaaaaaattatgaacttaattagggttctatatg

SEQ ID NO: 34449 - DNA, 3000 bp, Unknown
  misc_feature (1)..( 3000): 2750-1469P.txt file - cDNA_ID_3078335; gDNA_ID_1620815; Annot_ID_169221
gtattaatcaaaatggagttgaattctaaccttcattaaacgagaaagggatggaagcacgttgatgggtggatatatctgtttttcagggaagaaacaaagatacattcattcagagccggatcataatattactgaaaccagtaagatcagggcctcagcggtagttatttattacctgtctgttgtgaagttgcctatcgatatatatctgaccttcagtaatgtaaccagtaagatccggagttggatgagtgatatctgatcaatttgtcaaacaacaacgagtaagaattgagttttctcaagataaaaaatagaatctagggattggcttaagaaagatgattttaccgtcattgggcatagtgaggattggaatttgggtgatggaaccttttcttccttctatacgcccagcacgttcataaatagttgcaagatcagtgtacatataacctggatatccacgtcttccgggaacctcttctcgggcagcggaaacctacagtttctcaatcttattatcaaacatgaagaggaaaaaacatggtatgaaataaaggaactactccggtatcaaatattcattttacctcacgaagagcatcagcataagaactcatatccgtcaatataacaaggacgtgtttcccacattcataagccagatattcagctgttgtgagggcaattcgaggagtgatgattctctcaatggttgggtcattggcctgttggaataaaggaaggttaaatctgtttaaagctaagaaacatctaaatacttgaaaaaactccatgatatggcaatcagctatagaagtcaaatttaccaggttcaggaaaagagtaactctctccattgatccattttcttcaaaatctcgcttgaagaactgagctgtctccatgttcacacccatagctgcaaacacaattgcaaaattgtcctctccatgatcctggaaaaacacaagaatgagaaagaatccttgatattatgagacagccaacgttgaagaggaatgtctacaaacaagaaattcaattttgacaacaactgagttataagcctagaacatctaataatgaagacctttatgtaaccacacatccatcaacacacttgtagaaacagttacaactcaaataagagctttggtatagagaaataagagatatatttgtacaagttacaaaggattacctcaagtagatcaacagtcttttccaaacgcttgactagaccagcctgacgacaaatctgagcagctatttcattatgtggaagaccagcagcagagaaaagtggaatcttctgtccacgagcaatggaattcatgacatcgatggtcgatatgcctgtctgtatcatctcttcaggataggttctttcactggggttgattgaacttcctatcaatataaggaattgacatttttaagaacaaatgaaacattgcttcagagatctcaatggaataattgtcctcttagttgctcacctgaaatatcaaggtatgcttctggcagaataggagggccattatcaatcggctttcctgaaccgttaaatatgcgcccaagcatgtccaatgatacaggtgttttcaaaacctgaaagacacaaaccggtttaaaaaaaatgcaggaagcagaaatcaaccaatcatttcaacaaatctgcgaaatgctggagggacgaaggatttttatggtaaattacctctcctgtgaattgcacggttgtaaacttgttgtcaattccagatgttccttcaaaaacctgaaacccttaagtgataagtaagtcactgaagaagtgactagattcacgaagtttgtgtttaagtattattcaatgtttgaagtaacatggacaaaaaacaatcctaaacctgcacaactgctttctcgccatcaacttccaaaacctgaccacgtctcgttgatccatctcctaagcgaatattaacaatctcctggtactttggaccctgatttatcattacattccaagaagttttagtcagttaagttaccctcacaaagtaaattagcattgcttaatgaatcaaacgatgctcttaccttcactttgtcaagaatgaccaatggtccagcaacaccagaaacagttctatactctgcaattcaaaagattcatgaatcagtcttatactaaagaaaaatagttaacaacatcagcaaggtcaaaaagagccagagtactagaatatccctataaaaaaacccagatttggaggataagttctgaatcaacacaatcaaaaacagaggaagaactagaaacaaaatcaatatagtgtgatccatgatcggtgacttacccatgccgatctccagagtcccttcttcgatgtcgagatcattcgtccccattttcacagatcaacgataaaccaaatcaaagcagctcctgaaatcaatcaacgacgcagtccgcaattcaaaatcaatggaaattcaaatttcgatccaatcatagaaactcggatgcagaaagtagaaaatccggtgaaagtgaaacaacttggtacaaggaaagagacgcaatagaattttctgatgatctaaatcaacaaagcacatacctgggaacggttcgattcgagcagagagagagggagagagggagagagggagagagagttatggtttatgagtctctctgtgaacgtagttggaccatatctcaaatctatcgtttttgtagagggagggctcttatttacgtgtaattacagtttaaataccaaactctataacattacaaatatggcccattaccagattgtgttttctgccacgtcaccataattgaaatcaacggttagagatgaaaggagaggtaactgtctcgcttagcttccgagtaatcgtagccgttgcgtatactcaccgacaccgtccctctgttttaatcatctccggcgattctgggaagagagaaaaagtgtgagtcagagaataatg

SEQ ID NO: 34450 - DNA, 3000 bp, Unknown
  misc_feature (1)..( 3000): 2750-1469P.txt file - cDNA_ID_3078337; gDNA_ID_1620815; Annot_ID_169219
cttttctttttgttttgtcttgaagtttggagactacaaggcatgtgtcaatgataaccattaccctatccaagattgagcttaatacctcctctgttgggtgagttcgtgttttgttttgatgtttctgaatgattcttttgtggtccttagttataattagattcatacgttatgtctcaagcaattgtggtccttagacttcttattctaataattctaatcaaatgatctttcaggtaccagtgcccaattcctattgagttggtgaagccaatgggcgatattgattatgaaggacgaggtttgtcaacaacactctctgtgttattctgaatctcccttgtacttgctttctttattagtgtcctttttcacttttcttgcagagggttcacctggtggcagagggaggggaagaggaagaggaaggggaagaggaagggggcgaggtggcagaggttagattaccttaaaaatgccctacatagatcatctggcttagtgaacgttgaatattgattttgaacatatgattcatgaataaagtctttttttttttgctgtcaggaaatgcttatgtgaacgttgagcatgaagatggaggttgggaacgtgagcagtcctatggtagaggaagaggacgtggcagaggacgcagcagtcgtggtcgtggaagaggaggatacaatggtcctccgaatgagtatgatgcaccacaagatggaggttacggttacgatgctcctcatgaacaccgtggatatgatgaccgtggtggttatgatgcccctcctcagggccgtggtggttacgatggtcctcagggtcgcggtggttacgatggtcctcagggtcgccgtggttatgatggtcctcctcagggccgtggtggttatgatggtccttctcaaggccgtggtggttatgatggtccttctcagggccgtggtggttatgatggtccttctcagggccgtggtggttatgatggtcctcagggtcgtggtaaaataaattaaaacattctgtattcttttacctggttcttgaactgtaattgtgtgaagaagccatgagttttgaattggtttgatgcagggcgtggacgtggacgtggaaggggaggacgtggaagaggaggaggacgtggtggtgatggtggtttcaacaacagatcagatggaccaccagtccaggcagctgcttgagagtgaggtttctcttacacaaacataaaaagaagaaaaaagcccaagtcgttggatgttttttttctatctccttgttctctcactttctttctatgtttgcttcttctgtccatcaagaagacatgtttgccataagtgtatctcattccccttcttttttttttactatccattgattgacagtgttttagcttgtggtctgttttgtttagagtcgcttaggaatatatgttcaatttattttatggttggtcgtcgtcttgggtttttgttagagaagaactactgaggcatcctcttttcttttcttttttcctctgttttgtagttttgtttaggtgagagtgagacacagtttggacaaattacctcttttctttggttatcagttttaatgtgatggaacagttgattcttttatttccaacaagtacccttgcaaagttgaattcttatataacattataacgaaaataactcacaaatggaagcagatttacacagagagagaaaaaaaatggaagtagaaagccagaaaccatcgattctcgaatttgggttgatcttcaaaattctaatgagacagacacaacaaaggaaaggaagctcatagactcgtcgacaccgtattaacaatagatttactcgataaaaaaatgttagcgccgttgccggggatcgaacccgggtcacccgcgtgacaggcgggaatacttaccactatactacaacgactttgatgttctaattaatgacattaatagtattaacaaacaagataatatctgccttcaagggaaagaaaaaaataaaatggaaaaatataattgggaaaaatgttgttttatatacgaactttcaaaaagtggccattttatacgtgaactctgacgtcggccaaaataaatatgaaaaatacgttgaccagccattttaacagaaacaaaacgttgacctggccaaaatcccgagacgttaactcgcattaacagacccaattaaccccgttaacagcacgttaataaactctgttaaagccgaaacggtgtcgttttgttctaaacgaaacaaaacaaaatccccaaatcgaaaactcaaaccctaagtcttcatcttccccaaatcgatttcttatatccaacttctctcaatctatcttctttgagcttcaactccgacagaagactctgctacaacaacagccggcaaagctagaactccaccatcaaactccatctccggtttcagctactcgtcgtggtggaacaggagcaatgtcgacttcgccttctattgctaaggcaatcacaacaagattaatcgaagaacaaacacgattttaccaatgagagaattagggatttggtttgagagaattagggattgagttttcgatttgggcattttgatttgtttcgttaggtttgaaacgacggcgttttggtcttaacagaattcattaacgttctcttaacggggttaatcagcgagttaacgtctcgggattttggcgaggtcaacattttgtttctgttaaaatggctggtcaacgtatttttcatgtttattttggccgacgtcagagttcacgtatagaatagctactttttgaaagttcgcgtataaaacaacatttttcccaaatataatttggtaatttctgtctaggaaaagaaaaaggaaaacataagagtacttatgtgtgcgttaagccctgctcttttcaaatcaatttttaatttaccttcgtcaagaagaagacgacttgagatttgcgaaaaagatg

SEQ ID NO: 34451 - DNA, 3003 bp, Unknown
  misc_feature (1)..( 3003): 2750-1469P.txt file - cDNA_ID_3078343; gDNA_ID_1620815; Annot_ID_169208
ttaatgctcctataaagtctagaaactctgacagcgattaactaatcccctcttaattagcgttgatacacatacgcactatatagtaatattacctgtctgtcatataatctgtctgtcacattctgctggcaataatgtatttcgatatacgccctaatagttatgttttgtcaaaagtagtccttttttttttgtgcaccaacctagccaagtatatatatgtgaagaaaaaaaaagactggtaatctggtatggttgagagagagtacactatctaatttaaacaaaaccaaaaaatagagagtagtgagtacactatctcagttttctcgaggattattaacaaaaagtgcattttaattaatactcaccccttcaaattattagaagaaaacacctagtttcaagcagttaattcggtcttgtcctaattaagtctaccggtccacaacatctccacgacccaatgcattacacatatacattataaataaatacatatatcgacatgtgtctatatatataaataagtgtgatagcattgaagagaagttgatttagcctctgtttgtccttgttatgttgttgtaaaacttgaaactttggaagcaaactcatttttataacaaaaggaaatcttattttatacattacattaaagcaacatgaaagacaattcaagctggtcttgttcttgttcttggtcttcgtggaaaatatgtttgttgtctgttctctttctcaccgagacgatcaccgccgtgaagctgccgccaaaattgattattccggctgtaatcgctttcggagactccatcgtcgacacaggaatgaacaacaatgtcaaaaccgtggttaagtgtgattttcttccttatggtatcaatttccaaagcggagttgccacggggagattctgcgatggacgagtccctgccgatttgctaggttccttctctttaaccttatttctaaagcgaatagccaatgtaaaaaaatattacgtatttatatataatgagtagcgaccattaattactaggacataagtagtgactacggcaaataaaatttgagcaatcatttgttttcttttcccttttagaagtataagttgttaaaattaactctagtaacattgactcaataattatgcgtgccaaaatttattaagaaaattccggctcgagtcttctacagtcatgatgttaagaaatgtctttaaactaacgtcatttaaataaaaaatcatgctctgtttgtatttgcagccgaagaactgggaataaaatcaattgtaccagcatacctagatccgaatctaaaatcgaaagatcttttaaccggtgtatcgtttgcgtccggaggttctggttatgatcctataacaccgaaacttgtggtaaatactatggaaattttttatcatggtgtttttcattgcaaactcctatggaaatttttgattatatatttttcctaactcgttggtttaatttttctttgttaactgtattaggcagtaatatcattagaagatcaattgagttatttcgaggagtacatagagaaagtgaagaatatagttggggaagcaagaaaagacttcatagtagccaacagcttattcttattggtcgcaggcagcgacgacatagccaatacatactatactctacgtgcaagacctgaatacgacgtcgattcatacactactcttatgtctgactctgcctcagaatttgtgactgtaagcttctctcatattttactaaaaagcctaatacgtttgatatatatacattatactaaataacatttttaatagacggctatatttctaggtaattagtataatgtttagtgtgaaatgaaattggcagaaactatatggatatggagtgagaagagtagctgtgtttggtgcaccaccaattgggtgtgtaccatcacagagaacgttaggaggaggtatcttgagagattgtgctgataattacaacgaagcagcaaaactttttaattcaaagctctccccaaaattggattcgttgcgtaaaaccctaccgggcatcaaaccgatctacattaatatctatgatcctctttttgacatcatccagaatcctgcaaattatggtaatacgcaaatatttttttggtttaaattttcatgcatgtactattcgttttaattacttcaatataaaaaaggtaccatcttttgttattgtagggtttgaagtgtctaataaaggatgctgtggaacaggagccatagaagttgctgtgttgtgcaataaaatcacatcttctgtatgtcccgacgtgtctactcatgtgttttgggacagttatcatcctacagagaaaacttacaaagtattagtctcactgttgattaacaaatttgttaatcagttcgtctgaattaaaaactattttcacggcataatgattgattatattttatctcatcttgtttgtattatttgataattgtattcgatttaaataaaattaatattttcttgttgttttattttttttactacacaacttaacattcttgtagttagggcctcttcgagtacatggatgaatgtgaatctacatgacgaaaccattgacgtttacaaaacaaatcatcatatatatcattcattctaaagtcttgttttcttttctttttgtttggtgtaaagcggctacatattctttattttttttatttgtctacatttcgtcagatttgatttatggagttaattattatcttcctagctaaaacatgctgacattcatcctgtgtgtacccaccactttcatgcatttttggcttccttagacaacaaagactagacgtctaaaaatacttagaaaatcacttgtatatatttactactgacatgagcttagaagcaccactaattaaattctctataaaacataagagagtctaaacactgtggtagaaaaaaatatagacttttagatatg

SEQ ID NO: 34452 - DNA, 3003 bp, Unknown
  misc_feature (1)..( 3003): 2750-1469P.txt file - cDNA_ID_3078351; gDNA_ID_1620815; Annot_ID_169204
gaaaaataattagaaactggtcaacacaagcatgaatcgagagattcaaagttctttggcgatggaatctacagagatcgtaatatttctgaggagagagcttggaggttcgaagctccgataacatcagagcagagtacttgagaacttctctgagattattcgcgtcctgagagacgaatagaaagaaaatttcatcagatcaaaaatgagctaattcaacggaggaaaataagaggaaacggaccaaagcgcgatgcatgaagaaagcgttgtgctggattccggcgattccttccgccagccacttatcctcgtcttctactccggcgagcgttctcatcttcttcttctcctccgtgtgtcagcagtttctttttttttttccagggcgcacgaaaataatagacttccctactcttttatttttatttttgttgcttttattaattcatcatcaaatgtttattttcaggtaattttgtaaaattgtaaaattttagcactgtacgtacgtttttgtttgagagttgaaacatatgatctggctatgacattgatttgaatagatctttagaattggaaacttgatcgattatggaattgaaccaagtattacgaagtcttttgatgtatcaaaatcgggttagattagaattgttgttacaaacagtcaaacactgtacaagctaagtctaaagctagaacaaaaagaatcgagcattagaacgggacagtataaggtaaagaataaatcccaacttcagacaaaaattgagctctaggccaagatgaatctcccggtctcatcatcgtgtcatcatcaaccttgactgctgctttgggcttaagcacctcttgcgtcttgttcccaaatagccaataatcaccattgtcatttgaagatgcatcagcaatacacatggaaggaggagtccaaccatcaaacaatgcattgtattgatcttctttgctagatctgtgtttctttctcttctttgtttcatctattgccgctattgatgttgacggcagattcttttcaagctcggatgtttttgaacttgagatagaacttgttatgacatcttggtgactgagcgactttgcaactgtagtggagcaaacaacagcctctctaggcagagtaggaacttcctcctttggttttttgaagaccattctaatccgtagaggtttacctgctacaggtgcagctgcaaatacatgtgaaaataaacatgtaaataacctaaaagcagatatcaacatgatcttcttcttgaatgtctactaagaaatagatacaaacctttgatgagactttcaacagccggaggagaatcatctctaatcctcttcttactattctgacttccatcagacaaatatccaaggtgtttttgaggttcctcaagctcatctgtcaaaccactcttctctagtgagtcagactcatctgacactttcttggaaggaagaaatattagcttgtgatgattatcagttgctttaatcgaatgtttatgcgatttctcacgcttagtttctttcttttcttttctcttctccttcttttccttcttctctatccggtgcgccttttttgaatcaagtgtgattcttttaagctttaatccattagagtaaagggttttagactccacgtctttcagaaccacagttcaaccatcccactcaatgtgcaaaaaccattacaataaacaaagaagctcctacaaacttaatcatatacatatctagacctacaaaatcaaactaacagaatggaaaacaatgcaacttacctgattcactcctaatgattgctgatacagtgaacacatgatgagattattgaaaactaatatgcaactctttatatagtgttaatgataatcacatgataattagcttatatagatttatacatgatagggtttcagagagaaaaaaatacgacttatgaaaatatagccatacccacaagaagtgtaacccaaattcaaagattactacattgaaataagtttccccaaaaacgaatccaaaatcaggttttacgaaatccgtagaaatcaatcacacaaaaaaaactgaagcaagaaaccagatctgtagctcaacgaaccttagtcgattcgaccaagttttgaacgccaacgtggtttcttgcaaacacaagcggtgggcaagtgagaacgcgcgacatattttctctgatccaatcgaaggatttaggtctcgattctaacaatccaattaacccaagattagcttcagattcaagcaacctaaaaaggaataatcgagacaaccccgtgagctcgatttcgctaacccaaatccggagataaaccctaaaaaatctcgacctagagcagacagtgagggggagaagatagctaagcgcgtgtggtgaataaaaaaaaaagtgaagggtaaggtccatatttatagacgcttgagagttgagatccaccgactcgggaaagtcggtcacattgaaggtgttttcgtaagttcacattagagaaaaggaaaacactaatcaaatatcgtggagggtatattagtaaattacatagacgactactggctcggtccgagtctccgatatttgatacggtttttctaaaagaccttttcaccccttgacttttttctctaataagtacaagatggaaacataggcctaattttggttattgggcattagaattcctcttaaaagcccacatgtatccgaaacactaaaaggcccgttctcgtcgaaacgatgccttggttttggaagttgtatctcatcagtttcttacaaacgcgtttgttgtatctgaacattcgcgtctctatgtttcatacatttctgattttccctataagttcaatacactagcaacgtcgatgattagggtattataatctcttcgtcacacacatttctttgcatctacatttgtaaaagagactctctcttcttcttttggtctatcaaagatg

SEQ ID NO: 34453 - DNA, 3000 bp, Unknown
  misc_feature (1)..( 3000): 2750-1469P.txt file - cDNA_ID_3078355; gDNA_ID_1620815; Annot_ID_169203
atgctcgatcgtattcatgagtcacattgtttttcatccatattatttgcaacagaaaaatccataatactgtcttttaaaatatgaagtattaagattttcaaaaaacatttcaatagcttattttgataaataaagcggttgtaaatttacattatacggtttccaaccgtcttgtttaaggtcctaaccgctttttcaattacgttactatgctatctaattaaagctagtactttttttttctagcaatattaatcaaacaagctaagcatagtcctgtataattttttttttataagaatgtaaatattcattctcctgtttaggcatagtcctgattaattgaatgccgagaaattctaattttttaagctatggtccgaaataaaatccgaaatgattattaaggtacaacttgtaaacgaacaaaataatactttttaaaaatgaggtaatgaacaaaggaaatgattcgcactagcagtacgaaggtaaattggctccaatcctatattcaaatcctagtataaacgatcatatggtaaaatatgtttaacaaaatacggcgattaatctaagtgataatataacaatgacattcacacaaatcacttattttcatatactagtcaataaactatatgaaaaaacagaaattaagagaatagtattaaatgatacaatcacatccacgacgatacaacaattaacaggtgcgcattaattcatgtctctttctcattagatcagacatataccgaattttgttctgttccttaattaagagatcaactatgcgtagttgcgtactcatcttcgcgacctgattttttatgtcgtgcatagggactttactttacaacgaacctatacggtggttttagttcgaatactaaacattgcagcacacagttaatgtttttgcaagacgtgactaagtttttatccacctgtccacatgtgtttcgccttgtatgatcgtatccaccctaaaaccggcaccagaaaactgatttcgtagggaatttgaaaaaattggtcgtttgcgcgctcctttgtttccttacctttgcaacaactaaccatattgtccattaatcttagacaatcattataagttttaactaatgcaacatttgttattataattatactaattcttgatttataatcattaaattatatggattgaaacgagaaaaagttgctagtccctatatatggatcagttcatatccttttaaatgtttgtaccaaaccactaaaagaaaattagtcgtcaacattttcacgtatactaaacataaagaaaagaaaatgtgtcggtttttcatttcgaatcctaaattttttcccgtgtgtgtatgtccaattagaaaattcattacagcttatctacaaacatacaaatcatatcattacctatgtgccactaagaagtcttcatatgaacttatgtctaactataaaaactgaaatttttatcatcttcattaattgtggaaaattagcaacaatttatcattgcgatagcttttaaatattaggctttcaaccccatcataatatgtattaggttgcattaccaaattgttaaataatcttgaaaaagaaaaataaaacgtagcatggtttacattattcatgttcaaaaataaagtgcgcatgtaacaaatatatatataggcactaaaacatataaccgaatgatattatcaaacattttccctctcccctttataaactcagatgtctaggaagtgggtacaatgataaaccacaccgagttacatcatgatgatgtcatcttcacacacacacatgcttaaaaaacgtcacaacctcaaatcccgactcattctttcaaagacggcgtcgtttgcacaaacgggttcttgctgtgtctacaacatcgtcaccattatcaccagtagacgactcagccttctctgccatttccctcacccccagtcgtctcgtcgccctttctctctttttcatttcaataagtctccccgcaaggtctctacacaagtccgttttctcattcgtcatcttcctccaaaattctgcttctgctaacgcttttctcgtacgaatctccatttctccacattgtttcttcatatcttcgatgactttgtcttttaccctcacacaaaagatggctctctcctcgagacttcttaattgaccatacaattctcttgtcatctggttctgcacatgcatgaatattaactataaatatatgttgatgaaaaacataaaaatatcatcgtaatatataagaacagatcaaaacctgtaacatatggttaatgtcttttgcttgttgatgatatggagcaatcaagcctagaggaattgcgggattctgtgggagtggggcatttgcattaactggtgttacactcagagacaacttcgtttgggtttcttgcatctttgatagaccaaaagaagaagagagagtctcttttacaaatgtagatgcaaagaaatgtgtgtgacgaagagattataataccctaatcatcgacgttgctagtgtattgaacttatagggaaaatcagaaatgtatgaaacatagagacgcgaatgttcagatacaacaaacgcgtttgtaagaaactgatgagatacaacttccaaaaccaaggcatcgtttcgacgagaacgggccttttagtgtttcggatacatgtgggcttttaagaggaattctaatgcccaataaccaaaattaggcctatgtttccatcttgtacttattagagaaaaaagtcaaggggtgaaaaggtcttttagaaaaaccgtatcaaatatcggagactcggaccgagccagtagtcgtctatgtaatttactaatataccctccacgatatttgattagtgttttccttttctctaatgtgaacttacgaaaacaccttcaatgtgaccgactttcccgagtcggtggatctcaactctcaagcgtctataaatatg

SEQ ID NO: 34454 - DNA, 3000 bp, Unknown
  misc_feature (1)..( 3000): 2750-1469P.txt file - cDNA_ID_3078358; gDNA_ID_1620815; Annot_ID_169202
ttctccacattgtttcttcatatcttcgatgactttgtcttttaccctcacacaaaagatggctctctcctcgagacttcttaattgaccatacaattctcttgtcatctggttctgcacatgcatgaatattaactataaatatatgttgatgaaaaacataaaaatatcatcgtaatatataagaacagatcaaaacctgtaacatatggttaatgtcttttgcttgttgatgatatggagcaatcaagcctagaggaattgcgggattctgtgggagtggggcatttgcattaactggtgttacactcagagacaacttcgtttgggtttcttgcatctttgatagaccaaaagaagaagagagagtctcttttacaaatgtagatgcaaagaaatgtgtgtgacgaagagattataataccctaatcatcgacgttgctagtgtattgaacttatagggaaaatcagaaatgtatgaaacatagagacgcgaatgttcagatacaacaaacgcgtttgtaagaaactgatgagatacaacttccaaaaccaaggcatcgtttcgacgagaacgggccttttagtgtttcggatacatgtgggcttttaagaggaattctaatgcccaataaccaaaattaggcctatgtttccatcttgtacttattagagaaaaaagtcaaggggtgaaaaggtcttttagaaaaaccgtatcaaatatcggagactcggaccgagccagtagtcgtctatgtaatttactaatataccctccacgatatttgattagtgttttccttttctctaatgtgaacttacgaaaacaccttcaatgtgaccgactttcccgagtcggtggatctcaactctcaagcgtctataaatatggaccttacccttcacttttttttttattcaccacacgcgcttagctatcttctccccctcactgtctgctctaggtcgagattttttagggtttatctccggatttgggttagcgaaatcgagctcacggggttgtctcgattattcctttttaggttgcttgaatctgaagctaatcttgggttaattggattgttagaatcgagacctaaatccttcgattggatcagagaaaatatgtcgcgcgttctcacttgcccaccgcttgtgtttgcaagaaaccacgttggcgttcaaaacttggtcgaatcgactaaggttcgttgagctacagatctggtttcttgcttcagttttttttgtgtgattgatttctacggatttcgtaaaacctgattttggattcgtttttggggaaacttatttcaatgtagtaatctttgaatttgggttacacttcttgtgggtatggctatattttcataagtcgtatttttttctctctgaaaccctatcatgtataaatctatataagctaattatcatgtgattatcattaacactatataaagagttgcatattagttttcaataatctcatcatgtgttcactgtatcagcaatcattaggagtgaatcaggtaagttgcattgttttccattctgttagtttgattttgtaggtctagatatgtatatgattaagtttgtaggagcttctttgtttattgtaatggtttttgcacattgagtgggatggttgaactgtggttctgaaagacgtggagtctaaaaccctttactctaatggattaaagcttaaaagaatcacacttgattcaaaaaaggcgcaccggatagagaagaaggaaaagaaggagaagagaaaagaaaagaaagaaactaagcgtgagaaatcgcataaacattcgattaaagcaactgataatcatcacaagctaatatttcttccttccaagaaagtgtcagatgagtctgactcactagagaagagtggtttgacagatgagcttgaggaacctcaaaaacaccttggatatttgtctgatggaagtcagaatagtaagaagaggattagagatgattctcctccggctgttgaaagtctcatcaaaggtttgtatctatttcttagtagacattcaagaagaagatcatgttgatatctgcttttaggttatttacatgtttattttcacatgtatttgcagctgcacctgtagcaggtaaacctctacggattagaatggtcttcaaaaaaccaaaggaggaagttcctactctgcctagagaggctgttgtttgctccactacagttgcaaagtcgctcagtcaccaagatgtcataacaagttctatctcaagttcaaaaacatccgagcttgaaaagaatctgccgtcaacatcaatagcggcaatagatgaaacaaagaagagaaagaaacacagatctagcaaagaagatcaatacaatgcattgtttgatggttggactcctccttccatgtgtattgctgatgcatcttcaaatgacaatggtgattattggctatttgggaacaagacgcaagaggtgcttaagcccaaagcagcagtcaaggttgatgatgacacgatgatgagaccgggagattcatcttggcctagagctcaatttttgtctgaagttgggatttattctttaccttatactgtcccgttctaatgctcgattctttttgttctagctttagacttagcttgtacagtgtttgactgtttgtaacaacaattctaatctaacccgattttgatacatcaaaagacttcgtaatacttggttcaattccataatcgatcaagtttccaattctaaagatctattcaaatcaatgtcatagccagatcatatgtttcaactctcaaacaaaaacgtacgtacagtgctaaaattttacaattttacaaaattacctgaaaataaacatttgatgatgaattaataaaagcaacaaaaataaaaataaaagagtagggaagtctattattttcgtgcgccctggaaaaaaaaaaagaaactgctgacacacggaggagaagaagaagatg

SEQ ID NO: 34455 - DNA, 3003 bp, Unknown
  misc_feature (1)..( 3003): 2750-1469P.txt file - cDNA_ID_3078362; gDNA_ID_1620815; Annot_ID_169201
aatagagaatcggaggaatatgttatagtatttcataaaaactgcttataataaagagtattcagcttatacataaaagagagctagctacataacacaatctccgacttaattatataccaaagagatttacctagctaattcaactttaaaaaacgaggtcttgtgttgacatctttgaatttttatttattgtacttaggctcggctacaatgtaaaaaacaggcggtttcggagaagaataccaaatgtatgtttccaccaaaattatgtcaatttacaagactgatatctagaatgttcatgctgatcagctagttatgtggttattcaaaaaatatctatagatatcccaattccaagatttgtaaattatgttaatataaacaaaactgttacttctatggagtttgaaccagcgtggcaaaaatttcctgcacccatattaatattaaattatctcaagctagtatctgatgttagatttgtactgtgtatcacactgtacgtatgcttgcttacttattactctattacaacagatatttgtgtgttttcattgttaaataatgtaacagaaatttgtgggtttgactgttctttttactgaatttctcactacttgaagtctaactagaataacatgtgactgttttataatttatagttcgaggttgattcagaaaagtcgtaaaaatctctcataaatgtattaccgtatggctctatattgcatatatgggcccaatgtctcaagtctcaaccatgttttaaattttcagtactaagcaatgcatatgtttttgttagacacaatttttcttctttttttgataaaatgtgagtttttttttttttttgaaatgtgattaattaccaaaatggaaacattgttacttgcaaaaatctttgggacaaatagcttctaagacaatttgttttttaaaaagcctcagaaactaataaacgcaaagattacaaatagagaactattacgagctaggcatgggaaaaccattgagagagcagtcaccgcggcctttgcggtaccttcgagccaggagagtgtctctaattaatgtgctcctgtcgatttgcttaaagacagaggcaaatctgttatggagactgtttgtacttgtcaaactatgggccatcagtcgaccgcagccattgttagacacaattaactatgtgcgccatctattatggagactgtttccacttgtcaaactttagcactatgcctttaaagctttaacaaatgttgaatgactgagaaaccgacaaactttagtctactacatcttatctatatactaattacgcaacaaaaaaataaaaaaaaattggataatgttttaaaacataacatattttactcttcttctatgacagatgaattactacattccaaaataaacaagtaaaaactcttgtttcgtggataagcatgcactaggcagtcaattcatttggagtctcaccaaaccaagtaccccatgggccctggtggcaaaaatggtcactaatcatgatatttcaagagttgtcataatgggccttaattcgctactgggcctcaagtgtgagccttcgtgttattgtcttttctagcttccagttgtgttagtgtgtttgtgcctttgtgttatggcccttatggcactccatattgtcacttgaatcactaatgtaaagtttattcattttcaaataagtcgctttaaatagaagcactagatttcatgatcaatcattatcaaatttcttataaaaaaaatcataaagcctgaaattcatttcatgtaagaatcagaatgaatgggtaaaggtgtttttggttgagagtaggtagaagcgtagagctaactctaaccccttctttagtttggtatgattgaatattagttcatataaatataattggtgaaattttgatgtgtccttggtcctttagaagcaaactgtaataatgcgaccgtatgatttggataaatctaatgtgggacaattcatgatgtgtcgtatgctcattggtaggttgaaagagagttgagcacgttcgtgtaagatttttcgattcttatgtcgtaaagatgaagaaaactctttaaaattacaactataaaaacaaagacaaagacactcttgacaaaattaaaccatattaatttgataagggatttgagaaaaaggaatgaaatggtgccgtaacactaagtcgcacgttcttgacgagagtcgtcccaatccaatgattaatatttggcaatttcatgccctccctccccatagtttggtcgtttattatgctttactcttagttttttttcttaaaaattataatctttatttatttgctgtcttttttttttataattgtcaattaggttaacaactatggtcaaattagaaaacattagtttttgttaaaagaaaattaaaaaaaaaatccatgtttattagtgaattaggtttttattttggtggtagtttagctaatctcataaaacagatagtaatttcataatgtaaaaagatatttctactatacagaaaaggaaaagaaaaaaaaaaactcattacaacggataatttctcaatttgtattcaaattcaaaattaaaagtgctcaaaattagtattatttaaaagaaatactaaagtggggtgagtgtaaatgataaggtgttgtttggtgtagcaaatagctggcataaggttggtattgaaaagctcatctcagaatcatcaacggcccaaaacacattgcaaattaaagaaaaagcaaagattttcctcattcttttgccattattatctctcatcgatttggcttgctacttttgaatttacccgtgttctactacgattcgggattagggttttttcttgagttagaaaagattgtttcttgattcttgggaatggctgggatttgaggaagaagaagtgcaaaagggttctttttttgagtttgtgaatttgctgcggagatg

SEQ ID NO: 34456 - DNA, 3000 bp, Unknown
  misc_feature (1)..( 3000): 2750-1469P.txt file - cDNA_ID_3078403; gDNA_ID_1620816; Annot_ID_169258
ttttctatatgttttgttgtctgcatatatacttatgttagatttttatttttctttgacttttttaatttatttttcggcaagatattgtgtatatatatctacgacattaacgtgaacgtaaacatgaagcttaatctaatttctctttacacaaatcttagcaatgctttctcaaataaaagattttacaaaatcaactatgacggatcaaatatgcaaatagttatgtgagtacaacagagatcatactagttgtattttttaaaaagttgtaattgtaacttgaacaaaaatttcatataaaaatgaatcttcaaatatatacttaagatctatgattattaatttataatattattgggactataattttacatagagatttcaaaaaaattattatcttattatcttatcgattttggttaatttttacattggcccgacttgggaccgataaaatttattaatttatcttatttattaatttatcgagtattaatttatagagtttctactgtactatttatttccaataaaacaatctttcaaaataaataacaatctttttttttttttttcaattactttataaaaattttaaaatgctctaatataattttggacattgctctaacttaaccttttataaacaaaataatatagtcattttgcatattttactgccctttatttagagtattaattcaattgatgtattatttggcacaaggcaaatacttgctaattttcaagtatttatgactcgtcttcatctgaagcaagtactttctctatcaagctctcgtccataatcttattacttgcaagtaactcgattccctttgttacttgtcgactaacttgatccggcttgttacttttaagatacttgctatttaaatataaaaacaatatcctacaatataaatcttaaaacattcataattccaagtttttttatatcttttcagtttggcttttataagttataaactataaatatataaattcaaataagttcttaaaaccccttctatattaaagcaagtaacaagtcaaagaagcaaggtaagacttgtgcttgataataatatattttgagtacctgttatccggcttaccaacgacaagtacttgttttatcaaggcagtaacatgtatgggcaagtaacagatatttgtacagagccttgtgatgccattatctttttataacgaaataattttctatactgctatggcatatacgatatgtaatttataacccaaataacttgagtgagacacaaacatattctaaagatttgtattttcaaaatcaacgaataataggtttttttccacggcaaatcacttatattacaaccattcaaatataattattgagacaaataaagtaaattgaacacaatttcgatgaaaaagtggaaatgaacttatttttcaaacggattcctaacatgcaatataataaatctttaaaatccgctctttatacactcgtaaaagcctaacattttatagatgaaactcctaaatgttttctacatcattttaactaaacaaaaaatttgatactgtttaagatgattcagaaacataattttggaagcatcatacatatctttgccgcctagtgtccattgtttcccttttcatagaaactgaattttccgactgagggaaagagagtgtaaaatgtaaatgtgaaaggatagattagttattagttagtgtaacgtccgtgaaccggaaaatcggttagggtttgtatttaaatcatccggtttaatcggttggattaattggaaaccctagagtgtgcctataaaagaaggaaactcgaaattagggctttagttagccacttttcgttttataaaggaaaaaaagagagaaggagaagaaccagagtcattagggtttgggaaaaaacgattttgacatatcaaatcgttgtcaaaggtaacgaaatttggtacagttattaccaagtcttttatcgtcattctccattttacagaattggattcggatttatattcgttgagttatttgcagtttggtgagacacgttttctcagacgcgaattagcacaagtggggattgtaactgaaatcgtggtttcgtctggtttccgatcggcacgaaattttgtgacgtctaaggctagcgtttcaccggagggatttgatagttaacgattggtttgtattttagggtttcgtctttgagactgtttgtttctgtttttcatgtccagtttgcttcaaggttgcttttggttgtgacttgttgtaggacgtttttggactgtttcagacgcaaggagagtctctcctgggtttaattgttgttagaatcaatttgttaaggtgagtgcgtgaccatgagcttatctgagcgattggattgtataatttgttttgtgtgatgatatgtaggtgcagtgaatatgtttttgggtgaattgttcaatgactggtttgtttatattgtatttgtgattatatccctttttttgcttgtgtgtatagctcgtagatgagaggatcgcctcactaagtattagtgataatacttacgcatctctttctttttggtgcaggtaaagataaagtatgatcgtgaaatcatggcaaggaagagaggatgatctaggaactcatttggtttattttagtgttttggttattagaaccggttagggttgtgttagaattgttattcattcttggttttgttggttgaattatttatttattcataaaatagtattttttgacttgcggtttaattgttgctttattggttggtttaattaaatatttatgggaatatttaattatgttttaagaaaaacgggtcgggttgtttcaatttggtatcagagcgattacggttctaggatgtgtagaaaaattaattgataaattattttcctaatgattgatgtgggagaagataggatgttagcatattgaggattgattatg

SEQ ID NO: 34457 - DNA, 3000 bp, Unknown; identical to SEQ ID NO: 5778
  misc_feature (1)..( 3000): 2750-1469P.txt file - cDNA_ID_3078413; gDNA_ID_1620817; Annot_ID_169323

SEQ ID NO: 34458 - DNA, 3000 bp, Unknown; identical to SEQ ID NO: 5777
  misc_feature (1)..( 3000): 2750-1469P.txt file - cDNA_ID_3078418; gDNA_ID_1620817; Annot_ID_169319

SEQ ID NO: 34459 - DNA, 3003 bp, Unknown
  misc_feature (1)..( 3003): 2750-1469P.txt file - cDNA_ID_3078433; gDNA_ID_1620817; Annot_ID_169304
agggtctctcctagatcggcagaactcggactaatctggacaaacattaatgtcttgcaatctccacctgtataagtcacaatgaaatagaaacaccatggagatgaaaaataagatgtcttatgaatcatgtggccataacaacggaagaaaataggacaaatgttactttacccaaagagttttgcagcatatgggtcagctttgagtttctggagtttgacaaaaaggaaggaaaaaagtgtcatcaacatcaatcagaaaatctcatatgcaaatgtcttaacaaaggggaagaaagaagggaaaaacctgtaaggaatgtggcttgttttggatgcaagggcagagataacatcaccgagtgctgaaagcgacttattgataaattgagattctttcagcctttctccttcaacttctacctttcctactcgctcactgccagccaagtccactaaccaaagatgacttctcgttctctgaccatttatcaaattctctcccttcactgtcactcgcagcaagctgaacaaaaggaaatctcttgttggtataagtatggaaaaggtttagtttcacatgaatttagtttctaaactctagtttgcttaccaatgagagcggctgctttgctcatttgcagcagttgaacccacagatcgaacagcatatcctttcttgagcagatcccacactccatctgtattgtaaacttgagcttcgactaatcctgggacttcttgcgtcccttctgctgattgcttaacctccaacctttatcaacacagcacatagtgttattttgctttttaacaagaaagatagaaactgtaaggcgatttattctactaccaaataatataatggaagacctactttttagggggctggtttgagttatctaccaagaggtcccttatcttctcattataaacctccaacatgctaactgatagctcaaacttcatgagatgacttttgctttctgaacagcgaaatagttcttctaaggtcctatagttcactcctctattctctggtgttccctccatggtaaatgtcttgccagttcccgtttggccataggcaaatatgcagacattatacccatccagcaccgaagtaactataggttttgtctgtgcaaaaacagtctctgcaaaagaaggtacagtcagataagaagactcgttggtgtagtgttcaaagagcaaaggtttagcgaaataaagttgcaaaggtagcgtctcaattaccttggccatcgtcaggcttaaagacatggtcaaatttaaaatgcttcttggaggaatcagatgaaagtatctggagctcgttttcctgtgttgtatcaaactcagctacagaagcacaaccattggctatttcagcttggtttagaggtctgcatctgcaaaagactctgatatttcccttgagttcgatcacttcattgtataatcgtttcctctctgatgactcttccaagtactgtttttcaagagctccaagcttagtagcttccattaaaacacgttgaggcatattagttaaccaaatcaaacaagttttgtatttagagaatctttgtcgaagaaatcagattcaaagtactcactgagaagctggagagcccttgaaatttctggttctactaaggaacaattcttgatctcttgcacttggtttgataccaacgcatgttcatccttcaagatctaagacatgatatagaacataaaacactagcagagactgaaagcaaatctgttgaaaattcatatttaagttcatcttgaaataacctcaacttactattgcaactgagaactcagaaggaactattgtaactgtgtttattcaagaggatgacaaagaaagtagtagtaccttaattttgtcactgcagtcgataattttctgcaaaattggaagtgttggtccattggcaggagaaacttcttggtttccacttgtaatagtatcctcactttcttccactatttcagccaaatcagtaatgcatcatatcagagtcaaagacacaagtgaatctaaaaatacatactacagtctactaaacaaagtacttgttaacagagtttcagattcatgggataagttagggacccaaaacctaaatcgttgataactgaaggtgaaccaatctttctgaattccaaaacaaaatgctaaaacctaattggattctcttcagaacaaatccaaaagaaccaggaatctcagagatataagtgtttgagatgtcaattcacaatcagagactaccaattaacaatcgaacgacttgtacactaatttttcaattcacgacgagaaaaccccttaccagcgtcggaattgtgattgttgacagaaacttccttcgattcacacaacaaaccaccatcgttgcaaatttcttgatgttgatctggcaaaaaccgaagatgatcagcgaaacattaaaaaaaaaaaacagatcaatcaagaaaaccataaatctgtaagaacatgaatcagaagagcgacgacagaaacaaagtatagtacctctttccatggcggatttgtgcctagagaacccaaagaacgttgaatccaaaattctgaatcaaagagagcgagagagagaccaagagagagtgagagatttagagagagattgagaacgagtgtagacgaatttgaatttaggagaataagagccgttggatctaaagaagctttgtaacgtctatattttattaccattcgttccacaaagaggagcgtcataatccggatccgaattcgtttattattcgtttcacttgaagtttcaaacctctcttttccagcagagagaaggataaaagttttcacaaattaagtaagacccctaaacttctattttatttataaagagccacaaatattataatttcacaaatacacccatgtgttccagttgtttgagtaaaatctacttcaattgatttgccaaaggcttgcctcatg

SEQ ID NO: 34460 - DNA, 3000 bp, Unknown
  misc_feature (1)..( 3000): 2750-1469P.txt file - cDNA_ID_3078437; gDNA_ID_1620817; Annot_ID_169300
caaaaaattcatgattttgatataccgatgaataaaagaaaacaaattagtaagtaacaaacataaaaacatatgattagggttaactcgtgtcaactaagatgagactcaaactttttggagttatggaaatcacgcaaatttctgagttttggcaactcggaatcgtgttttttcttttgttttttctcaagacttatacttttttcatttgctgtattttgttattgtctgtttttctatagattttacttttttctctgctacttgtattatctgtaatttctgtcgaaactcgaaaatggtataaaatcttttacattttaccccaaaaaaaaaaaaacatatgatataacagactgttacctcccaaaaggaagaaccacgaccatttatcgttcctgaaccatcaatcattagaccaggcacacctgaaaaactaatccacgtttgagatttggggttggaccatgatgtgatgttgctaggtgcgacaatgataccatccaacttcaaatacataaaataaaatacaaatttgttggtgttaacatttcttagataaattaattaactatgaacatacctgaagttttatggaggtagatttacaaggacctttgaactcaataggttgaagtaaatatgtttttccagagggaataaaaagtgtatttatgttttcttctccaccacatgtagcgttccatgcttgtaaaaaagccttttaatataatatcgttaattaaaagtagcaacactatttgaaaaagaaatagtaattaattttaagaaaatatttatcaaaaattcatatattttagtgataaaaacaaataacttacatttgaatcatcggtttgaccatctccttcagcaccaaatttgagtacattgtaaatttggccgtttacaagaccaaaacagataaaatttatcaatatggatatacgtagtatggtttcctaaaactcacaagaatgaaaaagttagaattatcaagtagcaaacaaatactattttaaaaaatatattgatttgatatgtaccattgtgtagataaagatgatgaaaatatattgaatgtataggtattaggtagtttaggtctctctatgtatgtgtttccatcatgtatatatatacacaaaaatgtgcatttacgttcatcgaatcatatgattattctttctccattcctagtccttttttttggtaaaaattcttcctcctgtccatatactatataggcagcaatcgggagtatctaatttaggaagcaaatgatttaggcacaattaaagtctctttttctagtttttttaaatcaatgaacgtaacgcaaatgatttaggcacaattaaagcaaatgattctagtttttttaatcaatgactttaatttaggcacaaaaatgtgcatttacgtttattgaatcatgcatactaaagtcttttctagttgttgaatacattgaagtagacatctccctcttattaagtgttgaatacagtgacgttaaacaaaaaaaacatgttccatacaacatcgctatagcaatatgttttatttattacaagattatgatttagtttcataaaattatacaacaaaatatcacctagctagtgacaatgtcattataatacaggaaatgacatgagaccatgccattgagtggtaacgcggacgaatgcgggtatatcaccgttcttttggattgtaaccatgtcttccattcatgattattcttacaacattgcgctttatgattaaaaaaaaaagtagaaaaagaaaaaagaaaaaaatggttcagtttacatagtaaaacttggtgaacgtgaaccgcatgggtgtgtgatacaccagttttgtcgttgttatacttttcatgtacagtccgtgtatttattttttcgtctaaaatttgtattgattttaacttataatcatattatgcagtaaaatatttcagctacaacatttatgtttttaaccatttttaatatgtttttactatcaatttgtttcgcatcattcattatattttttttacctgtctatttcaacatatattatatactgtattatcctttaattcatattttctgtataatattcataatttacttttaaaactacttgatttttttgtttgtttgatcataccgtctgacccgtttacatcatttaaattatggttagacgttagggttcagtttgggtttttcaatttttttggatttttaggctcatatttcatgttaggatatttgtaatatttgggctggaatggatacggttcagtttttcatagttcgttttcgatcagattttactatttagattaacttttatctggattcgatccgtattcaaaattacaagaaaaaatattgaaaagtatttgaaaatgtccaaattctataaataaaactcggtagaaaaaacaaataaacaaattatctaaaatattggaaagtaactaatttaatcactcaaattactcgaaaatatatgaattactcaaaactatataatatggattgatgactttacttaattttaatttttttcggatactaactagttcgagtttcgattcgaattatatattatccgatacccaaaatacctaactctaagattcatttggatatttttttggggaattttctaatcaaccttctttggtagtgtttcgattaagattcgaattcggcatttttgcctagccctaattcgaaataatattgggtagaggccggttttaaacatgaaaaccacgtggcccgactttgatattatcgtttacattctatgatttgaccgactaaaccaaaaaaaggaaaaattgaaaaggatgacgtcaccatcacaaaaaacaatcttacacggctttttgtttaaaatcccaagacgaaaatcattctcttgtgatcgcccataccatcaattatcatttctctcttcgaagaagaagaagaagaagaagatatg

SEQ ID NO: 34461 - DNA, 3000 bp, Unknown
  misc_feature (1)..( 3000): 2750-1469P.txt file - cDNA_ID_3078437; gDNA_ID_1620804; Annot_ID_168786
acaaaaaattcatgattttgatataccgatgaataaaagaaaacaaattagtaagtaacaaacataaaaacatatgattagggttaactcgtgtcaactaagatgagactcaaactttttggagttatggaaatcacgcaaatttctgagttttggcaactcggaatcgtgttttttcttttgttttttctcaagacttatacttttttcatttgctgtattttgttattgtctgtttttctatagattttacttttttctctgctacttgtattatctgtaatttctgtcgaaactcgaaaatggtataaaatcttttacattttaccccaaaaaaaaaaaacatatgatataacagactgttacctcccaaaaggaagaaccacgaccatttatcgttcctgaaccatcaatcattagaccaggcacacctgaaaaactaatccacgtttgagatttggggttggaccatgatgtgatgttgctaggtgcgacaatgataccatccaacttcaaatacataaaataaaatacaaatttgttggtgttaacatttcttagataaattaattaactatgaacatacctgaagttttatggaggtagatttacaaggacctttgaactcaataggttgaagtaaatatgtttttccagagggaataaaaagtgtatttatgttttcttctccaccacatgtagcgttccatgcttgtaaaaaagccttttaatataatatcgttaattaaaagtagcaacactatttgaaaaagaaatagtaattaattttaagaaaatatttatcaaaaattcatatattttagtgataaaaacaaataacttacatttgaatcatcggtttgaccatctccttcagcaccaaatttgagtacattgtaaatttggccgtttacaagaccaaaacagataaaatttatcaatatggatatacgtagtatggtttcctaaaactcacaagaatgaaaaagttagaattatcaagtagcaaacaaatactattttaaaaaatatattgatttgatatgtaccattgtgtagataaagatgatgaaaatatattgaatgtataggtattaggtagtttaggtctctctatgtatgtgtttccatcatgtatatatatacacaaaaatgtgcatttacgttcatcgaatcatatgattattctttctccattcctagtccttttttttggtaaaaattcttcctcctgtccatatactatataggcagcaatcgggagtatctaatttaggaagcaaatgatttaggcacaattaaagtctctttttctagtttttttaaatcaatgaacgtaacgcaaatgatttaggcacaattaaagcaaatgattctagtttttttaatcaatgactttaatttaggcacaaaaatgtgcatttacgtttattgaatcatgcatactaaagtcttttctagttgttgaatacattgaagtagacatctccctcttattaagtgttgaatacagtgacgttaaacaaaaaaaacatgttccatacaacatcgctatagcaatatgttttatttattacaagattatgatttagtttcataaaattatacaacaaaatatcacctagctagtgacaatgtcattataatacaggaaatgacatgagaccatgccattgagtggtaacgcggacgaatgcgggtatatcaccgttcttttggattgtaaccatgtcttccattcatgattattcttacaacattgcgctttatgattaaaaaaaaaagtagaaaaagaaaaaagaaaaaaatggttcagtttacatagtaaaacttggtgaacgtgaaccgcatgggtgtgtgatacaccagttttgtcgttgttatacttttcatgtacagtccgtgtatttattttttcgtctaaaatttgtattgattttaacttataatcatattatgcagtaaaatatttcagctacaacatttatgtttttaaccatttttaatatgtttttactatcaatttgtttcgcatcattcattatattttttttacctgtctatttcaacatatattatatactgtattatcctttaattcatattttctgtataatattcataatttacttttaaaactacttgatttttttgtttgtttgatcataccgtctgacccgtttacatcatttaaattatggttagacgttagggttcagtttgggtttttcaatttttttggatttttaggctcatatttcatgttaggatatttgtaatatttgggctggaatggatacggttcagtttttcatagttcgttttcgatcagattttactatttagattaacttttatctggattcgatccgtattcaaaattacaagaaaaaatattgaaaagtatttgaaaatgtccaaattctataaataaaactcggtagaaaaaacaaataaacaaattatctaaaatattggaaagtaactaatttaatcactcaaattactcgaaaatatatgaattactcaaaactatataatatggattgatgactttacttaattttaatttttttcggatactaactagttcgagtttcgattcgaattatatattatccgatacccaaaatacctaactctaagattcatttggatatttttttggggaattttctaatcaaccttctttggtagtgtttcgattaagattcgaattcggcatttttgcctagccctaattcgaaataatattgggtagaggccggttttaaacatgaaaaccacgtggcccgactttgatattatcgtttacattctatgatttgaccgactaaaccaaaaaaaggaaaaattgaaaaggatgacgtcaccatcacaaaaaacaatcttacacggctttttgtttaaaatcccaagacgaaaatcattctcttgtgatcgcccataccatcaattatcatttctctcttcgaagaagaagaagaagaagaagatatg

SEQ ID NO: 34462 - DNA, 3000 bp, Unknown; identical to SEQ ID NO: 5785
  misc_feature (1)..( 3000): 2750-1469P.txt file - cDNA_ID_3078447; gDNA_ID_1620818; Annot_ID_169335

SEQ ID NO: 34463 - DNA, 3003 bp, Unknown; identical to SEQ ID NO: 20849
  misc_feature (1)..( 3003): 2750-1469P.txt file - cDNA_ID_3078455; gDNA_ID_2214452; Annot_ID_182603

SEQ ID NO: 34464 - DNA, 3003 bp, Unknown; identical to SEQ ID NO: 20849
  misc_feature (1)..( 3003): 2750-1469P.txt file - cDNA_ID_3078455; gDNA_ID_1620818; Annot_ID_169332

SEQ ID NO: 34465 - DNA, 3000 bp, Unknown; identical to SEQ ID NO: 5789
  misc_feature (1)..( 3000): 2750-1469P.txt file - cDNA_ID_3078480; gDNA_ID_1620818; Annot_ID_169359
